United States Patent Application Publication US 2007/0161031 A1 - sequence listing, part 24

SEQ ID NO: 30052 - DNA, 2300 bp, Homo sapien
ataatagtaataataataataataataataataataataataattgattttttaaaaaaacggtgacactacaggggcatcacttctttattgtacagatttttctcttttgaatttgtttatatttttctcatttgttcttttttcacattttaattgttttatgtctgcaaggacctacttgtcaatagggctttacatttcattcaagtggcaatccaacacaattttcatccacttcatgaaatcgatcacatctttctcaagatcatttcacactaaagttcaagcatgtttactgtatcagaaaatcagtgggtgagatattggaacaatggctgaagatagacactagagtgaagcatggagaaatggttaaggggaaagtaattctagaagtggttggttcacttaggaatatttgtgttctgacaattcttacttgcctagacagcattgtcacttcaggaactgacatattgaatgacatgataacgtgaatctccttgttgactcatcagttaatatcataattttacctcattatgtatacaaatattaacacttgggttaatttgtaggtatttctattttatttttatttcaataggtattgggggaacaggaggtattttgttacattgataagttctttagtggtgatttctgagattttgatgcacccatcactggagcagtgtacactgtacccaatttgtagtcttttatccttcactcccctcccacccttccacctgagccccttaagtccattgtatcatacgtatgcctttgcgtcctcatagcttagctcccacttataagtgagaacatacaatgcttggttttccattcctgagttacttcacttagaataatggtcttcaactccatttaggttgttgtgagtgccattatttgtttcctttttatggctcagtagtattcaatagtatacattttctttattcattgattgatggacatttgggctgtttccatatttttgcaattgtgaattgtgccgctataaatgtgtgtgcaagtgtcttttttatgtaatgacttcttttcctctgggtggatacacagtagggggattgctagatcaaatggtagatctacttttagttttttaaggaatctccatactgctttccatagtggttgtactagtttacaatcccaccagcagtgcataagtgttcccttttcaccacatctatgccaacatctaattttttttatttttaaattatgagcagtcttgcaggagtaaggtggtatcccagtgtggttttaatttgcatttgcctggtaattagtgatgtcaagcattttttcatatgtttgttggccatttttatatcttcttttgagaattatctattccttagcccactttaatggtattatttgtttttttcttgctgattcgtttgagttctttgtagattttggatatcagtcctttgttggatgcaaagttgttaaaattttctcccactctgtgggttgtctgtttaggctactgattatttcttttgctgtgcagaagatttttagtttaattaagtcccatctatttatctgtatttttgttgcatttgctttgggttcttggtcacgaagtctttgcctaaaccaatatctagaaggatttttctgatgttatcttctagaatcgaatttttagagtttcagatcttagatttaagtctttgatgcatcttgacttgattttcgtataaggcaagagatgaggatccagtttcaatcttctacatgtggcttgccaattaacccaacaccatttgttgaatagggtgtctttccacactttatgtttttctttgttttgtcgaagatcagttggctgtaagtatttggcattatttctgggttctccattttgttccattggtctatgtgtttattttcataccagtaccattctgttttggtgactatagccttgaagtcaggtaatgtgatgcctccaagtttgttccttttgcttagtcttgctttggttatgccagctctttcttggctccatatgaattttagcatttttttttctaattttgtgaagaatgatggtggtattttgacaggaattgcattgaatttgtagactgcttttggcagtatggtcattttcacaatattgattctatccatccatgaagacaggatgtgtttccatttatttgtgtcatctatgatttctttcagcagtgtttagcagttttgtagaggtctttcgcctccttgttaagtatattcctaagtgtttg

SEQ ID NO: 30053 - DNA, 2300 bp, Homo sapien
aaaaaaaaaaaaaaaaaagactgttctcactaagcttactcaaatattatattcaacaaatatttgcaaatactaataacttaatgattctttcctaaacctcaggtcctgtgctgggcgttttatatgtttttctcaatcttcacaatgatcatgtgggatagatgctactgtcaacatccatattttggagaaaagacaaccgagacttaaagaaggttaattctccaaagtcacaaaatgagtatattcaagtgtgttaccatggtagtcagttactctaatatccaagtttgctaccaagtcagttactctctctagttcctttatctgtagactgaagttgtttcttctctctcctttaaacttctcttttgcctggtttactgaccacatgatctcagtggagaggtaaatctgaaagtggggaatttctttttttgaggcagagtcttgttctgtcgcccaggctggagtgcagtggcgtgatcttggctcactgcaagctccgcctcccgggttcatgccattctcctgcctcagcctcccaagtagctgggaccacaagcgcctaccaacacgcctggctaatttttttgtatttttagtagagacggggtttcaccgtgttagccaggatggtctcgatctcccgacctcgtgatctgccgcctcggcctcccaaagtgctgggattacaggcgtgagccaccatgcccggcggaaaataggggatttctaatgaaggccaatggatgaagacatttcctggagtataagggcatttatgtgtcttactacacattgacaatttgcctgtgcctctccatcactttctctagttggtgcctctgacaaatttttttttgattatatgctgtatatgaaaatccagagtcatgtttgaatatatttggctactaccttattatgtgctgcatatgaatatcagtttcacccactcaggtcaaagaaatgtaagtacagatagagaaacatatcatgcctttaatctgtcaaagtggtagaaatttaatatcaacttgcagctcccatctttctcctatgctaaattacaaggcattaggggacagagtgggggtttgagagcccctctggtccttgagtcagctttctctgtcggttactgttgagaaatccaccatttgctggtcccaggccacgttaatagttccactcatgttattgttaagatgtccctgcttcctgtccatgaatttctgtgttaaacctgagggttcagaatcattgttgcccctgtgccacacatcatctgcaatctccaatgctgtccatgaccttatctgcttgagtgatgttccccaaatttcagtctttttcctactatacccacaattttttattcattttttgacatatctggtatcctcagtattattaacttaatagtttttaaaataagtgaaaagaatttaaaaggaacaacattgctgcaatagaaaactagtatcacttgtcataaaaagaaggcagctacaaacacattttatgaaacccaaataatatcattacattcttgatggatactgtctgccaggtcacatacttcttagcctaaacttatgcaataaaaccagaaggatgctctgctccaatgggagggattctgggagagggaaataaaatgggtcaacgtttcacaagtagaatcccatttttgttcatttatacttagatctagaggcagggtggtgtgatagggaaagcacaggcctaaaagtcagatctaagttatacaagtcacggtcattgactcgagatgaccggaaacaggcccgctttactttctggaccattctcccttcctccctaaaatgcaagaatccaacagcctagacttcccttctgcgtaccggcttgccctgaggagctgaactacatctcccacaatgcgccgcgcgcggcgccaggaatgcctatcgccgcctcagacagctttcagtctgtccctcctacaactcccacaaggcccctcggccccgggccgcggcccggcccggagtgggggcgggcggaggcgcgggagttatggagggggcgggctctgcagggaagtgcgtcagaggaggcgcggggagagtagggtgctgtggtctgagctagagggtgaagctggcggagcaggaggatgggcggtgagtgagcgggacctgcgtcgccgggcaggggtcgcgtcgcggttccatgttcccggcggtttgaagaggggcccccttcccgggcgtggtcgggctgggcgggttccgagcggcggattt

SEQ ID NO: 30054 - DNA, 2300 bp, Homo sapien
gaaattaaatgaattgcgcacagcagccagggacacaggagaaggcaggctcaggcccacaaatcaactccagagtgacttctgggactgtcccaggtcagaggagcctttatccttccctgacctcagcttacttgcctaagactcaggtgacactagaccatatcaggaggaagagggaaggaggaagtacaaccggcaggatgattctttttaatatactaattactgaagaaataacaattcagtagggccaggcttggtggcccatgcctgtaatcccagcattctgggaagccaaggcggatagattgctcgagctcaggggttcctgaccagcctgggcaacatggcgaaaacccgtctctacaaagaatacaaaaattagtcgggcatggtggtgcatgcctgtagtcttagctagtcaggaggctggggtgggaggattgcatgggcctggcagtgagctgtgttcaagacactgcactccagcctgggtgacaaagtgagaccctagtgagaccctgtctcaaaaattaaacaaacaaacaaatgaaaaaacaacttaagaaaggacttcaaatgtttaatgactatattttcatctacaaacatacatttttctatgaatagcaatatcaacctgaaactagaattctgaagattaaatcagataggagagaagaatagtgcaagagagccttgagtcactttgaccagtaaagagctgaaataaatggagtccgtttcaaaatgtgttatattttactatggtcatcataatataaaaggaaacatatgagagaaaaatgtgatagaattctttctgttttagcctgttccccaagtgttttaaatgtactaaaaaatcttcccttttatagtgtccatgctggcacctccatcatgatgtcacttataggtatatctgttgccagatcagcaatcagcaattccaaaagtgatgttcacccatgtgtggaggtaccagaaggccatggctcagaagctaaaaaaatcagtgctacacaggtgtggtataatgaagagaagatcagaggggatccagagtctgatgaagcgtatttgagggttaatagggagaaaatctcctaatcaatgatgttaactcttaacaaaagagaacttcactggttgaattacaatagcagataggagggtaaaaatagcaacttgagattgttaaacctgtgtttgtaagttacataaataacaacaatacctgaagttagaccccaatgaattcatttctactagatatgctggataacaaaaagaattttctgaatcaaacctaataaactacaatttccaaagcaccaactatatgcaagatgctatgcaagttgtagtggaaaacttaaaataataagagcagaaaacgtggtcccagtctttggggggggatttttaaaaacttatgaaacaggattgactacatgtcaaatgaaagagccacatagatggggagactctcatgccctaaatggaatcatgttgtttgacctagttgtatactggtatgatttgggaaacttttcattcactctttacacaatgaaagactagttttcttcctagttcgccaacaaagtaaataaaaagaatacattatcattgccttacaattctaaaagcagaacaatatcttctatgtgaaacagaaggctagatcaaaataaatttcagtgtcaaaagcaaaggaggtctttaaaggaagtgaaaaaatcaagttaattcacttcttaattactggccttaaagaaataaattgaatatcttgaaaaaataactcaaaaagcacctcagtttcacgagcaaatgcaaattaaaaaaaccacaaccacaaccaaccaacaccaatcagagtggtgctccttgtgtgccctttctgaggattggtagaaactgcattttttaatctcggctttcatgtttgtccaagatctttaaagggaggggaaaaaagagagagagaggcaggcactgtataaaagaagcttccttgaggtttctaaaatttatacaaaaacatcatatgtaagtaaactcaccagatttggcatctgctctttggtgatggacccagaagaaacttcagtttatttggattattactatgctacgagcccaaactctgacatcagggagacccactcccatgttccttacacctctgtcttccttccagtcttttacacagctgtgttcctgactggagtgctggggaaccttgttctcatgggagcgttgcatttcaaacccggcagccgaagact

SEQ ID NO: 30055 - DNA, 2300 bp, Homo sapien
aagtatcccacttgggaacaatttgaacctccagaaaggtgatttaaactcacactaacaaagttattgaagcctttcttaagcattgaataacagtttgccagtagggagggtgctaggaaccagaggaagaaaggagtgaggcccttcgtatagagaggctaaggatgagagggatggaaacctggaatctagtatgcaatttgctcaggatcagcctttgtgaccgggcaaatgttcaaaacagtctgttcttacttagctttaactaactttatgggctttactaactttatgggtatttttagcagaattagagcaataatgagggggtttcttacaaataaacgtaccagggaggttccttttcatttgatgaggttcatttatcatcaccaggcccagcccaaccccatcacaggcatccagtagaggccatcaacccttcctacaatgacaattcttatttcccttcctccacttctaacttggcctcctggcaggttgcactatgaccaaaagctaattgtttttcttccctaaaagtcgcttagtcacttctcaatccaagcctttacttttcacagattctcagtggtgaggcttcggcaagcacacccaccttgctaacatcatgtcccagtgagagctgccaggtacagttgtgtgtggacaagatgccaattgatctgactcaaaagccattgaagttccatcagtgcatcctgccacaaagaaaacacttgtgggaaaagctaccagtggcttaaattattatctactactagaaattaaaatcatcccggagacttatgggacaaattagcccatgacaatagttctcacacttttacgtccaggaaccatggagctgtggtatggttacaggggagacaaagacctgcctgtcaaatctattagcttctttcctcatttctttaaagggtgggggaagggagacagagtaggaggaagtgtggatatttgccttgcctagtttgtagcagttgttgtaagtattaaacgtgagcaatatttgggagcaccctacagtagtagaataactattttttaaattcttatttgttaatcaccaaaacacaccaagtcaggaattttctactggttaaccaaaacagtcacgttgcttttcctttttctaaaataatcaagtaggcactatagaagcaaggcctggggaaaccttttttttttttttttttttctgagacagagtctcactctgtcacccaggctggagtgcagtggtgcgatctcggctcactacaacctctgcctcccgggttcaagcgattctcctgcctcagcctcccgagtagctgagcctacaggtgcacgccgccacgcccggctatttttttgtagttttagtagagacagggtttcaccatgttggctggtctcgaactcctgacctcatgtgatccaaccgcctcggctttccaaaatgctagcattacaggcttgagccaccgcgcccggccccagcctggggaaatcttaaggacagaactgtgatgtggactcgatcacagaaagtcttctcctcgactctcttccgagtccattactagcttctcccactctctttagaaaaccatccttcagcaaagagtttcccagcctgcccatcccctctaaaaactctagaggaccaggacccagggcgaagggcgggtctatacagatcctgagccaggctctgtattcgcaaatcctgtttgaaaatgtaagcgggactgggatctctgccacatttccgccccagtccgccctcagcctcccagccctactctatcttctctccttggctgagtaaacagccgacccgaggttgtacgtgacaagaaagcctcttttatctctcccgtcccttccacagcaccgtccccgccccactctcttcccttcggaccagcccttctgggcgcgtcggattcttatctcccgccccgcgcagggacgccgcaggcggcgataggatccggactacagctcccagcgcgccccagttcccgcccccgcctccggagcccgacgctgcagcggctcttctcgaaaggttctttccgcctgtgcagctcgccggctcaatactccgggggtctgggtggggggctcaaacgcagggctctgggacgcaggcactgctccaggtgatagtgcgggaacatggccttgcagctgggcaggctgagctcgggcccctgctggctcgtggcgcggggcggctgcggagggccccgcgcctggtcccagtgcggcggcggagggctccg

SEQ ID NO: 30056 - DNA, 2300 bp, Homo sapien
taacccagagaggactaaaaacttttaattccatcaccctacttaagcctttgtcagtttccacaggaatataaaatatttatataatagcaatcatgtgcccatacaataatatatcttgaatttttaaaaattaatgttacactgatcaaaagcccctcccatcacagagagttacatagcagtgatatctcagaaagaacaatgattttggcctcaggtgctttcctttgagtcacagctccaatgtaggcagcacagccctagaccacctgactctgttccttcctttctaccatgactggcttgcagggtgagtgagaggaacagatacaatgcatggtgggtggctgactcatggtgggcaatgactggtagttaatatttttagcgttatttttaaagtcaacattttacttcctgaattgatggttttgggggcaagcactgtgccaagccttctttacaacagagactgttttaatcctaatcacccttcaagactagctgtattatctcactttacacctgacaaaaaatgaagcccactgtggtaatgccacttgcccaaagtcacacagcaggtcagcagaagaggtagcttttgaactaggttggggtcaacagtagtcactactggccactaccaaatatgaaatacaaacgtcacctcagaacagcagatagcctctctccttagcacactgctttgcagattcaagaagtccagaaggccagagtggatgaggtgaaatacagttttagtttttaagatcatgaacaaggggtcagtgaagaacccaggagaaattaaaagagcaaagtaaacctcaacaccaattagttcagatagacaaattccctaaaactctttcactatcctgatgtctcaagagccacgtttaaaattacaaaatctgtgtgggttatgtcaaaggcaatctgtagaaagggcaaagaatatgaattatctgaacccattgagttttttgtttgtttgtttgtttgtttgtttgttttgagacagaggctcgctgtgtcgcccaagctggagtgcagtggcgccatctcagctcactgggttcaagcgattcttctgccccagcttcctgagtagctgagattacaggcgcgcaccaccatgcccggctaatttttgtatttttaggagagacggggcttcaccacgttggtcaggctgatctggaactccggacctcgtgatccgcccgcctcggccttcgaaagtgctgggattacaggtgtgagccacggcgcccggccattttttttttaaagtaaggttgggaaaacaacaaatgatacctcctagggctgttattacaattaagacaaataccagagcactttggcaggtggaggcgagcggatcatttgaggtcaggagttcgaaaccagcctggccaacataatgaaacctcatctctactaaaaatacaaaaattagctgggagtggtaatcccagcctgtaatcccagctactcgggaggctgaggcaggagagtcgcttgagcctgggaggcagaggttgcagtgagccaagatcatgcccctgtaccccagcctgggtgacaaagcaagattctgtctcaaaaaaaaaaaaaaaaaaaaggacaaataccagaaagcccatcacagatgaaggactttgttccagttcgtgacacattgccaactttgaattacatccaagtccgtgggtcttctctctggggtcaattgatggcacgtgattacactgctcagggcccaaaggttggagctatgacttgaatgtttctagacaaggaattatttgacaaacacactttaaaaagtattcagagccatccaagtaagaggacattaataacgtagggttttgcctatggagagaaaagaaaacgcaaacagcacgttccaccttcgttctccctaaagtaatttatctccttcaaaagataaaaagtacgaacacatttgcccttgaagggcagagccccggaattcaggagctctctgaacactcctccccttctgatagggaccaaaccttctgctgagccttgtgtcacagtcagtccgcggcgccacaagcctcagtgtttacttctgccgcctgccagccgggcggggaaggggagtacccggccacccctcactttagctcctgcagctttccaaacaaaccagggcgggatgggagtgtcttcttggctgtggaaatcgatcctcctaccttgtcctgaagccacccgccgcctttcctcgtccctcccttcgcggtgattttccggtc

SEQ ID NO: 30057 - DNA, 2300 bp, Homo sapien
tgggggcaagcactgtgccaagccttctttacaacagagactgttttaatcctaatcacccttcaagactagctgtattatctcactttacacctgacaaaaaatgaagcccactgtggtaatgccacttgcccaaagtcacacagcaggtcagcagaagaggtagcttttgaactaggttggggtcaacagtagtcactactggccactaccaaatatgaaatacaaacgtcacctcagaacagcagatagcctctctccttagcacactgctttgcagattcaagaagtccagaaggccagagtggatgaggtgaaatacagttttagtttttaagatcatgaacaaggggtcagtgaagaacccaggagaaattaaaagagcaaagtaaacctcaacaccaattagttcagatagacaaattccctaaaactctttcactatcctgatgtctcaagagccacgtttaaaattacaaaatctgtgtgggttatgtcaaaggcaatctgtagaaagggcaaagaatatgaattatctgaacccattgagttttttgtttgtttgtttgtttgtttgtttgttttgagacagaggctcgctgtgtcgcccaagctggagtgcagtggcgccatctcagctcactgggttcaagcgattcttctgccccagcttcctgagtagctgagattacaggcgcgcaccaccatgcccggctaatttttgtatttttaggagagacggggcttcaccacgttggtcaggctgatctggaactccggacctcgtgatccgcccgcctcggccttcgaaagtgctgggattacaggtgtgagccacggcgcccggccattttttttttaaagtaaggttgggaaaacaacaaatgatacctcctagggctgttattacaattaagacaaataccagagcactttggcaggtggaggcgagcggatcatttgaggtcaggagttcgaaaccagcctggccaacataatgaaacctcatctctactaaaaatacaaaaattagctgggagtggtaatcccagcctgtaatcccagctactcgggaggctgaggcaggagagtcgcttgagcctgggaggcagaggttgcagtgagccaagatcatgcccctgtaccccagcctgggtgacaaagcaagattctgtctcaaaaaaaaaaaaaaaaaaaaggacaaataccagaaagcccatcacagatgaaggactttgttccagttcgtgacacattgccaactttgaattacatccaagtccgtgggtcttctctctggggtcaattgatggcacgtgattacactgctcagggcccaaaggttggagctatgacttgaatgtttctagacaaggaattatttgacaaacacactttaaaaagtattcagagccatccaagtaagaggacattaataacgtagggttttgcctatggagagaaaagaaaacgcaaacagcacgttccaccttcgttctccctaaagtaatttatctccttcaaaagataaaaagtacgaacacatttgcccttgaagggcagagccccggaattcaggagctctctgaacactcctccccttctgatagggaccaaaccttctgctgagccttgtgtcacagtcagtccgcggcgccacaagcctcagtgtttacttctgccgcctgccagccgggcggggaaggggagtacccggccacccctcactttagctcctgcagctttccaaacaaaccagggcgggatgggagtgtcttcttggctgtggaaatcgatcctcctaccttgtcctgaagccacccgccgcctttcctcgtccctcccttcgcggtgattttccggtcccggcgcccggcgagggcgcgcggctggtgtccgccccgcccgaaaggtaggggttcggctgtgctcccgcctggtccccaacgcctcaccctccgggagacccgcagcctcccaccactttgcaccttcctcctcgaatttgggggcggccaccgtgcaactggcgccagccgcggagcaggaggagcttcccgcgactccggaggcgctcggcgcagtcgcccgggattggggctggcgggagcctgagactccgggcagggctgctccctcctctgctcccccgccagatccgcggggaaggaatcgtgcccgcgccgcccctggcccgcgccaccttcctttggtttctgccggcctcgggcttctgcggcccgatgtggcaggcgccgcgagagaggcagcagccggctggagcagcggcccctcaggtc

SEQ ID NO: 30058 - DNA, 2300 bp, Homo sapien
tcaagacactggcatttcaaactgacgggtttttttgaactccgttcactgtggtattgtggcaccagtccacacctctaacagggcactaataacaataggtttgtttacatgtcacctcctcctccagaatgtaagttcttctcagtaaactttttatgcccaatgcccacaatggcttagagcataatagggtttcttaggcatttaataaatgttaattgaataaatttggttaaagagattattgtataagaaatatgcaggggagttgaaacatacgacctccaaagtcctttccaacttagactttcattgaaggatatcagtcccttccatgtttttgaatatcacatctatgtatgactatgtatacatatgtatatgtatacatgtatggctatgtatgactcccagagccataatttcaaagctctcaatctgagctttcgactaaaatatccatctgcctgttacatagcttcacttattatctaagttggcatctcaaattcaatacgtccaaaattaacttactttcccacacaacttgttccaccttagcagttttttgtatttgctaatgacaccattgtcctttcagggactgctgttaaaaacatcctacatggccactctcttctaaaataaatcactgcgtagacctctgcattcctctttcctaaaattctttttgtcgttccataggcttacagtctccatcaaactgcttgtgactctaattagcacttacttcattctgacttgcatgctatatttccatctctgttccacatttcaagatttctgtagatagacagcaggtgctcaacaactccttgtagaatggctgcatgaaggttgggatgttaggtttaaattgcctttgcggcacggatcttgttttacacttttttgtcccccaccccccgccataaaaagagcagagaaaacagggaacacatatattaaaaactgaacactgcatctattattctaactcggagctgttgcaacaactggcggcagttttaacaaaacaagccacgctctgccattaaaaaaaaaaaaaaagtcccttagactcagctcccagctaaaacaacccaggatccaggtttcccacccccttccagtggtctgatgtgcgtcggaggagcgaggagaaaggagcaaggagcaagctgggcctgaggagcagggagcgcgggatgggggacgtcccggaagtcactgacgagctggctgccgcctctgcgggatcagtttgggctgagggcccaacaataacaggcgcccgggccgggcgggggccgcggggatccgaagctggagggcgggacctggattggaggaggcgggtgggacgcctccaaaggccgaaggggattggaagagggaggtaaggggcggtggagctcgaggaatgggccggagaactagcgggtcgagcgaggagcgagcatgctgattgggtttcgcggaaggagacggaccagagctggccgaggattggccgcggtgcctagggggcgtggccggcgcgcgcgagagggagcgcgagggagctggctgcgggcctgcctgccagctagccggagccgcgggtgagcgcggcgagcggcgaccctggtgaggagcgcggcgcgggaggcacgttccttagctccgccgcggccgtcctccgcggctcgaggactccgcttccttccctcccctcccctgcgctccggcctggggtctcggcgcggggagcggagggaagggacgaaggaggagtaggtgaaagcggggtgaggggcggaagggtcccggcgcggggtgaggcgagggctgcctcttgttctcccgccgctgccgccgtctcctggtcgggtgccgcggccagaggcgcgcggggctgccgaggcacccgcactatgcaggcagactgccggccgccgcgatggcgagccgggcggtggtgagagccaggcgctgcccgcagtgtccccaagtccgggccgcggccgccgcccccgcctgggccgcgctccccctctcccgctccctccctccctgctccaactcctcctccttctccatgcctctgttcctcctgctcttacttgtcctgctcctgctgctcgaggacgctggagcccagcaaggtgagtggtcccaggggagtgagcggcgggggaacctccgtcggggctgcgggtctcttggcccctgaacaaatctgcagacgctgcagggaggcgcggtgcgctttcgtgcgtggccggacctggctgggtactcacggggttgagttg

SEQ ID NO: 30059 - DNA, 2300 bp, Homo sapien
ggaggctgaggcgggtggatcacctgaggtcgggagttcgagaccagcctgaccaacaatggagaaaccccggctctactaaaaatacaaaattagccgggtgcggtggcacatgcctgtaatcccagctactagggagactgaggcaggagaatcgcttgaacccgggaggcagaggttgcagtgagccgagatcatgccattgcactccagcctgggcaacaagagcaaaactccatctcaaaaaaaacaaaaacaaaaacaaaaacaaaaaaaaaactgacaatgtcattctttcttagaaccctttagttattttccagtgatacaaaataaaatcttgactcttagcttgccttacatcttgcccctcctaacttttccagactagtctccagttcctcccattacgtcagcagtagtcaatccagctccatcaacaccattccctattgagcctgtgacccagcctattttgcctctggcctgagatcacctttttcactttagtttcttattcaagacactggcatttcaaactgacgggtttttttgaactccgttcactgtggtattgtggcaccagtccacacctctaacagggcactaataacaataggtttgtttacatgtcacctcctcctccagaatgtaagttcttctcagtaaactttttatgcccaatgcccacaatggcttagagcataatagggtttcttaggcatttaataaatgttaattgaataaatttggttaaagagattattgtataagaaatatgcaggggagttgaaacatacgacctccaaagtcctttccaacttagactttcattgaaggatatcagtcccttccatgtttttgaatatcacatctatgtatgactatgtatacatatgtatatgtatacatgtatggctatgtatgactcccagagccataatttcaaagctctcaatctgagctttcgactaaaatatccatctgcctgttacatagcttcacttattatctaagttggcatctcaaattcaatacgtccaaaattaacttactttcccacacaacttgttccaccttagcagttttttgtatttgctaatgacaccattgtcctttcagggactgctgttaaaaacatcctacatggccactctcttctaaaataaatcactgcgtagacctctgcattcctctttcctaaaattctttttgtcgttccataggcttacagtctccatcaaactgcttgtgactctaattagcacttacttcattctgacttgcatgctatatttccatctctgttccacatttcaagatttctgtagatagacagcaggtgctcaacaactccttgtagaatggctgcatgaaggttgggatgttaggtttaaattgcctttgcggcacggatcttgttttacacttttttgtcccccaccccccgccataaaaagagcagagaaaacagggaacacatatattaaaaactgaacactgcatctattattctaactcggagctgttgcaacaactggcggcagttttaacaaaacaagccacgctctgccattaaaaaaaaaaaaaaagtcccttagactcagctcccagctaaaacaacccaggatccaggtttcccacccccttccagtggtctgatgtgcgtcggaggagcgaggagaaaggagcaaggagcaagctgggcctgaggagcagggagcgcgggatgggggacgtcccggaagtcactgacgagctggctgccgcctctgcgggatcagtttgggctgagggcccaacaataacaggcgcccgggccgggcgggggccgcggggatccgaagctggagggcgggacctggattggaggaggcgggtgggacgcctccaaaggccgaaggggattggaagagggaggtaaggggcggtggagctcgaggaatgggccggagaactagcgggtcgagcgaggagcgagcatgctgattgggtttcgcggaaggagacggaccagagctggccgaggattggccgcggtgcctagggggcgtggccggcgcgcgcgagagggagcgcgagggagctggctgcgggcctgcctgccagctagccggagccgcgggtgagcgcggcgagcggcgaccctggtgaggagcgcggcgcgggaggcacgttccttagctccgccgcggccgtcctccgcggctcgaggactccgcttccttccctcccctcccctgcgctccggcctggggtctcggcgcggggagcggagggaagggacgaaggaggagtag

SEQ ID NO: 30060 - DNA, 2300 bp, Homo sapien
ctatatatgtgtcattatatgccaatgctttcattcctatgagttagatttccaggataggggctaatggatttttttaagatgctaacagattgcatcccaaacagctttaataattttaagatattttccattttcacaacctcagagaagacaatccagtcccacaccctgaacctaatttttttttctttttctgagatggagtctcactctgtcatccaggatggagtgcagtggtgcaatcgaggctcacatcaacctctgccccccaggttcaagctattctcctgcctcagcctccctagtagctggaactacaggcatgtgacaccacacacagctaatttttgtatttttagcagagagagggtttcaccatgttggcaaggttggtctcgaactcctcacctcagatgatccgcctgcctcagcctcccaaatgaacctcattttttacaaagtttgagacaattgtgagactgggtgagagttctaataatggacactgactctgcttcctactagtcaaagtaaccaaacgattcatttaaaggaccaggcgtttctggggacaagcaggaaaaggaaccatcccctacttatccacccttcacctctgcctctgtagctcagcatcagaagtaaaagattagaccacaaggtctacttcctaaaataaaaatttgccacattgtaaaatttaaaaattctctcttggaaagtgttgaaatatacatttaaaaagataaaatgaaaataatatatttattactttaccagggggagaaaaccatttttaatattttgtcaaagtctctgtctttgtgttttgacatcatatgatatttagctttatcttgactattttcatgtcataattatccttaaggtgcttcatattaacactatatacctacataatacattctactatgtgccataatttacctggacatttttctattatagaaaatttggttgttttcaaatggattctgtcataaaaatcccttccaattggcatttttgtctatgtatattatatatgtgtgtgtaatattatatatataatttcttcagaatagtttctaagaaggagaatttctggatcaatataggtgtatgtttaaggctaatatattttacaaaatacctttcaaaaatattacaccaacttatagctctacaaatctggccttaaccagattttattaccttttgtaaacctcttctaatttgatatttgaaataatatagcccagcacatctctggctgggttatattgtaaattaactctagtttttttagctggtgcccagaagtgcaggtaaggagagttcctgaaaagagcatgtgttgtctttcaaagcctgtgtgtcatcttcaaacaggatttattggggagtgggctacttatgtgggcccagaggattcaaagaaacaggcaggtacaagatttttgaggaaattaacctagatgtccccatttcaaatctcaagagtccttctgcttcctacctaggccctgatcttggtatagtagacttgctgaggttgaaatgacaaccttctctgcagttccactgttcccataattaagtcctggaattgatcttcgactttttcttctgtttatagaagataaaattcattttgtatgctgccaagaaagccccctggctttcatactttgccttaaagtggggattaatcaccctcagcctttccttgtctttcttctccagtgcattgctagtatctaggaaaagcaatctgattcccttggcctggtaattactacttccctagaaccgctcaaatgcctgagatattgctcctgccagtgcattaccttccactcgtgtcctattccagctcagaacttgtaaaagttctaacaactgcactgctatagcatgctaggggctatcatttccccacctaataccagtggcagggttctcatttccctgcagccagcaagggatccagcttcaaagttgcattttagattctgcttcctcagacattctaactggtgtttaaattgggttccctaggaaacagattctaagatggaacaatacttataaaagaatgagaaataagaattggacagagggggaagttgaacgtcagtgtgcaattctaacaggtcttagccagtccttcaagagcccaggagctagaatggctcttccaagttttccagaattgagacaaaaaggccaggtcttcgtacatctgcatagaccagttctttgatgtgagctaactccagtaagagggtataacc

SEQ ID NO: 30061 - DNA, 2300 bp, Homo sapien
tgaaaactctggtgtcaaatttgtgtttacgataaaaattttaaattttttatttcatatatgattgttcttgcctcatatcccgggcacatgggagtttatttcgttgactcccagacgtaaccaattgagaataagcttagttacaaaggaagtaattgaggctttgagctcttgaagctaacagatggaaatacgtatgtaaaaacctaagtgctgtgtaaactcggcacatatggacgtaggtattattattatccaaatggcactactgggtattttcttaatagattcttttaaaatgcttttttatagttgtgggccttttttagacgaatagttcttaagaagaggaggggattttgtccctcagcgacatttggctaaatctagagacattttttattttcacagctgggtggcgagtgcggagtgggtactgctactggcatctggtgggtagaggccacggacactgcttaacattctacagtgcacaggagaggtccctacaacagagaaatattctcccgaaagtttcagtagtgctaagtttgagtaattctgctcttcaccatcaagtttccttctcttggagcctgctaccagccaatgacatcaggatctaacctgagacgaacctaggtgttctatacggcagcctggtgtactgaagagtgcctaaggtttgcaagctcgctagctgtggctccccctctcgctagcttgagctagttatttaaacccttagagatgcctttctttaaattaaaaaaaaaataaataaatctgcacaatatgaatcatacctacctcataaggttgcggtgaacactgaatgaagtacatatatacatattcagtacaagttcgttcctttattatttccagcctacccatccctcccccctcccattcccgccttttccccctcccggtactgtatctcccaccccaagtctcaggttctcttttaaaatgctttaattcctttggtggcaaaaatcaggcttgggctaggaagtgagtcaccactcagcagcgaaaggagcttgtttttctttctctgaatgcatttcttagtaatttcagactgatcctttagccacttgttggttgaatcctctcttaatgtttaagacacactgagaaagaactgtggcaccaagacgttttccgattgttaggaatgagagtgttttaaataccgaaaataaccagagggcagagagctctgaaatcctacgttacataagcagatgctggaagacccaggctggttctgaggttcctgtctccacaagcaagtccacgcgaatcctccccgttgctggatttactttaatgctgccgaagtctcaaaaggggcctctggatgctcagaggacaggcagcgcaggaacttccttgtcaaataagccttgcctggagggagagggatggggcgattttcacccgcgggcggtgggacggggctgagggctgggggctgcctggctccaggccatgtcagtgcctccagctccaggtccgggtccaccctgaactttggctctgctgcccggacgcccagcttcacctcccttgcctcgcttagaaacccttcagttctcccggaccgctatgtagcttttcaaattcccaaattcacagaaaacaccttcaaaagtcacaatcacccacaactccctctgccaaaaaatgtcatgcaaaaacggaaaatactccgattcccctttcctcccagacactctctctctctctgtctctgctattcattttctcccccacctttccccatctgtggtcaagatccctttcactatttctagttccctctcttttttcccttctccctctctctcccttttccactccttcctccgttgtgaccgcgctccccctccccccgccccgtcgtctctcctccgccttgcgggctccagtctctgcccgcccctccccagagaagagtgtccagctcctccagaggctgcccgcccgccgctccttccctgcccacctactatgaggagcagctcctcccacctgcccataaaagccaagtgcatgttaccagcagcggatcacagcccttccccgatcctctccgtgggagccagcgagcctctctccctgatcttacgtgctcaaggtaagacagcacttctgcaggcagctcacctaccaggggttgctatgggggaataagtcaccctctggccaacgcgtttgctgtttggttagagctgattcttacggatgcgcgatccgctgctcctttaactagcaactggttt

SEQ ID NO: 30062 - DNA, 2300 bp, Homo sapien
actttgcttttgtaataagagaattagcatgcagattgcatatttgggcctgaggaaaaggaaatccagtcatttgggtttgtactttgaagttaatgggtgaaggcagagcatctgcgtccagcagccaggtcttaaggtctctagaaggtaacatccactgaagtagaggaggcacagaaagtggcagtttccataatggtctgcagaagtgttcctgggagagctgggatttgtggtttttggaccaccaaaatgttgctgcttaggcccctgatgcattattggtgagaagtgcagtgaacttggaggtaagggaggctgctggaagtcatttccaattgcctcctatggtttattcctattgataaatagtttaccctttagttttactttttaacatcattttttgaaattgtaaaatatacataatataaaatttattatcttaaccatttttaagtatattaagtacagtttagttcagtggcattacgtacattcacattgttgtgcaaccatcaccaccattcatcctcagaactctttttatcttgcaaaactgaaactctgtgcccattatacaaaaacccccctcactcgagccactggcaaccaccattctgcttgctacctctatgaatttgactactctaggtactgcatataagtacagtcatacaatatttgttattttgtgactggcataatgtcctcaaggttcatccatgttatagcatgtgtcaaaatattcttcctttttaaggctgaataatagtccattgcattataggccacattttgtttattcattcatccattagtggcctcttgggttaattccaccttttagatattgtgaataatgctgctatgaacatgaatatacacatgtatgtttgagttcatgctttcaattcttttgggtatataccagaagtggaaatgcttgatcatatggtaactctatttttaattttttgagaaaccaccatactgtttttcacagtggtccagtttcacattccccccaagcagtgcacaagggttccagtttctccacatccttgccaatacttgttattatctggtttttgtttgttttgatagtagtcttcctaataagtatgaggtaggtccctttccttttcaaaacctgctgcctttatatattctaagggatgggaatgtcaccatgacatctgtcatagtctttttgtagctgactatatctgttgtctctggtaagcacaataatcaagaaacaacagagagccctgtcatctcctgaaccctcactggcagttgtttgcttcttagatagctaagaacttttgtctccttccttgaggaggcgatctggcataatacctgagagcatggactgtgaagccagatatctgcattaaaatcatggcattgtcatttattagatcttggacaagttactatgtctctgcttcttgtcttgtcttttctctctctttctttctgtctttctctcttcctttctttctttctttttttttcccccagggtctcactctgttgcctaggctggagtgcaggcacagtcatagctcactgaaggtttgaactcctaggctcaagggatccttcctccccagcctcccaagtagctggtactacaggtgcacaccaccacactggctaatttttaaatattttttgtagagacagggtcttactatgttacccaggctggtcttgaactctggggctcaagtcatccttgtgccttcgcctcccaaaatgctgggattaccagtgtgagccaccatgcccagtgcctccatttctttagctgtaaaatggagctaataatagagttattatgaggagtaactaagtcaatacataaaaacatttaaagcagtttgtggcacatggttggcactcactaaatggtagcagttgttacccctctggaagctccctgaggcctccccagaatctaatgccccagtgcttcctgtacagcctgcagaactgtgagtcaattaaatctctttactttgtagattacccagtctcaggtatttcttgatagcagtgcaagaacagactaattcagaaaattgatactgaagagtagggcattgctataaagatacctgaaaatgtgaaatcagctttggaactgggtaacaggcagaggtttgaacaatttggtgggctcagaagaagacaggaagatgagggaaaatttggaaattctcagagacttgttaaactgttatgaccaaaatgctgttaatgatatggacaatgaggtccag

SEQ ID NO: 30063 - DNA, 2300 bp, Homo sapien
caacttaggttggctattcaatataatctggggtcagtaaacttttttctgtaaagttagagcaaatatatgagggaatagtaataaatagtaaatatatgagggctacagtctctgctgcatatttttctttacgtttttgttgttgtcgttgttgttttgttctgtttcttacaatgctttaaaaatgtaaaaaatggctggacacagtggcttaggcctctaataccaacactttggcaggctggagtgggaggactgcttgaagccaggtgttaaagaccagcctgggcagcaaaatgagacgccatatctacaaaaaacaaaaacaacaacaaaataaccaagaatggtggcatgtgcctgtagtcccagctactcgggaggctgaggcgaggtggaatataatgtaagaccattcatagttcatggtacaaaacaggtatcaattcccattaatgcatagacactccataatttagtattgccagacttcttttttttttttttttttttttttttgagaccgagtttcgcttttgtcaaccaggctggagtgtaatggcaccatctcggctcaccgcaacctccacttcccgggtttaagcaattcgcctacctcagactctcaagtagctggaattacaggcgcctgccaccatgcccggctaatttttgtatttttagtagagatgggtttcgccattttggccaggctggtctggaattcttgacctcaggtgattcacccacctcggcctcccaaagcgttgggattacaggcttgagccaccgcgcccggcccatacttcttaattttgtgatttattgcctgaaaaacggtctcgctgtggtgttttttttgtatttcccagattaataatcagactgaattcttttcatgtttattagccatagcaactcctcttccacactggcatttcttatctttttcaaaaatctattaatcacgaaaatctcgtcatctacatttcttcacaaaagccatattacttttgatctttatagattattttacatttgccatatttatacataatatcttcccttttggggcatttagagtgtgcggacaaagtctaggcagtaatgcatttataaaacatctatgagttgggtgcacacggggtaattttccacatatggctaatcctagcctcatcagattaagtttccctgtcttgtcatttccgaggatgtatcctattagaagtctagccctttattcctacaaattgaatttccactactgtaggctaacatctgaatggactcatcttactattccatgcatagtaccaggcacgttgcgtgcttttactacattttgtataatttttacgtctgtgtttgatgtcctgaaaaataccgtccacaattacttcacagctagccccagcacttggcgcccagcgggttttcctagtccctccctgccaaatcacgttgggactgagacaagaggcactgcgggtctcttacctatagttacgaagcaatggactcccttattacttcgtttcccaaatagggggtgggacacacaaccgagggagtatgaggaaaacaacttgcgggtcttcgagccacttgcgtctttctgtgggcgagcctttccaggccaattacattttctttactcatattgcataaatagcagaactacatttaccacaaaggcccgacattcatggtcatggatccttgcgcatgttttctaagagcaaactgtacaaacacataaactctgaaacactgacgcacaagcgaaaacacacgcacatgtttgggtcttctcccgctgcgcaagttctttgaaactgagcggagaaaaatcgtcttcacatggtgtctcacactttcgacacaatcttatcgggaaacgtaacacgtaaacaaaattttttaaaatgcattatcaaaaacgatgacaatccctttcgtcttatgttcctttttgtctttaagctttggggggatttatgttgcgtttccaaactgcttctgcctgtcggcgcctgtgtggaaactgcgacgagtctgggagcggctgccggagaggcggggcagaggtgtgacgtcatcgccgcggggcggaggcgacagtgtctagcgggagctccgcgtgtagctacgccggccgcctggctttgagacaacgtgattctccgcagctggtcgcctacccgtgatgttctgcccacgtcgagacctgagctgaaatggcagacgatctcggagacgagtggtgggagaaccagccgactggagcaggcagc

SEQ ID NO: 30064 - DNA, 2300 bp, Homo sapien
aatgcttgtagagcactaagtatggtggtaggtatgatctaaaagctcaacaaatgagggctattaatattggttcctgaagacagtggtcacataactatgacctcacttggaaagctgagtcatagctgggtcaagagactgatgtttcaggagtaacacattagtaatgtaaccaggcaagtagtgtaccaggcaagggcatacaaggagtagaagccctaatcctctttcctctattcttcagaatatagctaaagaaaaggaggaaataatactaacatatttcatgggaaccagcaagtcaaaagaatgaaaataaatgcaaaacttgagtatggatatgtgagaaagaaacaaatggtagtgttaaatgttaggaaacatatttgcctatcagagggaaaaagatgcaaaacaagctacaaaactgttagctttggggtaaaagtatgctatcagtttggggctgagattcaggtgtttatgcatcatacaactttcataaaagtcatttaatctcatttgtaataaaaaatgcagcataaaagtctcaaaaaggatatttaataagtatgaggtaagcacaggagactaaaaagattacaatgcaattcacaagtatagggcagaagagttaaaaccaacaaaactacaaactcaacatccaaaatgttagtacacaattgcaaatcaaatattaaattttaagttcggctgaagagtatgtgtaattcacatctcttagtatactgtatatgaaaagcaagagtgagtttactttaggtttctcagtaggtacttagagtgatctagaataatgataaagtgaactcccaatttagtgaagaggacatacatttaatgttgtgccctgcatctttattccacaccatttccactaacaactctgcaaacatcctttctccactccacactaagaaaatgaagcgagcagactattttcgtcattcttgtttgacaaaacatatggaaacaataattctacagacatatgtacatcataataggaagcaatcctattttaatgtaattttaaaagaggttttaaaaggactcaagctactaaaattactcatctgaagcttgcaaataagaatgccacgtccctaatttatttagcagattcatatagttgggctagaactttaggtatgacttctcttataattcggaggtgaattctcattcacaagaagtaggatttgtacaagtaaatctaccccatactagaggataatattcttaattcaatcacatttggctaatttcttttttcttcacgtggttatttttggctttattttgtttgccggtagaagagaacaaacattaaaactggctctaaagttctaattttatacattgtcttgaaagtacagcacaaaacatttaatttctttaaaaattttttccctgccaaaaaatgatagttttaactgctttcgttaaaacacaggcatgcagaaatggggaaagaggaagttctttcaggaaaaacactgaaaaaaataagatttcatctggcctttccatcatcacttgaagaattgtttggtagttacatcatcaggaaataaaacaccatcctctgaggacccctactcattacaaagaggaaagagaaggtttgaagtctaaatcacccccagagatgtctccacaaaaccccagacttctcctttccctctcccgcctacccccagcaaccaaaaataaaaagtataatgaatttacaaaagtttacataagaataacaggatgtgtattgaagtccctgaagcaacaacagctttagggacccagagggaaaaaagttacaagcggatcgaccctgcctcccaatgactttgttagcccgacaggagggcgccggcgccccggcccaccggcccaccactcattccctccgctgggagccgggaaccacggtccgttcacacggccggaacatccgcgggagctggggtgtgtggctgcgccgccgccgcggccgagggtcccgcggtcaccggcgcccccgccgacagcgccgcacacgcggagcgccttataaggcagaacagtgacgtaacgcccataggccgggcgcgctcagcgccccgctcgcattgttcgggcgactctcggagcgcgcacagtcggctcgcagcgcggcactacagcggccccggcccggcccccgcccggccccggcgcaggcagttcaggtaagcccgggagagcaacttcgctccaccaaggggcactgctgtcagacagccaggtagcaagtctgt

SEQ ID NO: 30065 - DNA, 2300 bp, Homo sapien
tctttaaagcctggaaggagggaagaaaatttgtaaagcttaatggaaatggagttttaataagagtacctattactgctttaacaagtctacattcttgttatatttaccacagccccaaagtcaatctttttgatgtctacagcagagaaggatattagcagattcataaatcacagtcttatttgcacttctgcttttaaagcaaacatttaaaaaaaggtgttctgtcttgattaaggccacttatgtccatgggtaaacaggctgtgtttgaacttcatcccccaagcattccacctcaggaacccaggtcagacctccaaccatgaccctaagtgcttgcttaagacgtacttaacataattataatattgtaaaatggtgactttgctaattcttctaactttcttcagatttactttatagtatttcctttaaaattgttgggagcttttatggggttttttgttttgtttttaaaatttgttagcctttaaaagtgcattaggacagaaatggcagagttactgctacagaattactgcattattttgttttgaaggccaagtctagtattaaaggaatgaaggcttggtccctggctgtattcctgtattcctgacattcttctaaaattctagatctatccttgggtaagtcaagggcttatatttaggaccctcatcttcaaagcggagatactactacctaacgtagttggccattctggaaacaatataaaataaattaatgtttaaaggacacattagctccacatctgattatataatcatccaaatgaatttataataggaagaaaaattcttccactgttgaggtttataactaggagagaaaatatcagttgaacttataattgactctatggcatataagcagattattaattttactctttgtccctacaaatcatgaaactttcatcatcgccagtaccttacttttagtttgtagtatttctttaaaaatctgaaaaactcaagtgtccagaaaagtatagaaaccataacaaactgctatatgctaccacacaaatttataaaattttaataatttactgtatattagaaaacagtttttaagtactgtattatagatgtattataatgtatgtatctcttctgaaaccccttctcctcccttcccactccagaagtaaccacgtaatcttgaatttggtatttatcattcccctgtatgtttcatactttttaaaaacatgtacatatatattgctgaacaatgtatagtattacattttcaaaccttatgtaaataccatattgaatgtatctttctaaaacttgctttttcatcctagattatatttttgagattcttccttgttctattttactgtagtttatgtattttgattgctgtaagaatatttcattatatagtccatcatttacttgttcattttactgtttttgaatatttttttttcagtattcaaaaaaatgctacttcaaacattcttgcacatttttttcccttgtgttaggtgataagaattctgtcacaaatcagctgtggaacttgattaagacattgacccattgccaggcacaatggctcacacctgtaatgccaacactttgggaggccgaggcaggcggattacccgaggtcaggagttcaagaccagcctggccaacatggcgaaaccccatctctgctaaaaatacaaaaaattagccaggtgtggtggcacacacctgtaatcccagctactcaggaggctgaagcccaggaattgcttcaacacaggaggccgaggttgcattgagccaagatcgcgcccggcactccagcctgggtgacagagtaagactctgtctcaaaacaaaaaggacattcaccctcttcaggtccaatgacctgatctggaagtgagggagcacttactatgtgtgctaagcattcttctcagcattttccatgtattagctcattcaagtctcacaacaacactatgaggtagggaatattattatctccattttacagtgaacaaatggaagcacgggaaacttattgaaggttgcacagctaataagtggcaaaactgggatttgagtctaggaaacctggctcagggacccacactcttaaaaatcatgccgtaatgtcattatgctgtattgcctaagacaaatgcatatatacactggtacaaataccttgtccgaaaaatgcctatagccttactgaagagactatttacaaatacggtatagatgaacaatgatgtgtgacagtagttgtcactg

SEQ ID NO: 30066 - DNA, 2300 bp, Homo sapien
ccttacccacaggggcaatgagcaaatacataagtattctgaggataacagaaaccaccttatcctcactgttggggaaaggagttacaaatatggaaagggttaaaagccagattatgtctatggtgttagattggaaatgcagctatcagtgtgatctcatagtctttaatataaatagacagagcaacagatataggcgcgcgtgtgtgtttgtgtttcctagcctattacctgaaagggcctggaagcaatgagctcacgcaatccccagatcttggtttctaaataccattttccataatggatggaggtcttcttgaagatatggctaattccagagttgggcacagaaagtacaagatgcttatggaacattttcttgtgccagaaggtaagaaagtactcagaaaaacatgaggaccacatctgagatcatttgagcattaaaataaataatgatattagtgatttataactcattcaataaaacagcaatttatgagctcatgttgatataaataaacacaaaaataagtgaggagaagggaatgctcttcttcactctaagaaagtttatttaagagcaatatgtttacctagtctccaagtatctccccacaaaatatttattaactgcaaaaggaaaaaccataattttacagtaaatctaacagataccaccttaagcaagtgggtttggttacaagactaactccgtttatgtgactcctgatatgattaagaagaatacagcattgtttctgtagtattcctgccataaaaatacacaatttcaatctcacaatgaggaaacatcacacaaatctaaactaaggaacattctacaaaacgtactcttcaaaaatgtgaaggtcacatataaaaaaggaagattacagaactgttcaagattgaaggaacgtagagacaaggcaactaaatgcaacacataatcgtggactaaaaaaccattttttttctataaaggatattattgagacatttggtgaaaagttgaatgggatctatggattagaaagtaaagttgatttactgaatttaattgttatactgtggttatgtagaagagtatacttacatttttaagataatcacactaaagtatataaattaattcagaaaaaaatatacacacaccaaaataaactcacgggtggaaaggaggatgagagagagagacagagagagagagagagagagagagagagagagagagagagagagagagagagacagagagagagagagagaaagagaaagagagggagaatacaaccagtggtaaaatgttaaacattggagaaccttagtgaagagcatatggaaattctttattattcctgtattttttctataagtctgaaattattttgatgttaaaaattaaaaataaagagcatgggctttggagtaactcagattcaattttgaatcctcagtcttatatctatcatctgtgagatcctaggaagttattaaattattctgatctttggttttctcattagatcaccaggagtaggactaatttaaagggctgctgtgaggattaaattagataatgcatgacttgagcactgggcaggtggtaggcatgtctggtaagtgatctgatacataatggatgctgaaatatatatttgttgaataaatgaacaaactcctcccttctatccaacccctcaatctgaacaagtgatcctacttaaagaaaattagatgcttcaaattttagcaatcctaagtatgaaggttttcttaacacttgaataatataaaacaaaatgtcaaataataataataaacataccaccatgcattccgatgttgctctagagtttcctcagcactttgccctcgtgtctcctgtgacactaaatggaacaggcaggcattcaagtttgagtccaacacagcgttaataatagcgaatgtttacagtgccttgggttatgggtgtcaaagaaggggtcatgcccttgttacttaaatcacaaacaaggcttacatcagctcatggctgcagggtacaaaatgaggtgcaatttaatgtccatctgggcatctgttcctaaggtgctagcactgctgtctgtggttcacaatatatctggggtagcaacacagcaaagaatgggacccaggttgtgcttgggaagtttctactctcagccaagatgtgcacatgaatttaaaattacctaagagggtgtttcagagttgctggccaaagagtggtgtcttctaatctggagagcagctgctgggcacaggca

SEQ ID NO: 30067 - DNA, 2300 bp, Homo sapien
gaatcacttgaacttaggaagcagaggttgcagtgaactgagatcatgccactgtactccagcctgggtgagagtgagattctgtctcaaaaaaaaaaaaaaaaaaaaaaaatccgctagaagacactatcgctaaacaattttggttgaaatcttgtccccaatgggttatacatcactaagatattgaccctatctagaactggctccctaatttgtgaggcctagtgcaaaattaaaaccagtggctccttgttcccaaattattaagaatttcaagatggcaacaccagagcatgaaatcaagcacagagttcttctaagcatgtggtctcatgctattgcatagactacatgcccatgaagctggctctggctccattaaagaacatagaagtcagaactttccactttattttgacagaataaagaactgtttaaaaatgtcaagtgacatatttttaatgggaaaatattttaccagagactataaagcagttgctgatttaattatactcaaaatgaatcataattgaggactagaatcttcttaaccagtgagcaactgcttctcatgtcaatgactgaataggttttaaaaccattttctgaaaagtttctgaaaatctactggcaacaattgaagggacccaggggaggtcctgaatattagaatggtaatgtgacctagattcacgtcttttattctttttgatagagggcatctacagtctcattctatgttaaaagaaatgttccctaacagagaactgaacattacagagatccgggccttggaagtgggtgcagtaccatgcagatctgtattatttccctttagggaagagagtgaacatgtttttggttgtaaatgagatagctgtactgttttgtatctatttaaaacaaatagtttttgaaactatgaaacattttagatacctaagtatagactctataaagaacactggccacctatgtggccaccttggggcccttaataaatatttaaaaattcatggaaactcctccctttccctgaatgtaactgccattccgagttttctatatatcattctcctgcattttaaactcatatggatctattttaaatatattgtcttttaaacaccaactataaatgataccatactttacctatccgtctgcaatctgttttgctcatttaacagcgtatttttcagatgtatccatattgttacatgcagttctacttcatcactgttgttttcagggcttgcaaaagcgtttctttaggtccatcctcctgagcgtgtgctcaccccaaggccccggcggtggccaagtgtccgcccatgcggtgtaaaggggaagtggaacgcgtagagaaggattttggcagctctgcttgcctggaattccagtcctagaattctaaattcggacttgatcttccagactgttaggaagatatatttaaggtaggaggctagaacgtatctcctttagtatatagcttcatttacaacttttaaatattcagtcaaaaagtatgtgggccttcatttacacttttgacggggcctcacaaataggggtggtctgcccctttccttacgtcccactctttcttcaaattaaattgctacagcaggaaattactgaactgtggctcttctcctacgtccgccttccctatgtcaattcccatttcccttgctttctccaatagttaggactgtaaattctaactttgttaatttcgacgccaagctggaatgaagacgctaagtggacgctaaaaagacacgctgtttgtcacacaaggcctccaactgggacggcgtccaccgcgccccgccccgcccgcggcaccgtggcatcttgggacatgtagtctttggaggggcagctgcctccaccaagtctcctcccccaagacgctgcctttcggcctcgggacgccgtgacgttgcgttcctccagtcccttgccacctccctctttcttcccctctggggaagctcagtgctggacttccgaagaccttttacgacattgagtctcggagttggtctcagcgccggatccacttttcggcaaagtgacgtggacgtcaacagcaatggcggaaggagaagatgtgccgccgctgccaacgtcgagcggcgacggctggtgagtgaaagccggggctaatttccaatgcccctttattcttccttctcaccatcttgccggtccccgaggagccgtctggcgtcggcatggaacggagaggccggtcctaggcgaagtccggtgccctgccctacccc

SEQ ID NO: 30068 - DNA, 2300 bp, Homo sapien
atctaatgtaggaggacttaaaataattctgctggttgtgacatgactaaatactcaacatttggtggagtatggataccttaattgtaatctttgttattatttttaaattcaggcctttaattattacagcatattttccaagaatgaggaataacatatgaagctagtcactttttaaatctttcttccagattgctctgaatgttgcaggaaaaggtgatagtttggcatcatgggatggtattttagacttgccagaacagaacactattcacaaagattgcctgcagtttattggtaagctgaataatcactttcaagcagagttaaattttggaaataatttttgggttgaggaatcactcttcagaataatcttataatttcagaatttgtaaaaggcttgtaaatagctttagaacttttctttggaaattcttatgaaatattgtctattaattttaagggagcctagttttgactgggtgcagtgactcacacctgaatcccagcactttgggaggccaaggcagacagatcacttgaggtcaagagttcaagaccagcctggccaacatggcaaaaccctgtctctactaaaaaatacaaaaattagccaggtgtggtggtgggcgcctgtagtcccagctacttgggaggctgaggcaggagaactgcttgaacacaggaggcaaaggttgcagtgacctgagatcacaccactgcactccagcctgggcacagagtgagactctatctcaaagaaacaaaaaagataacctagtttttactgtttcttttgcattatatgttagatttttcatgtacatttatgggtttgttgtagtcttaaatttgatttttatataattaaagatctatatgattgtatgcagccctcaaaggggagctttgttccaaaagtttatctataaatcatagtttgtggactgctgtagagaaactactataaattgtgattgaataggtttccagtcaccccacaacatctatttcatttcacaatgtggatgaatttagtttatacttcttttaaattcatctctagtgcattgtatttttgtttctctttccatcatattttagttaaattattagcttgataggcctatgtgtggtaagcacagcagaaacattattgctggtgtggacaaaagaaagaatttgatagtggagaatgaattcctttccctcttcttgccaaaattatagcaacaactgcccatcatggagtaggtgataatctgtttagaaaacccttttgcttcccaggaatatgggctatgcctatctttacctatccctttaattcagattggccattcttatgtttgacatatatatagatcaggtattactaagtgctaatgtttagtaaatactgaatgtatagaagtcttctgtttctttcccttctctctcaacagactaggtaagaaaacatgcttaagtgaaactgttattcttaattttctttaaattttctttaaactgtcttaaagttaaaagactgttagaaggccaggcacagtggcccatgcctataatcccagcactttgggaggccgaggcaggcagatcacctgaggtcaggagttcgagaccagcctggccaacatggtgaaaccctgtctctactaaaagtacaaaaatttagttgggtgtggtggtgcttgcctgtaatcctggctactcgggaggctaaggcagaagaatcacttgaaatcgggaggtggaggttgcagtgagccaagaccgtgccattgcactccagcctgggtgacaagctaaactccgtctcaaaaaaaaaaaaggctgttataaagcgttttgactgtgtgttttccttgggttttggatctgtgaaccaatgattgttaaaataagtataagggaaaatatactttcatgtagtttcactttgtctttctctaaatgcactaacatagtattatatatttgtaaacaagtgttatgtccaataacagcccctgacaggccctcagtaactttatttttaacatttattttctagaccagctttcagtgccagaggagaaggcagcagaattacttttggatattgaatctgtaattaccttttattgtaaatcacgtaacattaaatatagcacatcccttagctggatacatctactgaaaccattggtgcatcttcaactgccacgcagcgatttatacaactgcttttatgccataatgaataagtacattcccaggtaaaatatgattcagttattgtagtttttaaaagt

SEQ ID NO: 30069 - DNA, 2300 bp, Homo sapien
tgccataataatttctagttggtactcatcgtgtcactgaagtgtcaagataaagttaagttatgtttagtatactgtgttttagaaagcaggtaaaggaaaccttttaagatcattttccctcaaaaataactaatttaaaaagacttatttctagggaccagtttcaactattttaataattttcttatatagaactcttcagttcctaacaatgctgtataagtcagatggtaggatagtagtttaaaatactgaatgaaaaagaagtcttattttttttcttattcaagagctgcaccttttattcttcagacatagtgaaactgtactagcagttgtgaattagagcaggctgtggatcagtattttaactcatttatgcaatagatttctgccacatatttgtttttattaagatatgaaaaattgtaagtaaccatttttaaagttcaatattaactacaggtggtagtatagaaaatagctatttagaatgtgttttttttttcttagtctttcattttgtatgaacactgacagggactttatgtgacatttttgtagttcttagcctataaaatttgagattatgtagtattaagttttaaaaaatcacaactcaagagtattataattttaccttttatcatggtttaataagaatatttttaggaagaaagtttgattttttttttcataatgtttaaaaatttcccttcaaacaggataatcaccatctctttggtagtactttgttgggaattaaggatgatgatgcagatctgagtcaggctctttgtctggccatctccgtgtcagagatccttcaagcgaatcagctacaaggggtaagtaaaggaaacccagtttgttaggggactgttcattttaaatacaaggaaccaacttcctccctgttcattgattcccacaaaatcaatttactgcaacaaggtggctcttttggctttttgaatgattgtgttaaatgttatgttcagagggtcattttaaaacttgtcagcttgtgtggtgttttaattgtctacaattaattattgttgacattcttgacaccagtttttgtaaatcgccgtatcttttttccatatttcagtagagcaactgaatgtggcattgtataaaatacttttaaaagggtgaatttagcatttaacagtttctggtagtttacagctaattgaattacatggtttagttccatacaacttatagcaaaggagaattgtgaaaatgaaattttcttcatgaaaatctaataagtcaatttgaccaatgatgtttttaatatatggtctttattactagtagtgcagcagttaaccatggtgtgtatttggaaggtgtagtgtatttccaaggttgagggcaggaaaggaatggacgtgggaaaatagccttttatggtagatctttcttagttggatttcttactgtatctgcgctggttattgaggattttcaaaatacaagcatctcacttttttcttattcaaactaatatttaaaaacaaatgaaaacatgttatccagtttaaagagatccatgtgaacttctttagttgaaactggtatttcagaacattctcccttcatccccccacacgaaatagatgtttagttcttacgtgaattgagctgttgataaatttgcagatttatttgcaaaaaagaatagcatatctagagttgtgtttataactatatagcgttttataattagttttataattaattataattagttttatagctcaaacagacactctccttctatgtattttaagactttccagtaaagaacaacatctaaaaaagaaaaatgttttaactgtttaaaagaaataaaagtatttaggaccttcgggttattttctgtgctaactaggtcctcccaattccatgtgagatccattttttaatgaacttgttccctttatttggttaactgtgaatattatgttgtgcaatgtgaacctcatgggaaattcctgtatgtcaaatgttgtttccgttttaggaaggagtccggttctttgtggtggattgccgtcctgcagaacaatataatgctgggcatttatcaactgctttccacttagattcagacctggttagtataaatgctgattaattattcttaaagtaactttttttccttcagttcataaataaatatataggtcccagattggggaatttttttctttctgcttaaggagggagtctctgcccttatgagaaaagtgttgctgtcaggtttccttttcacccaa

SEQ ID NO: 30070 - DNA, 2300 bp, Homo sapien
ggcatcaaagcatttttagataaagctcttacctctgtctttgctttttgtaagaaagctgaatctgagtttcaaaggcatccaaattatatcattttctatctctcatgagcatagtttggtaatttacaggacaattttgtattagatatattttaacataaaaccaaatgattatgtcacttgtaatttaatcagactttaagcctatgtattgattaacctaacttgtaatttccaaagaatatttgttatacactaaactctcattatatttattgaggaatgttattttggaagaagtaaatcaacaaaattaggctacaaaatttttttttttttttttttttttttgtgaccgagtcttgctctgttgcccaagctggagtgcagtggcgcaatctcggctcactgcaacctgtgcctcctgggttcaagtgattctcctgtctcgccctcccaagtagctgggactacaggtgcgtgccaccacacccagctgatttttaaattttagtagagacggggtttcaccatgttagccaggatagtctcgatctcctgacctcgtgatctgcccacctcggatctttcggcctcccaaagtgctgggattacaagcgtgagccactgtaaccggcacaaaaaaaatttttattgatagtgtgtaaagtatagatttgatctctatcttctgggaaatttgaattctaaacctaagtaaaggccaagtgtggtggttcacacctgtaatctcagcactgggaggctgaggtgggaggatcacgggtccaagagttcaagaccattctgtgcagcatagcaagatcctgtctctgaaaaaataaaaaaattaggcaggcgtagtggcacacccccgtggtcccacactgtggtcccagctacatgggaggctgaggcagaaggattgctccagcccaagaattcgaggctgcagtgagctaagattgcgccactgtactctagcctgggtgacggagtgagaccctggctctaaaatactactactactactaataactaaaggcatgtaacttgattttttctcacattggaatagctcttgaaaatagaagattttgagtgttttcatgttacatgcacacacccaaaaaagctagagtcttcctttgtagtaggtaattttagctgaaccttatcctacaagtaaaacaatgcttttcccctcagaaacatgtagtattttattgacacattttaattttacctgttagtttatttgggattacctgaaaattaataggatattaatttttatattccaaagaaaggtcacacttcctatagacctaatcaagtttgagtttacatgttatttatgcctctgccttttgaaaaagaggcagattctttttttttttttttttttttttttgaaatggagtttcactcttgttgtccaggatggagtgcaatggcgctatcttggcttaccgcaacctctgcctcccgggttcaagtggttctcccgcctcagcctccagagtagctggaattacaggcatgcgccaccatgcccagccaattttgtatttttagtagagacggagtttctccacgttggtcaggctggtcttgaactcccgacctcaggtgatccacctacctcggcctcccaaagtgctgggattacaggagtgagccaccgcgcccggccgaggcagattcatttttatggcttatatttacacaacaaaagtagaatcttcatttctattgaaacaaaagtaacagtaataaaaaaatgtgaagataacccttaagacacctgcacttatatgagaagccttaaccaatcatattggaatttgaatatttggtgttagtaacttattttacctaacagacatgaaggtagcaccaggcattgtcctaatagttttacaataaaattgactgatttagttcttactataaccctgacaggtagatattgttagcactattttacagaggaggaatcagaaacacaaaaggctaaataacttccgcaaggccaaacagatctaagcattggttttaatatggatattgaaattgtttaaaatttaatttttacatatttaagagcattcagcctaccaaggccttatgccacttttgctaacataatttctttatcttcttttaatttccttaacatagctctcctaaaactatgggtagtacatggggttttgggggggtcaggtaaggaataattacattttgtgtgaatattcaaatgatgcttggtaaaaatctttgataacttctta

SEQ ID NO: 30071 - DNA, 2300 bp, Homo sapien
gacggggtttcaccatgctggtcaggctggtctcgagctcctgacctcttgatccacctgcctccacctcctgaagtgctgggattatgttaattattaaatctaggaggaggacacagctgttcctccaccaggcagtggcgcccggcctggtccttctcctctaatggctccttcccaggctccacaggcccttcttcttttgcgtgtgcctttcatactccgcttgtgtgttctcatccaaattcagagcttcctcttagttaaaactgctggtgactcccaagtcaatttccagcccagacatcttctgagcttgaggctttggtccggttgcctactgggcatctccacctggatgccatggctcatgcctataaggccagcactttttgaagccaaagtgggaggatcacttgagcctaggagtttgagaccagcctgggcaacactgtaagaatccacttctaaaaaaatgaaataatttgcattttgaacaagcacttcaaataacatttccagccaggtttaggaccactattagttacaatgttagtccaataaatttggaaatctagatgaatttttttaacaggttgtaagtgaccacaggttgaccctgaaacctcataggttaataagcatagcagaaatgaaaaggtttttaaagatcttcctgctacaaagccaagtccagatagtctcttaagctgcagaaagaccataactgctatgtatttccccccaatttttttttatgaaagcttaaaattttaaacttctacaaagttttaatctagtaccatgaacagctgtgtcctcctcctagatttaataattaacattttgccatatttgctttatcttatgtgttttctttttgctgacgattttcaagtcaaacattctgatggttcatccctaatacttcctcattttctaagagtaaagaattgtcacaagcacaacactatagcacacaaaataattcagaaaagcatcaaatatctcgttcatatttaaatctccctagttgcccccaaaatgtttttatagtgttcttttacaaaccaagatctgtttcagtataaactattctggggcattccaaaaggtggttaagttttggatttttgttccacaagtctgacaaggcacaaaaacacaaaacacgaaaattaaaaagcaatctaataaataaaaatgcaaaaatcatagtctataggctgggcgcagcagctcacgcctataattccagcactttgggaggctaaggcagtagggtcttgagctcaggagtttgagaccagcctgggcaaaatagcaaggccccacctctattaaaagtaaaaaacttaaaaaaaaaaaaaaaagaaagaaagaaagaaaaagaaaaaaggaaaagaaatagctaggtgtggtggtgtgtgcctgtagtcccagctacttgggaggctgaggacggaggatcgcttgagccgggaggttgaggctgcaatgggctgagactgctgcactgcactcctgactggatgacagagtgagaccctgtctaaaacaaacaaacaaaaaaggatattagcaaagagatgacaatgtattcgaggactgacttgttgagggcatggcgttgaaccctcagcatctttcccgttggcctagcagccttgtagtcagattttacagacgtctcgcgtgcctaaaccaaccagggtcattccgtccccgtcacagagacttgttcaaatagctcaagcccatcagcatacggtgttaacctggccacagaggtgattcaaccagctagaagttcagtccttttgcggagaatcagcaaacgctacaaatcagggctttcctccctgaaaagtctggttgttaagacattcaccagcacaccacctcgacttaggccgttcccttttgccctttgcctttcgaggcatgctttttccggactgtgttgcaattaaccatttctcgttggtccgtcctggtgttacaggcgcactggaatgaacgcagacccttctctcctcccggccggggccaggaggaggggtggggcggggcctctgacgcggtccccgccccaccgtagcgacgccgcggtccgccggatctccagcgctcagtccgcgccgcaggtggtgcttgtctgcagagtcatgacctgtaagtggcgcggccgcgcgctgcagctcgagttcgggccgcgggggaggctttggagcggcgccggcggtggctcggccggctcagcccctccgccccgcgtccccgccgtgcgcggccttccc

SEQ ID NO: 30072 - DNA, 2300 bp, Homo sapien
cttccactattttctgactcatccttgaattccttcttgcaatagtgtcaatagcatggacactggctggggtcaaggtcagactggtgtttgggggcctcccctagcccaccggtatcaacttcacttaaaaaaaggacggaaagcctgggcgacatagagagaccccatctctacaaaaaatttaaaaattagccaggtgtggtggcacatgcctagagtcccagctacttgggaggctgaggtgggaggatcacttgagtccaggagaccaaggcttcagtgagccatgatcacgcctgcactctagcctgggtgacagtgagaccctgcctcaaaacaaacaaacaaaaataaggtagagaactgtcattcaaatttctctcagctctggctgggtgcggtggctcatgcctgtaatcccagcactttgggaggccgaggcgggtagatcacctgaagtcaggagttcaagaccagtctggccaacacggtgaaaccccataactactaaaaatacaaaaattagctgggcctggtggtgggcacctgtaatcccagctactcaggaggctgagacaggagaatcacttgaacctgggaggtggaggttgcagtgagtcgagattgcaccattgcactccagcctgggcgacaagagctaaactctgtctcaaaaaaacaaacaaacaaacaaacaaaaaaaaacaaatttatctcagctccatatgtcagctccacatggccaatgaccacgttttgtaattcttttcaactgaaattaggggccgaggagttgccctaaggcttattgatatatggctcaacagagactactgaccccagagcccatgcacctccaccttctgagcaggcagtcaaaccatttccacccacttcacttggttaagtgacagtctatttggaagtagcttcaagcagtctagtaaggatgctggtatttgttgagtaccacacgaggggctttataggttctctcttcttaatcctcatatcattcctgtgactaaactgagaaccacactgctctagaggtgaaatcattttagcaaagtactgtgccaattaaagggaagagttggaactagaacccacatcttttgaactcgctcttcccagatactggcacatttctcctcgtctggaccaaaatatcacagaccacatttctacttgtacccaatgtctaggggtactgagtggtgaaatccacttcatttctactgggcttcaagtgactctccaaacacagtaacaaggactcaagggtagaccagacctttatgagcacagctcctaccttagctacatgatgtgtttaattacaaccccccaaaaaccctgtcatccatacacagcaaaagtctgggaagcctcatgggggtgaaagggctgaagatggagaaattaaagagccctctcccagcttttcttgactaaggatcccacatagaccagcctagaaccaagcctccaagcacccacataacacagctattacactgcctcacctctctgtgcgtagatttgtgcaagctctgcaaaccgcatgtcgtagcagatgcccagacccactctgcagtaagctgtttccaaacagaaaatgcacaaatgaaaagttaactccctacagcatggtgtggcaggggaaatcctccatgacataatgatcacaaaacactgacagggataaattaacacaggacctgaggacagagataatttacaagctcattcctacttggacttcatctcataaagacatcatttacatcagcggagtaaagatgagaaattcattctaattgaatgcttattatctagatgggaggtactcaactgtagcctaataggtatactctggaagccgtaacaggaagctacaatcaaatcaaagggcaaaatcgtgtcaaatccttagttctcaaataagcccgaactttccagatctgtgatgattctctgcctttctcacttatggtctttcagttaggttatgtgaagaaatcggagagagacaaaaaagaaataaatacctgattgtcttctactgagattgctaaagaggcaaacttatctggtacatacgagtatcaaatgtggagaaactatcacccggactcaatgttttagattcttgaaatgtaatttttccaggaacatcaatgtcaaacagatggatctgcatcacaaataatggatttggttacctcttttccagcagggtccatggcagtaatgacaatatctttccccgggcagatacggaaggtgctcta

SEQ ID NO: 30073 - DNA, 2300 bp, Homo sapien
aacaatttcacaaggattttaagggtttattgagggtggaactatgagaaaattgatttgtgttggatctgttctttagaggtaggtcttatatataactacattaaagtgtacattttaatcctatgaatgggtacacttgagtttatgccttataattagtaacaaaccaggaaatgacagcaacatcctcatcattgtcatggaattcagaagggcttttttggtgcagatttctctaagcatctagaagagcaaaggccaccgaataggaaccactactggggaacaactcctctgcagaactttcccaatagcatatttccctattaccattctgccttcaagataggtttggtttgtatgagctgtcttctcatcagcattagcattattacagtcagtttgcactcaaatttcttttctttggtctgttttctaattttagcttcactatatagtatatgtaactttatatatgcatacagtacgtgtgtgtgtatgtgtatgtgtatatatatatacttagtgtaacttttttggccctcaaagctttggcgtagatgctggccaactcgcaaagttacagcttgagcatagtctgatatccacagaactgtgccttccatttcagccgtgggatttgtcttaaaaagttgattatagctgctgcttttgttttcaaaataagtatttattacattattgttaactatgacaaacaattggggaaaatcctaaatgttaacagaaaattgaattatgtttgcagaattgtggtacactcacttaatggtatattatgcagccattaaaagttacaaatacattaaagttacaaagcaagatacagcactgcctattattaaagggagaattgcatacaaaatgaactcaaccatgtgaaagaaaacaaatagggaagtaaatagagatagaaaaatatatcaggaaggcatccatgctcacaatgatggaagctataaaaatatttctactttctatatctttctgatttttattataaagaagatgtgctggctacatttctttgatatttttaagagcgatttttaaaatatttaagttggcttattttagatatgaaaagactaagagccatacagctaaatataatgactcacatacttcttaaaagtcatcttataaataaccggggttaactgaatatgggctaggtattatagataatattagggaattatttttggagatatattagttgaagcagttatagctgctttttaaaaaatcaataattttaaacaaatagctctgaagacatttaacacatacatcttaacttatacttccaaatgaatattgcccttaagataattccctggccaggtgcggtggctcactcctgtaatcctagaactttgggaggccgaggtgggtggatcacctgaggtcaggagttcgagaccaacctggccaacatggtgaaaccccatctctactaaaaatacaaaaattagccaggcaaggtgttgggcgcctgtagtcccagctactcaggaggctgaggcagggggatcacttgaacccaagaggcggaggttgcagaaaacagagattgcgccactacaccccagcctgggtgacaagaatgaaactctatctcaaaaaaaaaaaaaaaaaaattcccttgggctgtattatgataaattatgaataagtgatgtgactgtacctatgagaatgtgatattagagctgtgactaagaatgggattatctgtattgaacagtttaccagagattatctgctgtggcatataactaaccacttgctgaagaaagaggatagttaagatttcatatttatagcagtgccacctaaaaactccgataattaagatgtaaaatgtaaatcagtctgtatccccaaaacgtgataattttgtaataatgaatgaagtaaatttttataatgaataataagtatacttttaactgcttaggttgacggttaccttaatataactgaagtatctcctcacataggcattaacagatcaacaacagtttggtaaagctgatgaaatgtatgataaatgtattgatttggaaccagataatgctacaacatatgttcataaagggtatgtatttttgtgattgttccaatgagataataaatttcttgcatagtaataaaatgtatttattttggccactgaggaaggggactgtggtagagaagttaattgacaaacttcttaatgctcctagatgtcttttcattcttacagaaattagttaaggaggccaggc

SEQ ID NO: 30074 - DNA, 2300 bp, Homo sapien
gacataactttttaaatttttttaagagacagggtcaggtcagacatggtggctcatgcctgtaatcccaacactttgagaggctgaggtgggcagattgcttgagcccaggagtttgagactagcctgggcaacatggagaaaccctgtctctacagaagaataacaaaaattagcttggcatggtggtgtccacctgtagtctcagcaactggggaggctgaggtgggaggattgcttgagtcccagaggcagaggttgaagtgagccaagatcatgccactgcactccagcctggggaacagagcaagactctgtctcaaaaaacaaaagggagagagagggggtcactcaggctggagtagagtgttgcgatcatagctcactacagcctccaactcctggaatcaagctatcctctcgcctcaatgtcttgcgtagctgggactctaagtgcacaccaccatgcctggctaattttttttgtttttaattatggagacagggtcttgccatgtttccccggctggtcttgaactcctgggcccaggtgatcctcccacgttagccttccatactactgggattacaggcatgagccaccatgtctggcctgacgtaacttttaagtcatttgccagttttctttatacagatataacaactgaaataagaaaatgtactttaatttacaatgccttatgtttggaagatacctcatgtacctcatgacacctaatacaaatttcagttaaaaaaaattacttctacaagcatctccataaaagtcatcatcttagaagaataataagagatactgtgctcactgctttttaaaacatacagaagggtgttttttaaagtattaattgatggaagagtcttcctttaaatttgcttctttagtaagttcagttatttatttatttatttatttatttatttatttgagacggagtctcgctctgtcgcccaagctggagtgtagtggcgcgatctcagctcactgcaagctccgcctcccgggttcatgccattctcctgcctcagcctcccgagtagctgggactataggcacccgccaccacgcctgactaatttttttgtatttttattagagatggggtttcaccatgtttgccaggatggtctcgatctcctgacctcgtgatccgcccacctctgcctcccaaagtgctgggattacaggcgtgagccaccgcatccagccaataagttcagttattaattctaggtctgctcacaccccttgccttagcttctgtgactctaaagtcacttatttcctatttccctgttccttcttttagccattaaacaactgttgagtaccattgatgtgcctcagatatgaaggtgaataagacaggatccttacctatgttgcagatcagtctctctttcgttagctcatcttttcagtatctaaatgtctaagctgaggtattacccaggactctgctgcttcctttttaaaactcctcctccaaggtttcaagaaaatccccgtctacatcaaaaatcctaatctgtttaaccgcaccgcccctccccaccccaaccccatgccacactggctgattatcttgttaagtggaaatagacaattgcttaattaactcaggtgtgccaaatgtggcatgttttaacattgaattctttcttttcttttctttctttctttttttttttgagatggagtcttgctctgtctcccaggctggaatgcagtggcaccatctcggctcactgcaacctccacctcccgggttcaagcgattctcctgcctcagcctcctaagtatctgggatacaggcatgcgcctccacgcccggctaatttttgtatttttagtagagacgggtttcaccatgttggccaggctggtctcgaatgcctgacctcgtgatccgcccacctcggcctcccaaagtgctgggattacaggcgtgagccaccacacccagccacatttaattttttcttagtaaataatttcctatgtttgtttttattttcagttctggatacttaaaggccaaacagtatatggaagaagaaaactacgataaaatcataagtgaatgctcaaaagaaatagatgctgaaggcaaatacatggcagaagcattgctactacgagctaccttctacctgcttattggcaatgccaatgcagccaaaccagatttagataaagtcatcagtttgaaagaagctaatgtgaaggtacattaaaaaatgtgtgtgaagaaattattaaatagaaggcgatgcc

SEQ ID NO: 30075 - DNA, 2300 bp, Homo sapien
ccaacacagtgaaaccccgtctctactaaaaatacaaaaattagcggggcatggtggcgcgcgcctgtagtcccagctattccggaggctgaggcagaactgcttgaacccaggaggcggaggtggtggtgagctgagatcgcaccactgcactccagcctgggcaacaaagtgagactccatctcaaaaaaaaaaaaaaaattcaacctgaatagtataatatggaaatgacttgcatacatatttaagtgtatacacttggatacaattagaagttacttgaccaactgtatatacttatgtataaaactgggagatatttgaccaaacgtttctctgacctcgacttactctggtactaccattgaacaactccagacccagagaaaatccaccacacccaatcccagtattgtcaaatgcagccagactaattctctgcacagctgtcagataccaaaaggatttaacagtcagttcaccaaaaccatacaaagcagttcactaaataatccaatgcttggcctcacatcagagaaactgtatcatgcatattaggcttggtcatgtacatttccaggtgaaatggaaaaactgaatttaagatgcttccaatcaaaaagtttaagaagtcactcccattttttttttttttttttttgtatgtgtgtgtaggcctggacctggggcagggggctgtgtgcaaccaagcctggtgagcattgctgtggccgctactcttgtgcagcaagaggggacagtgcagtgcagagcgttttctgacaaaggccaaggggtccggagtgcaaaaggacaccttggggctggggcatggcaggagaggttacgggcgctgagtgcttgcagccaagggggcttcggggttgctgagagaggacgagccttgggagcttgacagttctgcttacagttcagaggctgtaaaacaaatgccactgaacaccatttcactctttagaacctgtgtagtctttctttttctatgtagaaagccatctaatcgtttttgtttttgttttgcttttgtcaactaaccgtcactgtagttgcccacttacccccagcaaaaacacactccaaaagggggagtggctcattattaaaaggctcttagcgattaggttgtaggctttggaaatcacagaaacagttcgtatcacgatgtaccaattgttaatcgaatttagcttccttcacttattaaatacaatcatcacatttgcaaatgccccactcccatctacaacactagggataaatgctgtgtcactgagaagaaaagcaaaggatttttctgaaaccaaaagcaaactgtcaaagaatgccagtaacctgtcatcgagctactctatgccctccactggcagccagaaatgagtctccctaaacccaagtgttgtgctgccgcttggcagcttccgtctgatgggaagccccctcactgacacaacccgccaaggaaaagctgcacgagccagtttcctcctctacggcctggggctgcttctcaccatgtccaagtgagcaccgggaccttcagggtgtccgctgcccggggccggactggccctgccctccggggtcttccgttcgctgttgcgcttcaggccgctggcgtcgccccggcctctggcctcccggcgccgttgctgccgactccacaggtatatggcacccgcgcccagcagcaggggtgccccgaccgccagagccagctgccatcgcggcagcccccccgtgcccgggcccgcagtcccgccgccgcccaccccactcccggagctcggtacagcggctgcgaccaccgctgcctccacaggtttagaggcggccatgacaagtgtcctctgccaccgcctccctgtctgtcgcgagcgccacaatcaccaaacagcgtgcgaaggaagaccgagggagggaaggaaagcaatgagcgagcgagcacgctaggcagagagagcggacgacagaaaagggccagaggtcaccggaagcccagggcatgccgggccagacctggccgtccttctcctccagtatcaaccgaagagggagaggaggggcggaaatcacttccgggttaagggaaagcgtgggtgtgagtaggagtcttcggaaaccctttttctttcttttcgccccgctgctgttcgggagatggacttctggagtccccgtcgtagctggtgttgtcccctctaccttcaggaaagaagggcagatggccctcttgcctactgaagccgaggaggggcgcgtatacagcgggctaagggcg

SEQ ID NO: 30076 - DNA, 2300 bp, Homo sapien
ctggggcatggcaggagaggttacgggcgctgagtgcttgcagccaagggggcttcggggttgctgagagaggacgagccttgggagcttgacagttctgcttacagttcagaggctgtaaaacaaatgccactgaacaccatttcactctttagaacctgtgtagtctttctttttctatgtagaaagccatctaatcgtttttgtttttgttttgcttttgtcaactaaccgtcactgtagttgcccacttacccccagcaaaaacacactccaaaagggggagtggctcattattaaaaggctcttagcgattaggttgtaggctttggaaatcacagaaacagttcgtatcacgatgtaccaattgttaatcgaatttagcttccttcacttattaaatacaatcatcacatttgcaaatgccccactcccatctacaacactagggataaatgctgtgtcactgagaagaaaagcaaaggatttttctgaaaccaaaagcaaactgtcaaagaatgccagtaacctgtcatcgagctactctatgccctccactggcagccagaaatgagtctccctaaacccaagtgttgtgctgccgcttggcagcttccgtctgatgggaagccccctcactgacacaacccgccaaggaaaagctgcacgagccagtttcctcctctacggcctggggctgcttctcaccatgtccaagtgagcaccgggaccttcagggtgtccgctgcccggggccggactggccctgccctccggggtcttccgttcgctgttgcgcttcaggccgctggcgtcgccccggcctctggcctcccggcgccgttgctgccgactccacaggtatatggcacccgcgcccagcagcaggggtgccccgaccgccagagccagctgccatcgcggcagcccccccgtgcccgggcccgcagtcccgccgccgcccaccccactcccggagctcggtacagcggctgcgaccaccgctgcctccacaggtttagaggcggccatgacaagtgtcctctgccaccgcctccctgtctgtcgcgagcgccacaatcaccaaacagcgtgcgaaggaagaccgagggagggaaggaaagcaatgagcgagcgagcacgctaggcagagagagcggacgacagaaaagggccagaggtcaccggaagcccagggcatgccgggccagacctggccgtccttctcctccagtatcaaccgaagagggagaggaggggcggaaatcacttccgggttaagggaaagcgtgggtgtgagtaggagtcttcggaaaccctttttctttcttttcgccccgctgctgttcgggagatggacttctggagtccccgtcgtagctggtgttgtcccctctaccttcaggaaagaagggcagatggccctcttgcctactgaagccgaggaggggcgcgtatacagcgggctaagggcgctcaagagatccgagtggaagaaaaagcagcggcacagcactggaatgggcgggagtggcagaagagttgtgaaggctattggctagcaagggtggtgggcggggcgtagaccgagctacccagtttactggtcgatttcggatccagttttccagttatagccacgttggcacctcttgaacctctgtggccgttagcacggttttctgcccgcgtgcccgagaaaccaacggattagaaggacttttaaagatgtgtgaggaaagagctcaccgctgaagaaggctgctgcatcactgaacttcttatcactaacatagcgagattttagtttggacgaatttgaggttataggggagatagcgatggcagaagactaggtggaaatggcacatctaggttggctgcagtcgaaacggtttgagcgtggtcgctgtggctcatcgtcggcaccaattaacgaagcgatgacatctgcgttgttaggggtttcttaaactgagttggtagaaatgcgaagcgtcagggttcccgccggcttcgagcctttcttggcgtatttgtatcttgagctgatttctgcgtcagcccacatctcgctctgatccgcacgccccccgggttgttttgcagtagcagtctcagccctcttctcgtctcattcccaaatcgtaatttcagttcacagctttttatctataatagctttatcaactctttttccgatgctctgcaccagatctcttaaaatataaaattaccttgcaaggtattgtttggaatacacggtattttcatgaagacaactattaatagaaaaatca

SEQ ID NO: 30077 - DNA, 2300 bp, Homo sapien
gagcgaaactccatctcaaaaaaaaaaaaaactcaggtcttccacaacctagtccattagactatctcatttaactgcctcctaagatacagatcaaaggtgaagaaagcttcttcagttgagttccactaatctaccaagaaaaagataatgtctatgttcacatatacagaactttaattttttagaaatgaaaggcagtattttacttctttactttaaaatttagaaaaactgagaactaatcatcaaatatctattgctttgtaacaaacatcaaaagaactttaaatattctctaattaaatctttactatagcctgagaggtagatgttttcaccatttcacagattagaaaaacatgcatcagatcagtaaggtcccaaagccagtaagcgacactctatttggctctacagtaccatcaattaggaaatggaggagaaaatgagagaatagcataggctagagaatggaaatgagatgtttatcaaagtataaaagtaaccagaacagattcgtttactaatgccaaccttaaaaataaagccaaacaaaatcaggcctttagataaatattaatccaaaaaatgtttcaagaaaataacaccgattccctttggagaggggaactgtgcagctgaggacagggactgaaggaagacttttcacagtaaactctgtaacttttggagtttaaccgtaacagtgtattgcttactccaataaataagaaaaaggtttaaaaaaaaaacttcaaatatgttttagttcctatcaagtttgtaattgttagcactctacaatcctccaagaggccacagcaaaactgaaatttcagaaaaaaaaaaaaatcctaacttgtgttctgaaaaaggcaaggcagagcttatattaaggggcagaaaatttgcctttggggattgggggatcaggaggggagaaaagcctattgcctgcaacgatcaactcaattccactgctatttttagcccatttttttagtctgttgctaagaaaccctattgcctgaaggcaatttactaataggaacttacatgaagcaggagaaaccggtgatcctgaaattctttccaattaggccattctattttaatcagtccattctggtgccacttgataaaatatctcctttcaatctttatgtagctctactgtgatgttgttgcacttaacagcaaaacaatcatttatgaaatcttaatgtaaggcttctgcaaaccagtataccagaaatggagaaccatagttctggactctgatttttctattaatagttgtcttcatgaaaataccgtgtattccaaacaataccttgcaaggtaattttatattttaagagatctggtgcagagcatcggaaaaagagttgataaagctattatagataaaaagctgtgaactgaaattacgatttgggaatgagacgagaagagggctgagactgctactgcaaaacaacccggggggcgtgcggatcagagcgagatgtgggctgacgcagaaatcagctcaagatacaaatacgccaagaaaggctcgaagccggcgggaaccctgacgcttcgcatttctaccaactcagtttaagaaacccctaacaacgcagatgtcatcgcttcgttaattggtgccgacgatgagccacagcgaccacgctcaaaccgtttcgactgcagccaacctagatgtgccatttccacctagtcttctgccatcgctatctcccctataacctcaaattcgtccaaactaaaatctcgctatgttagtgataagaagttcagtgatgcagcagccttcttcagcggtgagctctttcctcacacatctttaaaagtccttctaatccgttggtttctcgggcacgcgggcagaaaaccgtgctaacggccacagaggttcaagaggtgccaacgtggctataactggaaaactggatccgaaatcgaccagtaaactgggtagctcggtctacgccccgcccaccacccttgctagccaatagccttcacaactcttctgccactcccgcccattccagtgctgtgccgctgctttttcttccactcggatctcttgagcgcccttagcccgctgtatacgcgcccctcctcggcttcagtaggcaagagggccatctgcccttctttcctgaaggtagaggggacaacaccagctacgacggggactccagaagtccatctcccgaacagcagcggggcgaaaagaaagaaaaagggtttccgaagactcctactcacacccacgctttccc

SEQ ID NO: 30078 - DNA, 2300 bp, Homo sapien
aaactgagaaagaaaatggaaaaggcatatggggtacagtctggaggaaattaggcacactcttccaaaaagtcttgttccagtgaagtcccacaggatgtgcttaattcctccagcaatgagttgtgataacacaggaagtcttggccatttgcaaaaaataaaaatgttagaagatatgttaagctttggctacttttccttagtaacataaaagttgtgatgccatgctctgtaaacattggtcatagttatcaagcttatctttttgcagctcaaggaaggattttcgtagggcaaatggccaagaattcctgattgaaaatgcgagacttctccaagttctcttgaaatactggcaggatggtggaaagagcctggactttgtttttctattccccgcttcaaacttgattttgccgcttagtattaatttcactttggcaaggggtgatctatttgcatctcaacttccttatcagtaaaatgtcatacaaatctcccagtcacagggttgttataagaaaattagcatatatgggatctggcgtggtggctcacgcgtgtaatcccagcactttgggaggctgagacaggcagatcacgaggtcaagagtttgagacaagcctggccaacatggtgaaaccccatctctacttaaaatacaaaaattagctgggcttggtggtgggtgcccgtaatcccagctacttgggagcctgaggcaggagaatcatttgaacctgggaagtgggggttgcagtgagctgagatcatgccattgtactccagcctgggcaacaggacgagactccatctcaaaaaaaaaaaaagaaaaaaagaaaattagcgtatatggaatacttggctccatacttgatgcaaagtaggagttccataaatgtaatattctctttactttgaaaaaaatgcccactaaaagacagggactataaaatttatataaactttataaaagccccaactagaagtaacctaaatgacagcctaaaatgaccatcactagtagactgaatttttaaaaaattgtgacatgttgatgcaatgcaatactacacacagcgtcaactattgttactgcaaaaacatggatatatctcactgacatcatgttgaataacacaggataatgcatactgtataatgccattgaaagtaagttcaaaaacaagcaaattaatctatggtgacacagatcattaatggtaaacttttgaagggagtatggattggaagggggatacatggagccagttggggtgctggcaatgttttatgtctttacctgcatggtggtggtaacacaggggtatatgtatataaaaattcatcaagctgtgcacttatgatttgtacattttacacgtacttgtatattatttacatgtgtacatatataagtaatacctcaatttaaaaaactactccttttgatctaggagctggattttatatcaatatcattttattaggagagtatctagctccagatatgacatggcaacagctggctaccttgcaagctgtggtcagtctgttccttgtatgtggccccatttcagagcttgcctggagctgacaggcatattgtgagggtcatgctccatcatcattgacagctggagatgccatcacatgtcattggcagcaaagcacagggaaaaccaggcagtggactctgcatcccacccttaggctgtgaggcacaagccccagcaatggaaggattagaaagcctctcaatttaaaaagacaaggggaggggaatgtgggctgcacaatttataaatagacattgcccaaggctgcctgatgatgaagtggttgtttagtaaatctttctcctttaaggatgccagtatcggagaccattttaaaaagaccagtttcattttgtcttttgggagagatcctgggtttcattgtcagccctgttgggtgatatttccctctgtcgcatttagggacaggccttcagtatttggcatcacctttacatggagcacaaagatgatgatgatgatgatgtgtcttttgccaaatggatgagcagcttctggggccacagctggagagaggaggatcagagaggactccgggaacgccaccgactgcaagccaccagtcacaggaaaacctccctgccctgcccagtgagtgattgtcatggaaccggaggggagagctggaataggggagggggtttctcttagataattttttgaggaatctttggatataaagttttctttggtttaaaaccagtacttctgagtct

SEQ ID NO: 30079 - DNA, 2300 bp, Homo sapien
aacccattgcaaggaagctaaaaaccttgataaaaggttagacgaatggctaactagaacacacagtgtagagaagaacttaaatgacctgatggagctgaaaaacatgccacgagaactttgtgatgcatgcacaagcttcaatagccaatttgatcatgtgggagaaaggatagcagtgattgaagatgaaattaatgcaacaaagtgagaagacaagattagagaaaaaagagtaaaaagaaacaaacaaagcctctgagaaatatgggattatgtaaaaagaccaaatctatgtttggttggtgtacctgaaagtgacggggagaatggaaccaagttggaaaacactcctcaggatattatccgggagaacttccccaacctagcaaggtaggccaacattcaaatttaggaaatacagagagcactacaaagatacgctctcgctctcgctctccctctccctctccctctccctctccctctccctctcccccctctccctctccctctctttccacggtctccctctcatgccgagccgaagctggacggtgctgctgccgtctcggctcactgcaacctccctgcctgattctccggcctcagcctgcagagtgcctgcgattgcaggcacgcgccgccacgcctgactggttttcgtatttttttggtggagacggggtttcgctgtgttggccaggctggtctccagctcctaactgcgaatgatccgccagcctcggcctcccgaggtgccgggattgcagacagagtctcgttaactcagtgctcaatggtgcccaggctggagtgcagtggcgtgatctcggctacaacctccacctcccagccacctgccttggccccccaaagtgccaagattgcagcctctgcccggccgctaccccgtctgggaagtgaggagcgtctctgcctggccgcccatcgtctgggatgtgaggagcccctcggcctggctgcccagtctggaaagtgaggagcatctctgcctggccgccatcccacctaggaagtgaggagcgcctcttcccggccaccatcccatctaggaagtgaggagcgtctctgcctggccacccatcgtctgggatgtgaggagcccctcggcctggctgcccagtctggaaagtgaggagcatctctgcctggccgccatcccatctaggaagtgaggagcgtctctgcccggccgcccatcgtctgagatgtggggagcgcctctgccccaccgcccggtctgggaggtgaggagcgtctctgcccggccgccccgtctgagaagtgaggagaccctccacctggcaaccgccccgtctgagaagtgaggagcccctccgcctggcagccaccccgtccggaagggaggtgggggtcagcccccacccggccagccaccccgtctgggaggtgaggggtgcctctgcccggccgcccctactgggaagtgaggagcccctctgcccggccagccgcccagtctgggagggaggtgggggagtcagccccccacccggcgagcctccccgtccgggagggaggtggggggtcagcccccgacccggccagccgccccatccgggagggaggtgggggggtcagcccccccacccgccagccgccccgtccgggaggtgaggggcgcctctgcccggccacccctactgggaagtgaggagcccctctgcccggccagccgcccagtctgggagggaggtgggggagtcagccccccgcccggccagccgccccatccgggagggaggtcggggggtcagccccccgcccggccagctgccccgtccgggagggaggtgggggggtcagccccccgcccggccagccgcctcatccgggagggaggtgggggggtcagccccccgcccggccagccgccccgtccgggagggaggtggaggggtcagccccctgcccggacagctgccccgtccgggaggtgaggggcgcctctgcccggccgcccctactgggaagtgaggagcccctctgcccggccaccgccccgtctggggggtgtacccaacagctcattgagagtgggccatgatgacaatggcggttttgtggaatagaaaagggggaaaggtggggaaaagattgagaaatcggatggttgctgtgtctgtgtagaaagaagtagacatgggagacttttcattttgttctgtactaagaaaaattcttctgccttgggatcctgttgatctatgaccttacccccaaccctgtgctctctaaaacatgtgctgtgtcct

SEQ ID NO: 30080 - DNA, 2300 bp, Homo sapien
tcttctctcaacctcttggagtttccaatgttggaaaatatatgaagtccaggattttttgttgtgcttagcaggagaaatggaatactgatgtccactccatcttcctgagagcagaaggattctttttttttttttttttttttttttttagtgatttttggtcaatatcagatgcctgttgatggtaatgagtgtggagggttaatcaataccttgactatcagcccactgttgagcggcttctgtgataaaaagtgcagcattgtgagattacaaatgattcagaaagctgaacacatgacacattactttcaagggctacattcaaatgttgctcctttgtgggtttccttgactgccagaaggattggagtgttgtggttgcactcatgtagtgccactttacttgctgagcaggctcctgcatttgtgggggtcttacagagttatgataacattgcagtcaggtccattgaaattgaggtgtctgactatccaattgtggcagacagacttgtaggtggcccctgtgatctctattctctggcttttcagaaccgtggatggccattgggagcctaagagcagtctttcggagctaagggcagcctctagctcacatctagaaagaaactggggagtcagtcctagagctgcaaagaaatgaattctgtcaatgacctgagaaagcttggaaatgattcttctccagtagagcctgcagatgacaatgcagcccggctgacaccttgattgcacccttgtgagagcataagcagaggatctagtttggccatgcctggacttccaaccttcagaaactgtgcagtgatatacatgtgttgtacaaagcactaagtttgtgggaatctgttgcgcagcaatagatgacaaatacaccaacaaacaagacattatcattgtagtgaaagctttggacactcataataaattctgacccctgcagggatggcaaattgcagatgagtttatgtatctatgatggagtgctgcaaacatatgtttggagacatctgtggtaggctgggataggtgctgggtcttggagattattttaatatctattttataaggtagttgtaagaattaaatgtgataatgcaggtaaaaactgtttaatgcggggtctggtgccttccctggcgtgcagcccagtgagtgtggctcttgcccacttaatatttcaatgagggaacggttctgtcaatatgcacaaattataatggcaattgatttgcagatctcttctttcctcctctccttctaactcactaatcaaaaaactggttaaccctccaactgctttcccaagttcaaagcaacgtttggcgcagtcctttctcaattctcacacaacaaagcagtatttctcggttccctacaacgaccatcactcaatacaaaaaaccaagcaggtctgccaaaccactctcatacccagtcctggtcatctccgcaggaacaacttcaattctggttaataaggacttcaacgaagggttcattaaggttttccctccaccgaaagaaagaataccgtccccagggagcaggctcttgggccctattatttgctccctggagaaagtgaagagagaggaatcccaaggcgtggcctgaacgccctttgggggcgtgggcagcccggagccccagcctcttccactccaagcaccaggcgcgtcttattttcagcccccaaacggctacaaatcatccgccttattttcagcctccaaacggctacaaatcatcctgtttaaacaaagcggtctgtctaaaaggaggggcataacagggccggggcaggggcaagacctgggagtaggcaacctccctctctgccccgagccgtcccggccgcgcagccgccgagtgccacatcagcgacggcgctgcacttccacattcccttaggatgcagccagcgggcctgagagaggggcgggcccgaggccctccggagtggcgggccgcccggccaatcggcagcaagtgaagagctgcggccaccaatgagctggggcttgtgccagccgcggccgccgaggcccgtgccccgcggggggaacagatgaagcacatctggacagctgtgcggcctcctcgcgggccgacgtcagccgagcacgtcccccacgtcctctccttctcgccacttattatttattcgttttcccaaagaagcgactagggacccaagtttaaaaattcctccccccacccaatgcgagacgtggccagatcccatccaacacacggtttaattttcatgg

SEQ ID NO: 30081 - DNA, 2300 bp, Homo sapien
cttttctttttttttaagacagagtctctctctgtcacccaggctggagtgcagtggcacaatctgggattattgcaacctccgccttctgggttgaagcgattctcctgccttagcctcctaagtagctgggattacaggcatgtgccaccacgcccgattaattttttgtatttttagtagagacagggtttcgccattttggccaggctggtcttgaactcccaaagtgctgggattataggcataagccaccgcacccggctgggaatggaatattcctaatgaggaacttgatactttctgaaaaagtaaattttcaggaaaagccacaggcttgaagtgtatcatctttccttcatggtttggcacatccacgtaagggtgtaagttctgtaagttccttttccatgtgttagttaacaaatgacgtttagaaatatcctctttctcactgtccccatgccaaagatcagcctttcatatttttccttaattgtcaaagaaatatttgagcatctaaggtgatattctttattactgtggatgtgatttgggaaacaattcttggagggcaactctgagtctgtggtgaataaaaaagtgaggataaatgtgaatgaatattgtttctggggttctctgtgcagctggaaaaatgatgagcaagttagcttaattagctgagcatcttcctcttcttgaaagggctgtgatgcttgtgattggaaaaagccgttcttacgtggcatccttttaggaaagactgtggtttaaatgggcttgtttacaggcctcacttttgggcttacctccacctccaagccatccaccatcattagccacgtttctaaaattaacttattagaggaactgtttgattcattagataagtgggttttgattgggcgtggttatggggtttaggagggtctgctggttagttccactgagaccctgaacagtatgaaggggaaggctagttaagaagcagaaagaaaaaaggaagccattcttctcaaacattttgttggaagtctgctgaaagattcattttgcttctgggccccacagattgcatagctggttctgcctctatgctttcaggtcgctcaagtgttaacaggagtgagaaattagaatcaagggcccatttcctcactttcttccaagtttctgtatccacatgtgcactgtatgaaactgctgtccatactcttgtcttaattgatttaatgtttaatctcctttaacagaaggtttgcagaggtctcttttcttcttctagtacaacttgcatacttatttagagtctgtagttaaaagggtgattcaggtcttggcaatatgtgaaacttctgtcctttgaaaagaagtcatttttaaaatcttggtttactttgttttatggtaacaagacaatacatcttcttatttatttcatatgtgcactccacactcattccagcaggccttatttcttaagcaagagacaagaaatggccttattgactggcaggtacaagtgctgaaactagcactaatgactgtgaatattcattcctgagtcgtatttgtgttcagactcaggtgaggggtgcagactggagtgttcgtctattccccttgtgtgggttaagataagcatgagatggtcggcttaggttggcccaggtgagagaagcaaagtgatgggtggccctgttccctgtgggaggctttacttttccatgcttacacactgaacacctaagctggctggtcaaataatcaagaggcagacttggtaaaaatgtgaataaatgagtgtagttactatatagccattaaagaaaaatctgctaatggtgactcagtagtgcctccctgattgtaaaggacaatgtcttctggtgagctgtgagcatgttccatgggttgacaatcagatttacatgtctgatgacattaattgcagggtgctatgggccaggtttctgaagttgggtggaggtggaggccaccggcagtgagtacaacgcccaggggaagcatgtgagtgggaggaagaaaagagagttttctggagctgttgcaatgtgtatgctggtgaaatctacttgagcattaagcagtatctcccagcattgttagctactgagtggcacatcttcagtacgcatgattcgtgggggactcaggcagaggtaaaagtgtggtaagttttaatactgtgtttgcttactagttgcttttgacatgcatacaggttgtgtgtgtgtgtgtgcatgtgtgtgtgtgtgtgtgtgtgtaaaactgac

SEQ ID NO: 30082 - DNA, 2300 bp, Homo sapien
tagatttatttattatttattgaaaaccattgttttattattgaaaaagttatatatatttatttataataatagaaagaatacacaaggctaaaacttcaaactataaaagggatataaaattttaaaactctctcctacctcagattcctcagattcccaagaggaactttttcatgtacctttccagacattttctgtgcatgtgtatgcagacatatcagaaacagatttttaaagatctattcccagtaaatgaggtaatgggtttgcattcatttgtgttgtacttctgcagcagtacttctaagttcttccattttgtgctacctcaatttgtttttctgaaattcttgggaggggtaaagttagggccttatgtttatagcaaaacatttataaagtgaatgtcacagagaattggaaacccccatagtgtttgggggttaactaaaggtcagtttaagtgtaaagccttttttggtaaagccttgctgaatacttcctgaaggaattaatgggctggtatgtaggtagtaacgggctagtacataggtttccaatttatgatggtttttttcacttctgatttttcaacttcaccatggtgcaaaagcaatatgcattcagtagaaaccatgtttggggtacccatacaaccattctgtttttcactttcactacagtattcaatatatcacatgggatattcgccactttattataaaataggctttgtgatagatgattttgcccaattttatgctattgtatgtgttttgggcacatttaaggtaggctagcctaagcaaggatgttcagcaggttaggtgtatatttaatgcgttttgacttaagatattttttaacttaaggtggatttattgggatgtaatcttattgtaagtcaaggagcacctgcactccataataattaaatatgatgatcttttattttagcagttatgacttgccttataggtggctatatctaggtatctcacccctgagaaattatgagttctttgaggaccctgttcatgtcttgtaccaattcaaacacattaaaggcatttaatatggatttgatgaagcaagggagtgtccagagaagaccagagcatctgttctctctaccaaaacaaaactgtgattgaggaggtgaatgttcatgtatctgttcttccctgtaagggtagagggtagggaaggagaacatgggagcctgggcaggagagggtcagagctgcatctatagagagacaccagtttgtagttactctgatgatgtattagtttcccagggctgctctaataaagtaccacaaactgggtggcttaaacaacataaatttgttgtcttacagtttgggtggctagaagtcaagtcaaggtgtcagcagagccagttccttctgaggactctctcttgtagatggccgtcttctctctctgtctcttcagatcatctttctgtattcatgtctgtgttcagatttcttcttcttatgaggacaccagccatattgattagtgaccaccctaacaaactcgttttaactcgatcacctctgcagtaaccacatctccatgtgaggcctcattctgaggtaccgaaggttaggactccaacatatgaatgttggaggggacacaattcagcccatagcaggtgggttatcatgctgggctttagtgcttgtcaagacccagcctgtgccagtatgcacactcaccaactgcatctgtcaaaatgtaggctccttaaagaaatgcaagcgctaaaaaccatgtgtggtgattgccatttatcctcttattgacaacctagttcatttccccgagagagtgttttgtgtggtctgaagcacctgccagtctatctctgctgtaccctcccaagacaaaaatacaggaagccgagccataggtgactactggcaaccactgcctttgtgatttcctctttggtttcttctattttgttcccttccttcactctgtggcttgtctgggcattcactctttgacccttgtggctagtccctccccttcttctttattgccctgagttatctccctattcccataactctaatcacttttttcatgttctccttgagtgaaggatgaggaaattgaaagcagagtatgcaccttttattaggagattcaaactgcatcctactggattagcctcaaaagtcctaaaatacaaagacatccatctgacagatcactgaggggaggacttgtttttctgttttagaatagtttccgattaaactttttagctcaag

SEQ ID NO: 30083 - DNA, 2300 bp, Homo sapien
gttgaagcaatcctcctgcatcagcctcctgagtaagctgggattactcataccaccgtgcccgactaatttttgtatttttaatagagatggggtttcaccatgttggctaggctggtctcgaactcctgaccacaggtgatccgcctgcctcagcctcccgaagtgcagggattacaggcgtagtaagtaagccaccacacctggccgccactcttatttttaaaagttgacatcagtttgtgaaaaaggactgttgtttcatcaaatttcagcaaatgatgatcaatagcacattaaaaatggcttcatctttgtggaagttttgactggatatagatccctgacatttgagaccaaaggaaagcctcttgatggtgtaactggaccagaatgaagagaaagaaactattatcaaagacccttggaaacaggaaactccaaacctgatgcgggtctcagggcagtatctatgagcaggtgaaatagaaagtacatctaactagatgttttttcatgcagattaaattattttgaccaaagttgtacccaaatgcacatgcatggaagagctaacactaggggacaagcaagggggaggaagaggaaaccaacctttatgtacagcctttcatgtgcctggcatgttgcatatgttatcacatttaatccttataaaacttctgtgagttgaatgttattcccatattataaataattatagccaataacacttactaattgttgagcacctactgcatgccaaatattgtgccaaatattaatgtatttattagtttatcatatttaatttttataacaccataaataggtattaatgtacacattttatagatgaggaaaatgtggttctgagaggtgaagcattttgcctagtgatcacagctaaaaagtgatagagctgttctttattttaaagttcacattgtactaccctggctccctaatcacagatgggcagggtaggggttgggtgggaacagaagttggagagtggatgtggctgccaaccacacaagttgtgccaacccacagattgaggaaagatgctaaatttggaatctggcaaaccagtgtttggttcttagctctgccacttctaagctgtgtgaaacttggttgaggtccctaacttctcctgagggtgaacaactcacaaagttgttttgcttattaaatgtgataacacctgtaaacatctaacagagtgcctagcacatagcagggatctagcaattgaattagggttatttgtttctgtctactgattgggtattgtttctgacacttacccaagtgtgaatagcctataacactggtataatttgtgaaatgatgctgccatctagtgaaaaccaagacacacacacacacacacacacacacacatacacacacacgtgcgcgcgcatggacacccagcttcaccaatgacaatatggattggcatgttttagcctcacaacacagagccctggggctaactggcacctagagaggtcatctcggccagtgccttccaaactaccagtgctgaaaagccagttcaaaaaattttgaacccattgcacaccaatatttttgtgaaataataaaaataaattactggaaaaatgaaataaaaaatatgtataaaatacaaaccaaaattttagaactgttagattcaacagcaaaaaattgctatatacatctctgaccaattgctttcagtttctgtgcttatctctctacgacctttgtaacacacagtgaaccagcgctggcccatggatacactctagtagccccaatctagctaaggcagccccttatagttaatcaatcctgtcaaacaggaaaggctggcaaaaccactggtctgcatgtactttgtcctttacacaaggaaggatgcaaacgtggaaaactgagtggacatggtgttcaggagattgaggctcagctaaattccagcttatttacctgcagttgcttacaaagtgtttggacataattgtgtaaagctagggttttttttctggtttttaaaacaggtaaaggatgtcacagcaccacttaataacatttcttctgaagtccagattttaacatctgatgccaataaattaactgctgagaacatcactagtgctacgcgagtggttggacagatattcaacacttccagaaatgcttcacctgaggtaaaactcacagagctttaaaaaaaattttttttttatttttagagggggtgttgggaaagaaagagagatgtcctgaataccactccttat

SEQ ID NO: 30084 - DNA, 2300 bp, Homo sapien
acaggacaaaaaaggaggcaattaatctgtaacatagatcagtcattagaaaggggaaaggtctggcctctcctagtcatttacagaacaagaacaatgaggaagagagttaatctataatctaataagcagaagttgcaaacacgctacacgtgattcagtctccagggcttaacttccttttgacataataaatttagagggtcttgaaattttattttcttttattgccatatggaccctggagcaggaagatgactgaggatccaaggcagctttggaagccttagtagaggagtttacaggtcttttcttattttcaacaggaagaattagcctcttatttttaatttgtggtttttctcacaatgatgtaatgacctctctggcttcctctaaattatgactttcctgatataactacagcactaatcaaaaaaaaccccgtttccaagaatctgatgacttattttagtcaattgtgccaggtggatgaccactttctggattggcttctctggggcaggtgcccatctgtaatcttatcagttatgacaagaggaggaaagaagtacaagaaagaaaaaatgaccttagaagtagctatggttagagcaaccctgtaaaagtgggaacatgaaaaacacctcctgtatatctaccacatctttccttttagcctgcaaatgcctgagggagcagctcctggaactcccactgtttcacagagtgctgacctctacatagatactcaacagatactgtttggtagaatgatattcttagcaggtgggagttttgttaggtattcctcccattgaaagcagctctggggtatgtgtgaattgctgaaaatggttttataaaaggaaaacatttcaatcagaggatctaacctgaatgtttccatacgaatgatgattatgttctctttataaagcaatcctcaattattgtaaactttctttttatctcatttggaggtagagaaaagatattttagtgtcagaaataaagatttgacatatagaacaactacattttgatgaaatcctttcatttctggaagaactagactgattattttacatacagaggttttgtttggtcaagtacagaaatagttcaaatatttctatgggaaacaagaaaaagaaaaggtcttatgacttttctttggagaatgccaaattgacaggttgcccccactccctcccaccttccatctaatctatctttgaacttagccaaagtagaaaagaacattgtaaaaaccttcagggtttagttcatagctgaggcaatgagctcagagctctgctctttggtggttccatctgaactgtcacctcaggaacgaacaacttacaaaacatgctttggatcctaaggggtttgggtgagaggaagaagatgaataaatggaaatggattctcaccactggagaaaaaattagaagtgcatgccttgccaatggtgggtggcaacaccatccttctatgtgaagagcatcataataaagactatttcttttgggaattctataattcttgagttctacctttttgccatctatgttcaaggtagccttcagtgaggactgtccaccagaactgttttatttaagtacatataacacaacaaaactctagaaaagaaaaccaattattcttaggcaattgtcaatgttgtcatgaccacacaattctatgctcatgtctttctgctgtagtgtaagacagaacacatacctttcattttatgacaaaatcttgagtattaaattgtgttttattatatgcaggcttattgagcaaatggagacttattccttgtctttgggtaatcaatcagtggtggaacctaacatagcaatacagtcagcaaatttctcttcagaaaatgcggtggggccttcaaatgttcgcttctctgtgcagaaaggtgagctgttaatcttatgtgcttgtaacagcaaagagcattctgctactgatgatgaataataatgctctactcatgataatgtagacttttacaattctactctttcccttctcataggagctagcagttctctagtttctagttcaacatttatacatacaaatgtggatggccttaacccagatgcacagactgagcttcaggtcttgcttaatatgacgaaaagtaagtctcaaactttgtgacatttaaaaaaatggactcgaattcatggaactaataacttctaatttactctaggagaaataatgtctacttagtttcatactgagtaatttgcatttgagtaagt

SEQ ID NO: 30085 - DNA, 2300 bp, Homo sapien
gccatgtacacaaatatgttttcctacaaaaatcttgctaaggtggttctgttttacacttacaaatttaagacatattcaatcacaagctctgaccatgtttactagtggcatgacactctcaggctcagatgcatcctgcagacctaaccctggagaagtctatgtaattggcacagacatcatttagtagtatcaattttaggttatctcctctctgtggtgcccaccatgtgctcactattgtcctacatataacctttcagaaattcttacacgtaacttgaagtggttgtatttttcaaaatctaaaaaaaaaataagtaaatcaaacagacacacttacttttcatttctccccaagcaaaaaaacccgatgtcagaaagtatatgtgttagatagaatatatttataatagcactaaaaaagaagagagtattattcgtgaatctggcactctggaattttgctctcatttgctttggccacatgctttgtgatggtagagactagatctaagtcttctatcttcttgtgcattttttcttttaatttaaaaatacttcatgcatacagaaaagtacagaaagtaatgtgaacagtacctatgtaactatcagccaggtaaacaaatatcaatttttcctatatttgcttcagatctctttaaaaaagagagagacaatattacagttgcacctgaagccctctacctcacgaatcactgcagcctcaacctcccaggaggaagcaatcctccagcctcagcctcccaagtaggtgggactataggagccctgctaattaaaaaaaaaaaaaattaaattttttttgtagagacagaatctcgctatattgctcagcctggtctcaaactcctgggctcaagtgatcctcctgcctcaacctcttaaagtgttgggattatagccataagccactctgcctagtctcattcttttatttttaaagaaagaataaaaagaaaccttgctccattattagggttaacttttcatttagggtccaggagaaacaatttggtgatgtcaatgtactgtgaacaaaagacagcaacccatccctttctctccaggtagaggctccaacaatggccacagaggaggacaatttgggggctgtcggggccttgcctgtctccctctcaaatcagatgactgaatactctggtctcacaccacaatgttttccttttatcacttgtgaaagacaacagagtttaggaaattaattcagttaaaatgtatactgttgacgcttctgctgttttaaatatgccaacagttgtataaggtgttaggaggcagtcctggttctctttgactgctgccaccaacgggctgggtgccaaaccctccacagcagcgatggtctttcaggatctttgatgaacagctgattcctttttccaatgtccagaagatgtttcacagtagactgctagccttgggagaagcccatgattgtcatgacacagagcaggggacaatagttgaagagatggtgaagagtgcctgcctcaaaaactccacagaagtgacttgagctccttgctctgtgacttaacaccacttgtcccctttgaacaggagaccgacctcatctgggcttagccatcctggtgtcccaagctttgctatttcctgtctcatattttatcattgcaggaggtaacatgggctggagctacccacatgttgtgttcactctctccatctctcatgtataaagcaagacgtttactttatatatgagatctttgcaatacctttttgaggtggactaggcagaaattctcgttcctgtgtagaaggtaaggaaactgaagctcagaaaaaaaaaaattaatgtgggtggaatggcccgccataggttatatgtgttacttacatattgcaattaagtaaaggttcaaccagtaaaccatttttactgtactttactcaaatattaagcagccatgcacttctacaataacgtgacatattgttttttgtttaccttacagtgcacttattgattttaatgtctttttctccctatagattacaccaagacatgcggctttgtagtttatcaaaatgacaagcttttccaatcaaaaacttttacagctaaatcggattttagtcaaaaaattatctcaagcaaaactgatgaaaatgagcaagatcagagtgcttctgttgacatggtctttagtccaaaggtgagtttttcattgcagatgcaagaaaaaagtgtcctcatgctttctttctgatggtggcagctgaga

SEQ ID NO: 30086 - DNA, 2300 bp, Homo sapien
aaaattagataaaaactagactctaatcttacttttatataaaaagattcttctgagtactttttgcagttctggtcattaaacctctcaatagatttaatgaaattttgaattgtccagaaatctcaactaaaatgtcaagcagatggactgagttctgtttgaatgaaagcttttttgttcagtgtgggaatccaaagatcaagcgaggtcatgatgaaacatcgtaaaaacataaagaatacataatgggcaaatagacttcatcaaattatgagttattaagaatagagaggcatttgaaggttagaactttaggcatagtaataaacctgggaaatggtattccaagaggtcttgcagtctgaaaaatccagaaggctttagatggtagtgagtagagattttataacttttattggcgaggaactgtctgccatagtgtacatgaaagtgtaacatgcctttaaggggatataaggatatatctgcctttaagcaataaggaaaataatacatgtacaaaaaagaatatcacattttacttctgaaatcaactttattaagagaaatcttgcattctctgccaatctgaagatatacatgtgggctagcacagaatatatacatgaactacacacaccacaccatacatacacacacaccacaccatatacacacatacacacacacacactcatacacattcactcatactgccttctgaaaattgctggtaaacaaggccggcctgcagacaaaataagagaaacagctgctcttttagagcaaagacattaggtaagcatgagaagggaaaaaaaggcaattttaaagagcacttggttgtacacccagaaattatatcttccaataaagggatagtccttcggaatgatttacattcaaaatgtggttcaggacatcttgaccatctgacaatcagcaagcatttcccaaaatgtggtccttgaaacattagtccaagggagattcttgatgaaaataaggttctgaaaagtcttgcagaaaagatatgtgaaatattgttatgtataaaccatttaaaaaagcagtaatcattagtctacttaaattataaagaatagcatcagtaacaataggccatgaaacaaattaaaaatatttttacctaatttaaatcttcatgtaagcttcattctttaaacgtaaagtaagctgaatattacctaattttgttttaaagctgttacactgttatgggaaattattaaaaaattgtatttggccttattttaaaatgtataagtgacttttaaatataaattacattttaaaactcaagagactttttctctacatttaaacatgagttcatctactaatgtgcagagttttctattataaaaattttaaaactccatatagggcctcttctacagatggccttcacataagcttgcaaatctacagtagaacttattacctcatgttatattaaaaaaactgccccaaaactcagtggatagaaacacatattatttctaatgattttgtggcttgtctgggttcagctgggtaatttttctactggtcttgctggagtcttgcagtcagatggcggctgggccagagtcatctggaggttcacctaggatgctggggcagctgcatctttctccctctccatacagtctcagaggactttcatgcaatttttttttttttcagcgaggtggctgggctttttacacagtggctcagaactccaggagcacaaaaggaaaagctgtcagtgttataggattttctcctttgttcagctaaaagctgggttcttgtcacgcgactatgaaaggttaggctcgcagacactttgaagggtgaaaaggacagggttaattgggtgtaaaggaaaaaaaagggaaacagggactatcagcaaagtgagagtcctgctactaggcttccctccgtgcagattgaatccacggatacctcctcggaagaggagaggccaggctcctcccctctgcaaagggcaggaacttcccacagctccaccccgttctcccagtgcgcgggtcagttggaggttctcccggtacacctttatactaggttgtctcacgtggagggccatgttatgacttttatgttccccaggcacttgtgcctttgtggaacctttcattcattaatgaaagattaaaaattttattttatgattgcataggtacaaagatgaatatattaatatcctttgagctaagagttctcttttttcttctgagtctaaaagaagttaaaacattact

SEQ ID NO: 30087 - DNA, 2300 bp, Homo sapien
catcagcttcgacttgagaaatcaccagaaccccacctctcaagttccacagaagtagctgggaataggctttaccataaagaagactttactgatggcttcgggatgaagcatgagggaaattacaacataaagagcctcaagttgctttcggagtccatgagctccatgagctccagcttttccacaaggccagcttatgggtgcctctcttcctagcgtacagatgaccacagtgtaacagggaccagcttatttctcctcagtagcaggactcttgagtgccccctcactggggatcctcagcagatactcttttcaccttataataggccaaggttcacctccttatctcctgcctcaggatctgacctctttttagtttaaatatactactataacagtagtataattcacttccttcagggaatattttacctttgccatatggttgtggttttaccccatcccaaaccatcttaatgacatcataatactattatctgacagcagtgcatctccccaaatctgtattattcagttttaaaaaataagcaatgaataacattctttggagagcaattaggaactgtttttcatttcttctgcagtactccactcccttatccctgcaaacaattgctcaaaggtcaatacaactgttggaaaatacaaatcagaagtgaacagtgtaaacttacattatttcactctcaaacagaagtttcagagacttataactgaaaaagatcacactacttatggttgtaaaagaacgtagcttctcaccctgaaacaccagaatttactccaggtcctttaggagtatctggtgttaaagcaaactaaatatggcctgagaaggactccatacatctatacttgaatccttgtggatgaactgtaacctagcttaacagacaagattgaaaacctaacttagaagtatgcgtctcttacaataagcgagtcttggccaattccagccgccacacttcaatcactcatagactgctaagtgttcaaataaggccaacgccaacctgtaaccaatccagctgtttctgtacttcactgccaatttctgtacctcatttccctttttttgtctataaatcttccaccacgtggctctgctggagtctcttaatctgctgtgattctgggggctgcccaattcgtgaaatcgttcactgctcaattaaactcctttaaatttaattcagcttaagtttttcttttataactggtaaacaactggagaccaggtagggtctaaatgctttatttatcagcttagtctccaccttagaagtgacaaacattctccgtttggccaaacttcgggctcctgggccttctcctaggaccatctgtgcatcttcttgtaaaactcagtttcagcaaagaaccttgttaaggcagtgtagtgagaatccctcacccttgatggggttcctcatcctccaccacccccaggtgatgtctgctatcctggcctatcttcgtctagaatcctgttgtgttggtttagccagaatctcccttgcccctgatatttcctcttagtaattttccatccactgaccgacttccaccccttggctataaattcctacttactcatactgtatttctatttgaacaggtaagggagaagggaagagtacgtaggacacactcaaatgccttatcctctaaaaatcactcaggaatctttagccttaatttcccagcttttgtcctttacacagttacagattttccttgctcataaacgctgtaggtcttccctgcttaattggaaactccttgctcacaaaatgattcacccccattcctagaaccgggcttggcaaagcataggctcccaataatgaatgaatggatttatagaagaaaaggttttttctttttcagctgttactacaatggtcaacaataacgacaaaaaccacttaaagttggacagacgtctactgcaaccaactctcaaaaagtttagaacagcgcactacgccccgcccattggcgagaaacggaaatacccgctttcgagaaaaccggaagtgcgtggtcacgccccgcgcatgcgtgcatcggggcagctcacgcttcctaaatcccgtcatccagtgagaaagcagggactcttcggcctaggcagccgggacccagccagccctgcgcctcgcgccgtcgcgcatgcgtcctgggtatgtccacgcgcaataaggaggggcgaaaggacatttttttttttcttgctcccgcctctgttcttcccccacctgccacgt

SEQ ID NO: 30088 - DNA, 2300 bp, Homo sapien
ggacttctccatggggctgcttgggtgacctcatgacatgacagcttcaccagaatgagtaatcagaagagagtgaggtagaagataaccttttatagcctgtcctcagaaatgtcactgtcatttctgcaatattttcttggtatacaggtcagccctattcagtatgtgagggactaacagggagcagatactcatgtgcttgttgcttatttggtcatttttgtattgtggagttaaatctttctaatttctaagaatataaacgataccaacccattgtcataaatgctatacatgtgcagaagccgttgagggtcatgatagaggttggctactctgtgtaataaataattcccagaagtcttaccattactctttgcttcatcctgttctcttttccccttaattttttttattactttttactttattctgtcattgattctttttgaaaatatacataaaacatagcttatatatagtcatgcactgtataacatttcagtcaacagtggactgcatatatgatggtggtctcataagattataatggaggtgaaaaatttctattgcctagtgatgtgtagccatcataatgtagcacaaggcattacttacgtgtttgtggtgattctggtgtaaacagacttactgccagtcatataaaagtgtagctcacataattatgggtagtacctaatacttgataatgatgataggtgactctcttactcatttgtgaatttactatactatatttttaaatcattagagtgtactcctacttatttaaaaaaaaacaaagctgtagaaccaggctcagataggtccttcagaaggtattccggaagaaggcattgttatcataggagatgagagctccatggatgttcttgaccctgaagaccttccagtgggacaggatatggaggtggaaaatagtgatatcaatgatcctgatgctgtataggcctaggctaatgtgtatgtttgtgtcataatttttttctaaatgtttaaaaaagtaaaaatttaaaattaaaagaatagaaaaatgcttatagaataaggatataaagaataaatatttttgtatagtagcacaatgtactttaagctaaagtattaaaaaagttaaaaaatcaagtttataaagtaaaaacattacagtaagctaaggttaatttattgaagaaatggaattttaaaaaataaatgtagtatagcctaagtgtatagcgtttgtaaacctttagtagtgcacagtaatgtccttggccttcacattcactcaacacaagtacctcacttggagcagcttttaatcctacaagctccagtcatggtaagtgccctaggcaggcataccattttttatcttttttgccatattttcactgtaccttttttatgttttgatatgtttagatacacaaataattaccatgtgttagaattgcctaagtattcagtacaggaacatgctctacaggtttgtagactgctatgtaccatatagcctagctatgtagtaggctatatacatctaggtttgtgtaagtatactatatgattatacagtgacacaattttcagaacctactcttgtcattaagcaatgcatgaccatattttttattactcaaaacattgcttactataaacaatgtctgcattttgctctcttcatatatcctatagatctctcaagtatgtgaagaagttcatcctttttctttttttaaacaattaaacagacttcttaattaattttcagaatactgtgacagtcccatttggacttgaatgaggtgggtttaaagtaagtaccgtaaatcctcacttaacattgttgataggttcttggaaattgtaactttaagtgagatgacgtatgaggaaatcagttctaccataggctaattgatatgagtaagttgagttcctacagcatatctctgatcacaaaaatacccccagacttctagataaagactaaaaacaaatgtgagttatagatacatttaagaaagattaataaaaacaaataagataatgatttatgcagttattccaattcagggttgtgggtggctgaaatctatcccatcagctcagtagcaaagtggggaccaaccctgacaggttgctattccattgcagggtgcattgcaaccacacacacacccatagtcgttcagactgagatcatttagacatgctaagtaacctaacatacacatctttgggatgtgggaggaaattgaagtgcccagagaaaacccacacagacttgg

SEQ ID NO: 30089 - DNA, 2300 bp, Homo sapien
tcctgctatcattggtaattactcaaatggcagtgttgttctttaggatatggttgaaaaatacctctcagctactctgcaagtgtttaattcagggaataggaatgcttctgggaagaacatttatattctgttctattttaaaatatatatattctgattttaattctaattcatctcaactagttttacaagttctatgatcatgtaaaaagtatattaagctttctgatttgcttttgacattaaaagaaacctccagaaacaggtttgactgtgcaatccacatgaaagggggtgtactggccagtcaccttgtagttattcagatatctttcttctttccactcctttctgcagtgctttggccatttcactgcatacaaataaaaaaaatcaaaacaattattttggcttatcacaaagctttacatagtagtggagtttgaaatgattgaaaaataatcaacatgaataactaaatatgcttcttgttttaaaaagtcctcttaatagctgtaggtttcaatgtaatagaaggttataaataagcccaaacttctgttttgattggcattaaactatttttatatgactctgtttccaagggagatatggattttaagtttactcattgtctgctgaatatcctactagatgttgcctataaaccctacagttttttaactaaaagaaatccacattgactaaaataatgaaatcagtcagttatacctaacttttccaaattttgttcttaataactataataattaatatcattggaatgtctcattgcaaatactgctattagtgattcttatctcattgtgtatcatttttcatggaattgctttatgacatgcctaaccttcaggtggtctttcttatcctctggcaaagtaagtggcatatcagttagaaccttagtaagtagggtagttgagaatcagaaaatcacgaactgtgagaaatgctggaatgacagaattttaagattggaagggttctttaaaattgtgtaacttctgatgaagaaactgagaccttagacccagtgattagcaaagggagctctaaatccccaggttccaggcttctaaaccaggtcatctccaacatatatcagtattcatctctctacaggcaagaagattccactgaaaccattgtataccttgtattttttcatttagtatcaggaagaagattctgcagactccttcagaaacttctggtgtcaaataactcttattttcagcaagtttttcttaaggtgtctgaaactacatgacgttgaccatgtttcttcttacctttctttatcccaaacacgttttagttcaaccaaatgaggtgtttccataagctgcaaccttgcatctgataattcctttccttcagcaggatagatttttcaattttttttggtgaagaaaaaattggtttttacactgattgtcctagaatttctttcggatttgctcagcaaaggaataactctccatagaaaatatccttggtgttcaatttctcttccctctcttcccctatataaccaataaaattgtgttttgtttagtaagattaatttttccattagcacttgctattaaaatacattatatatttgggctataacatgttaactttgttttttatttagaaaacatatgtgtctgcatttaaaatagtacaactaaatattctgataaaattatatgaacttataataaggatgaattcttgtaattatgaatttattttcaaactatttagaaggtatttgatgtcaatatttctgcaatcccaagtttcattttgccagctgaacatcttagatatcatttaatgtgactttttgttttgttttctgttatataaaaaagttaccttcctatactttgcagatctttagaagccttcattgttgagtatttaggtcttcaatcactcagtaaacatccctgagcttctagaggcttaggtactgtcattcttgaagggctcaagatttccgaacctatatcctttcttttagctcccaagcagacaccacgtgctcctcctaagccaaaaacatcaccacgcccaagaatcccacaaacacaaccaggtaaatatatattttacattttagcttgaaaagtttgaggttagtggggttattctagcaaattgttcattaatagttatgatagcagattgagtctttaacacttgtaaaacaagtcttcctctgtaacctaataaatatttaaatttctttttggacttactaaaaaagtacatcattggaa

SEQ ID NO: 30090 - DNA, 2300 bp, Homo sapien
agtgccttctatcttcccacagccacatcaacaactgtgaggctatcacaggaggaggaagcttgtttttcacatcttactctgtagtatagtcaagatcaaaacctgtcccagtatgaaacattcaaagattgaagcaagggagtgtatctgggtaaattgaacttgttttgaggggtgctatacacatctaaaagcttagaaaaagaaaatgttatgaagaataagaataaataattggaaagaagttgggtcttaaaatcttaaagatgaagagagtcagacaggaagagtagaggcaagtcagagggcacatgcttcctgaaacacacaggattcggcttctaagtagtgatgacagctgaatttggaagggtttataagagcagttgaagaaagtccttgaagatatgactcggaagtttgcatctgacccaagaagcatcacccatctagggtcctgcacttttatgattagagagtagagagctactctgcatgtttgtcccttatcctgatttgctgagtgcctttactgcaaatgaaatctcagcctatgattcactttgctttattctttgctatgtcttctctcaaacaggctgttgactgtattcgtgctcatttagacacactgttaaagcttccacaaacatgccaacagttactaggacagttaaataagtatatatttggcaaaatgtctgaataagcttctagggcagtcttctacaatagttggaactaagtactcagacacctaggagaatattacatgggctttattgagatgtgtgccaaattgtgtaggctgtgactaagtgccttttaaaaaaattgtttatctggctataagatggccaagtcttcaaataacaagtatcaagtttcagaaaatttcttaaaattgctatatactgattgaagcagtattataatggaaagatataatttactggcttttcacaagtttatttcattgcttttaattagttccttctacagatcttgaacctggtactctcagaactgaagctccaaaaaccatgggtaatgagaatgtgtgtccttcaaatagtgcttttcctgcttattgtcataccactgtagtcagtttcttcttcatcataagaccatcctgtcattctttgtcatcattccattatagtctttatcttgaaattatgctaggctctgtgtcacattatcagctgaatttgagagaactgtgcatgaactaatatcaggacatcaaactgcttttaaccgttcaatgtgtcatgcgatcatgtgcattcgtttaaagagcattgaccattttaagctgcatttcaagcacgaatctctatcccttatttatgctgcttattcctcatcaattgtagggaagcacagtgtttctttgctcatattatttttcattttattaggatctgtgtaacattgatttttttgtttcaaggaatgatgtttttagtaaattgtcaaattgtaaaatgtacgtaagtcttgaaagttttaatgagaggcttccataataggatagactgactctttattcatctctattaagatttaacagtttcttaacttttactgaatcaaggaatactttgagattttgataagcacagtttattaattacatggtgttctttatgctttcatacatatgaactctttattgtatccatagttacttagacagtagttaacaagatatttatcccaacttctatagaagtgcaagtagactgataaacgcctttttcaatacagttagaaaagcatatattatgcaaatgtgtaaaaagcttgtccaacaatcttccactaatgtgtagcaagaatcagataatcaaacatctaggagaatgttttgttgaccacatagtgatattaagctgagtgcaatgctgtcttgcaaatctgtcttatgagactaatgggtacctgaccatggtttggccaaatctgcaaaaaacaagccttacttttaagttctgaagcttaaaaattgaactgtgaaattaatattcaagttaaatctttttgctttattttattatttttgtctagttgttactacagtccttgaacctgacacttttagaaccaagtttccagaaacaacgttaggtaatgatattctgtgttcctgaataactttttcctccttattttcaaatccattccatcattatcataatcacattgtcatcagctttgtaggactatcttgtcatcttctgctatccttcaactttatattgtccttcaactttatatttgagtattag

SEQ ID NO: 30091 - DNA, 2300 bp, Homo sapien
gccatcaactccttctcagacagggacctctgtgctcatcctgaactgaacaaatggcaaaattttactccagtgccatggttagcatttcattgctttactgattcaacttctaggactttcttctttttaaaaagttgcatgaaataatggcttcttcggctcttctgtttctttgaaaaatgtttttgaataggtatggatagcgagaggaaccaagatcgttcttgatctagaatccaatgtaaaactagtgatggtctttggaacttgacagcattaaaagtcccaaactggttttattgtttttagtactaatactgtttgattataatcatttcattatagtttcttagcgctcaaaatctatcatggctttactttgggaaatcccagacatcggcagccatgtaacattatttctcatgtgtaatttcaaatgtttatggattacttccagatcgcctcctaagcaatcagatttctaccttactgtttgtatactgaagaaaaccttttgatcaaagacatagaactaatatactttgtctattttgaaattatttatataggaaaaatgtcttatgactgtcctcattacttttgctcaaaaacacattttgagcatttagtaattaattttcctttctggaaaaactaattatgctagtgtgtagttaaaatagacactcttttcacccttcccacaccccagaaatgtttatagattcgttgaatttatatagtgtctttgttctgcataattgtccttaattttgacagtcacagccatgacccattgtggtaattttaatacctttttctttagcctcaaaaccatctgagagacctaaaaccacacacagaccagatgcacctcaaattcagcctggtaatcattactttcaatgccttgatctataaataggaaaacaatgtgtaagtaacattaatctccacattcacagctcagccgtaacactaattatggcactctaattttcttcaggttcaaaaccaccaaaacaattacttcctaaaccccaaaccacagcagaaccagacatgccaccaactaaatccggtaaacataatttccagtgctttagcttaacaggattttctttggaaacattgctgaaaatgtttccaatctgtcatatcatataaatcatagaaatccaaataccataattttgttcattatcttctccaagtagccacactgatgttttaagtgctaaatgaaaaagtcaatatgtaggaaattagtaaattttatacctgattgactggcatttcattttcttaaagcttttttaggcctattttctgaatttgtaatgaacagaagcctgagttttctgtatctgaaacatttttgaaagtcattttagtaaccactgttagtacacacagaaggctgacactgttcttcatttataggcacaactgaaaagaagacttgctagtcagggattagcttcctctaaaatactctattgacattttattttattctatttatttatttatttagagatggagtcttgctctgtcacgcaggttggagtacagtggtgcaaccggctcactgaaacttctgcctcccaggttcaagtgattctcctgcctacgcctccttagtagctgggactacaggcacccaccaccacaccaggctaatttttgtatttttagtagagacgggggtttcaccatgttggccaggctggtcttttgaactcctgacctcaggtgatccacctgccttggcctcccaaagtgctgggattataggcatgagccaacgtgcccggccaacattttaaacagtaactgttaactgagtaattttctaccacataagaagatatttatataacagttctcagaatccaactgttttgcagttgaaattttctcccaagattccaattagtataaaattttaatttgctaagaagcatctcacataataaataagcctatcaagaaggcaatttatattaatttagaataaactagactctgtgtcctctgaattaaacaccaatgagcacccaaaagtttagacttccttgcttttattacttatatctgtttattttttatgatgcagtctctgagcctgttccatttgaaactgaagctccctcaatgaccataggtaatgatgctttcttccttcttggccaatgtttctctgagcttgcgcctctcatctcttttttcattagctataatatgcacaattgtcattcaccatttttgttttcatttttaaaaattttcactat

SEQ ID NO: 30092 - DNA, 2300 bp, Homo sapien
aaaagaggcacagttgctttctgtagtgttactcctccctagtctgaggagagccctaatactttcaacatcctcactgaatgttcaagtgtcctactagctaagataatgcaaccattttttatttctgacacaataattagagattgtgcttcatttaattagcctacagtcagttgcaaaactgcaaataatgattgctaaggtggatttgactttgcctgctggccatgcagaggccaattcctgaattcctgctggccaagcagaggtcaattcctaactcttgcaccagcccctcataaatgttttgaagaaccagccttctttacaatatttctgctgggtttgttcccctcagaaaacctgtcatttcctgctaacacagtggtctcactggcttaatgtgatggcaatgacatataggagcagaaccagcagtgccagctggataaatgtcctaaccccgattgagggaactgcttattcaagtaaaaaatcagagatgaaaaagacctgttaaataagccagtgcctcctgtagtcactgccagagcattcctatggtgagagcttagacccagccaactctaaatgactttaacaaggtgccttctcacactttatttggaagacggggctgtctcttccattttttcttcttttttctttttgataagttttctaactagaatttcatttgaccagtgttatttaatttttctcttactgtttttggttcagctacagcaccccaatgaggtaagcgattttcaaagagtcagtataaatataccaacaaggtttaaagtgctttattaacccagccattccacccatgcgtctatatattttgaccaaagtgatgtagggggaaaggatacacatgtggacttcagaggtaaatatgcccaggttagaattatagttctacttaactgggggcttatcattttcattattattgtttccagtgactgccatttagtaaatgtttcctgtgtgtcaggctctatggcaactactttcgaaaaactgctagcaaatgtaagaaattgatactgtcatctttattttagaatctaaaatgtagtaattaagactggaagcactatagttaaatgggctgcttaaaatgccaacactgtgaccttggactttcacttgacctctctgtgcccagtttatctatctgtaaaatggggatgatgacaatgcctgcctcatagaccgttttgaggaataaatgtcttaacatgtgtaaactgattcgatcagtgcctaacacggagcaagcatttaaatgtcatcaatattgataatatagagatgaagtttgctcaaggacaattcattagtaagtggcatccgttattaagcagtagaatatactagcattgtcaggacacttaaccttttttcctcagcttttcttaatggcaaaatggggataatgccatatctcctgcagaggcactgggaagattaaaatacagtaaagtaggtaaagactcgattacagaactcagtccacagttgaggctcacatagtaatagtgctctctctacgtctctacatctacatctgttgaatatatgtgtatacacatatatattataacgtaatgtatagctttgtagccaaagacttactcttaaatgtttctcataatacaggaactacagaatggctcaaaatatatctttatgagtttactcccatttaaaagaattgggttggtttactggataattaaaaagtttccttcttaataaggttttattttatatttttaacattttgatagcttttagtacattgtttctggattctttaaaatagtttatcaaatgtttcaaaactgcctaaatacttcttctttcacaaatacagatctgccataatttgaatttttatatcacagaaggaagagacacagttacaacttagcagaaagaaagaaatgtgatgatatgtttttgctgttgtgcttttttttttttttttttggtgtgtgtgggaaagggtgtgatgtcatcttgtctccaccccctgtgagtaagcccacggcacagctaagtgcagccgcccgcctctgtcactgggagacagtccacttaaatgcagctccagggttgcgaggcacccaccagcatcattccccatgcgaggtggcaaatgcaacatgctctccagtttggggtgtctacttctctgtggaagtattacactagccctgggaaatgcacagaaattgccaaaaggcaagtagcctgatgttttatgttttaaaaataat

SEQ ID NO: 30093 - DNA, 2300 bp, Homo sapien
aaatccaaaattcttgctaaaactttgaaggtattccataatcaatctcaacttttcagccttcattcccaacgtatttgctgtatgctcctatcttgcgtgctccagcaaatatcttcctattttctttataaacagtatacttttccactttattgatcacgacgagggatttctctcctaactcttagttcttcccactaacaatccttacttctgcccactaaaatactgaaatgccaagtaggccattcaaggcgcagctgaaatacccgcctcctgcttcccccacaccctcttgctttttctagttggagttactcttgcttttggattcctatgacacaaacttaatagcgggcatcacctgctttgtatcatagatacaaagttacagttaaaagttacaaataaatgtcaagttaaattgaatttgtaaaatgatgaccatatttagaaacaaatgaacccatctaatttcttatatttctttttttaaagtacaggtttctgaaattataccaactatattttatagaacataatataataaatgtttaagaagtttttatgtgaattctctgtttgaaatataagttaatggaaaatttattttggagcttgagcaaaatagaatttcaaagcttgaaacatgtttggactctgtgaacacttgtaatacaaaacaattcctatttacaaagtttactggtaatacaaatacagtagtttacagagaactttcatgtctcttaattcttaacaacgaccctgtgatacaggtagagattatcacatgtaatttctttggtgagtaaaccggctcaaagagcttaggttatttaccaaaatcaaatattaagtgataaaaccaagatttgagtccagggtttctcaatctaaatacaggaatctttctagattactatgattctcagaagttttttttagctttttggtcaaggctgtcaaaaagaataattgccaactaatatttgttacctaagagttgtcccttgttctgaattgtcaatatgaagcttttcttaagattaaactttgactcagctaataaaattttcggcttttttctcctactcatacaataaatttggcaagtaagtttcttataagcttaccagtattttgcaaatacaactatgcaaatatatttaatggtcatttaggtttattagcttttataaaggctgaaaatgtggtttatttgaggctgtattgaaaaaatatacttgagcttttcctaaagcataaaataacattgagggtgatttagctaacacaattagtcaaggattctcaagaggaatgtggtttagatctttacaatacactttttttcagagaattttgccagagataacatgaaataaaatataatttcattgctatttgatagtaaatccaagcttccacagggattctgatgaattgctttctactaggtttacttgatttaaaaaactgttctaatatagagaatttcatctgcagggaaaatgttttcttggttaagagttcctcatgtagataaacacactgggcctcacatttaatggcaaattaagcaacaaagttatcgcacagctatcatttatattaagtgcttaatatgttccgggcactactctaagcaaagtgaagattgaattagttaattagttaatttaatcctcacattagctctaccatgagtttactatttctattccattttatacgtaaggaaggagacaaagtaagtgatttttctatcaaggaaggaaatttgcaagagaatagtttcattacaaaaactaaatttgtacgtagctctgtattattgaaataggtagatatagtcagtctggactttttatgcttatacatcttagtccctaggaaaacccagaactaacagattcagaaaagttggaaaaatcagtgaattatatgtgaaacacattattcttagtggactgcttgttaaaggcaaggagagtgttagtaaagagcttaggtagattagaataaagaaattgtctctctccatctgctctaattagcttatctcaccagcttttatagcatgctggttatttcagaaaagaagtgagagctactttgaaaggacaaccatttttctttccgctaatttataatggttttgaagtggttgttcattctcaaacatagacttttaaatgttaggtctttcctataactctttgttattggaagtttcaaggatttggacactcaattaaggattctgtcctctcctcattcctttggttttggcc

SEQ ID NO: 30094 - DNA, 2300 bp, Homo sapien
caacctctgcctcctgggttcaagctattttcctgcctcagcctcctgagtagctgggattacaggcgcccgccaccacgcccggctaatttttgtacttttagtagagatggggtttcatgttggccaggctggtcttgaactcctgacctcaggtgatctgccctccttggcctccctaagagttaactatcattttaagaatccatatcacttaatttctcccccaactttttgtatagccagagctgcaggaattggtatgaaaacatttaaaactttatgcaaaggaaatttgcttctagccgtcattttgtactgtatctctagacctagattcccaacagttgatggagatatctcctaattattttacacatctctcccaaaccaaatttattataatcttacctaagctctattgttttactaataatactagtaatctttatcccagtaactcaggtcaaagtctcacattatatttacagacactgtagatttaatctctaggaattaaatgtgggtcttttttatatcttccatgtttctttttgaacatatggaatacagttataattgttttaatattattttctgctaattctaacaactctgtcagttctgggttcaattgactgatttttctcttcattatgagtcatttctttgcacttttgcatgtctggtaattttttgattgggtgctggatatttttgtatttataaatatgcttgaattttgttttgggacacagtaaaattatttggaaaatgtttgatgcctttaagatttgttagatgaggccaataacttaatcttactactgaggaaagacctttttgagtattctacccaatgtctcaggaattacgaagtttccaatttggctgataggaacaggcaccattcttggtctctgtgagcacttggtatcattctctctgatctttttgggtagttctttccctatccctgggtactttcctcacatacattcggtgtttaatactctcctgaatacttgaagaggactttgcagctgtctggagttctctgtatagctctttcctttccagtattctgatctgcaaactctagctactccatttttaaaaaacaatcacacattttcaagcctgcataaactataaagaatagcagagttttctaatcatgaaggggttaattactaagtgattggattataagcttatatggaaggattgttttagtacagaaatggactaagaatttagagatgaatcatatcacacagttattaacatttttctagatttgtttagcagtgtcacaatttcacttttatatttgagtatatgattatttgattaatattttctaccctcactcctctggattataggctctacaggggcaggtactttatttttcccctcttgttttgtgtctctagtgtaaacatggtgtttggcacatgttaggaatttttaaaagttttttaatttttttttttttttttgagacagagtctcgctgtgtcacccaggctacagtgcagtgatgtgatctcagctcactacaacctctgcctctcgggttcaagtgattctcctgcctcagccctctgagtagctgggaccacaggtgcacaccaccacacccagctaatttttgtatttttagtagagacggggtttcaccatgttggtcagaatggtctcgatctcttgacctcgtgatctgcccgcctcggcctcccaaagtgcttggattacaggcgtgagccaccgtgcctggccacatgttaggaatttgataaatatttgttaagtaaatgaatgaataagtgggtaatttctgctttacatgatggaaggctaggtaactaaccaaactgaaagctgaaatcagaggaaactgcaagattgctttgaatcaaaatagataaaaaataaagatttccagaacacataagacaactgggggacgaccaagtaaaatctaaaaataatttacttttgtggggttactactttacaggtatcttatattggagaaggcatcagatgaacttgttgaacgaagtcacatttttagtagctttttctataaatgcttgacaagaaaggaaaataatttaacagaagataatccaaatctttcgtaagttaatcctctaatgtacttaagttttaagagaaaatgtactatttttgatgctcctagtaaagtggcttctttatagtatttcctcaagtaggcagtactaccatttgttcaggtcctgggtctgtttgccatgagagccatttct

SEQ ID NO: 30095 - DNA, 2300 bp, Homo sapien
tgttttttggagacagggtatctgtgtgtcgcccaggccgcagtaccgtgtagcgatcatagctcactgcagcctcaaagtcctggactcaagtaatccttaaatctcatcttccccagtagccggggactataggtgtgctccaccgtgcccgggtcatttttttttttttttccgagacagtctggctctgtcgcccaggctggaatgcagtggcctgatcaaggctcactgcaacttttaactccatgggcttaagtgatcttcctgccttagcctcttgagtacctgggactacaggcatgcgccaccacgtgtggctagtttttttctttgtagagaggaggtctcactatattgcccaggctggtatcaaactcctgggctcaagggtgagtcatagcatctggcctgtatatttttgtggagaggggggtcttgctttgttgcccaggatggtctggaatgtcttggctcaatctattctgcctcggcctcccaaagtgctgggattacagacgcgagccactgtgtccggcccagcttgactttagaatcagttaagttctttagttaaaaaagttaatttgggccaggcgcagtggctcacgcctgtaatcccagcactctgggaggctgaggcgggcggatcacgaggtcaggagatcgagaccatgctggctaacatggtgaaaccccatctctactaaaaaatacaaaaaattagccgggcgtggtggcgggcgcctgtagtctcagctactcgggaggctgaggcaggagaatggcgtgaacccaggaggtgaagcttgcagcgagccgagattgtgccactgcactccagcctgggcgacagagcgagactccgtctcaaaaaaaaaaaaaagttaatttgtgaggaaactgaaaattcaattatttttcagaaagcaatgtttttgttaaacagaaattaaccaaataaaacgaaatccttacagtaaacttcaatcccagcaagacttaaagtatttctgctttgcagtcattcctgccatgtagaacacttccccaggcccaacaccccacaacacctggggccttacctctacctggggactgaccacattataattaagaaggcttaactcacgatgaaggggactgctctagtggacgagttgggccgatccctttattgactccgttaggatgggagatgggggttggagggataggcgttaggggtataaaggggccagcttgggaatcaaaccctacttccagagtcccttcgggctttgaacatgccagaaacattttccctgcttagagcactgtgctgaattttgttaaacttgtgattaaatcgtcatgaaagcttacacgtgcatttaaaaattattcagatatgcaccattagggataatcaggctaatagtaccagaccttgagttcattgaggactggattagtcccttaagtatcgtggtaaatgttaattgaacaaattccaagtttatagccacccactttctgtcatatcagcatttcagttattgaaaaattaagttctagcttttcttttaaggaactttaaaaatcacaagttcgaattttaaaaaggaatcctaagacatttttcctcgtctgctgacatatttccacagcaaatgctaaactaatagctaggctattattaggtgattttgccatcttaaaatcttttggtttctgagttcgaggaaaggcgttgggggcaaatatgtaagagaggctgtgagggatgtaatactgcaaacgctaacgttttgttttcatagttgtttggccacctcgcgagatccagtgaaccggaggagttcctgtttttcccttttaatttttgtcaatctaatcttcaaagtcaacaaagctaaaatcgagcacccaggtggttcacctccccagaggggctcagatcatgaaataaacgccaccaaaaaaacgctggaagaggcagcccacagtgaaaagtcccaggaagtgatttccggtcgaaggtgggaggggcggctgatttccggtcgaagggcaggcgacggctcttgcgcaagcgcgcttcgcactttgcgggcttttttttttttttttttttttttttttttttcctttcccctccccctccctctccaagccggaggggtcctgaggtgacagcgcctgcaactgaaatttcagcagcgggagaagatggacaagagaaagctcgggcgacggccatcttcatccggtgagaaagggtcagagaagggctgaacatattgtctcctacccggggg

SEQ ID NO: 30096 - DNA, 2300 bp, Homo sapien
tgtaacacatttgcacattcccccgaccctaaaataaaagtcaaaaaaggggaaaaaaaatcttctctcaggctcctgggctgcctcagttactttgggcatgccactttacctttgaaagcctcaacttctccatttataaaataaacatgttagctaagaatatcaataaggtcccttctagctctaacaatcttattcttgaaggtaaactattgaaggaaaccagaatgtcacctcaaaatatgcctttttttttttttcccggagactgagttttgctcttattgcccaggctggagtgcaatagcacgatctcagctcactgcaacctccgcctcccagattcaggtgattctcctgcctcagcctcccgagtagctgagattacaggcacctgccaccatgcctggctaatttttgtatttttagtagagacaagggttcagcatgttggccaggctggtctcgaacccctgacctcgtgatccacctgcctcagactcccaaagtgctgggattacaggcgtgagccactgtgccaggccaaaatatacctcttttatataaaaattatttttgagctgaaggcaattaaggagggaaagctcgctctctcctttttctgcctaaaaggcaggacataaattctgtctaggctcttaccagcccagaaagccccagacgaatctgcaaacaaaccttactgtattagtttccttctgtagatttacattcccacagtttctcacccttggaagcctaaaactctttcctttgttctttcttctctccagaaatttattgttcttcgttgaagatacttacataagccagagttgtaagccactgttttgagttactccgcatttacgtttctctaaggtgatatgcgctgcatgcattaataaacttctttgtttttctgttgttacaagggttcattccaactaagaactcatgagggttaaggaaataattatttttcctcccctacactatcttattctaatccagtctttggaaaattaagcataaaaattgtttgattctctccctttttattttgatgaaccatgttgaatttgcttgagagatggtttatctttatttgcaaaagacaaagcatatataaattgatggatggaatattctttaagaataattaataaacctttgacatttattaagtttagaattataaaagaagtctctataatttttcaaaagctttgcatctttctcttatgtattaatatattgctagaggacttttaaagtgtgctttacttctttatgtgcttggcaaaaaattgtaaaattctaacaatatttaagtgcctactgtgcaccagacgctattccaagaactagagatacagtagtgaacaaaacaaagtccctgttcctgctgtcatagaacttacattctaatggagagaagtagacagtaagcaaacatacgtcagttggtaataagtgccgaaaaaaaaaggaagggagagagttgctctttcagatagactgctcaaagaaaatcactctgatgagataaaaagtgggcagaaactttaaaataaaagccctatagatatctataatggggaggaatattccaggctgtgggcatagcaagagtgaatacccttaaaacaggagcttccttcacaaattgacagcaaagtagaccaggtgcaactatggtgaagtaaacaagagagtggtaggaaatgacacctgagaaagagctaagacccagatcatgtaactagatgagtaagccagtgagagagtggtaggaaatggcacctgagaaagagctaagacccggatcatgtaactggatgagtaagccagtgagagagtggtaggaaatgacattggagagctaagggccatgtgagaccttgtcggccatggtaagaacttagttttcattctgagtgagaagggagaccattgagaattttagtaagcctatgcatctagactgtgaacttcacaggtctcagttcactacaacccccttgggttgggcagggtagctagagcgggctagagttgggtatttcccttcccccaagtcagttaggctctgataaaaccccagcaggttagcttctcattaaatagcttctcctgagggcagaccttgttaagaagaacaaaatgctctggcgtatttcaaaatggctccttttccccacccactaccagaggcatggataatcaccctgaggacctgtgagagatccaggagcttaaaaaaaattggggagcggggaagagggaatggctag

SEQ ID NO: 30097 - DNA, 2300 bp, Homo sapien
ggctaacacggtgaaaccctgtctctactaaaaatacaaaaaattagccgggcgcggtggcgggcgcctgtagtcccagccactcgggggctgaggcaggagaatggcgtaaacccgggaggcggagcttgcaatgagccgagatcgcgccactgcactctggcctgggtgaaagagcgagactccgtctcaaaaaaaaaaaacaaaaaaacgtattttgaaaatcactgtgctttttgttggaggtaagatgtctgaaacctggaaatattcttaatctagaataggtcagatcccagacatattgaataaattatgttctgctatatttatagaaacacttccaaagatttttcacataaagaatcttagtaaacttaacagaatgaaatttcctttacttgacaaagatcatatagcaaaaaccttcataaaatattaatggaaaaacttcagatgtatctctttaaagaacaggaacaagaaaaaataacctctacactgctatttgttataactactagacgatatttattcttgatttttttccatgtttgggagtaaactcatgattattttgctatcaccacctcacctttctaacatgatagtaatcagtctcttagacaagatctcgttttttaaaatcatttggaaaagactatgcctaccttcttttattttagtaaactatatacaatataaacatttccattttagtcattttcaagtgtacagttcaatggcattaagtacattcacgttcttgtacaaccatcactactatccatctccagaactttttcatcatcccatactgaaaattcatacctattaaacagtaactgcccattcttccctttccccagcccctggtaaacactattctactttctttctttatgatttgactattctaggcacttcatataggtggacttatacaatatttgtccttttgtgcctggcttatctcagtgtataatgcctccaaagtttatccatgttgtaccatgtatcagaacttcattcctttttaagactgaataatattccattgtatgtacatgcaacattttttaatctattcatctgttcatggatatttgggttgcttccaccttttggttattatcaataatgctacaatgacattagagtacaagtgtctgtttgtgtctctgctttcaatttctttgggtatattactaggagtagaatggctgcagaatatgttcattctgtgtttggttacaaatatatgtggaggctgaattggccccaaaggccaccaatttacaaatgtgttttaatttcatttcacattaaactttccaaatgagctaggaggagacagaaacttaccgtggcttatcacgttccaagcatagtgccaggtactggtgataaactggtcaaaaagattaggagtttaaagtcctagcgtcaaggagtttgaagctgagtaagaagacgtgtgaaaaaaacatactttattttagtactctgtcagcaaatgtttataaatacagggcccaaacagagagtaggttgaaaagaggattagaaacagtttttttttttttttttttttttttttgagacagagagtcttgctctgtcgcccaggctggagtgcagtggcgcgatctcagctcaccgcaacctccgcctcccaggttcaagcgattctcctgcctcagcctcccgagcaactgggattacaggcgcgcgccaccacacctggctaatttttgtatttttagtagagacggggtttcactatgttggccaggctggtctcaaactcctgaccccaagtgatccgcccgcctcggccgcccaaagcactgggataacaggcgtaagccaactggcccggcccagaagaagtttttaggatatatggaggaaaacacaacacaacacagctacaactccgtgacaactgagagcgtagtcttcgagtacccagttgcctactgacagccgtctcctctaaggcgcttcttttagccaagaaagcgttctttgcgtgctgtgacgtaaaaagcagcgccggaagggagagggcggaacttccggctgagccccagcgaccgctctggtcggctgtgtagactgttgggtaggctgcgtgctagcttcggcgcggatccctgggcgtccgtacgtcggagtccttcgtcctccagggtccctgttctttgcgccagcgggaaccactatctctgcactcctggtaagcgagtttcttctttcgcctaatgtgtgtgttgggggtgggaggacgccggaga

SEQ ID NO: 30098 - DNA, 2300 bp, Homo sapien
tccaccccttcatactacactacctttccatttcctaacccgtttgtaggaggttactgaagcttgcattaatttcttcaatagatatttatccagactagtataatccaggtgctggggaaacagtggtgaacaagacaggcacacctcatgaaactcacagaactgaaaggtgaatggattactatcttcatcctttttttgtttcgtttttttcctttcatacctagtcctgcacatgcatccttaacttctgcagtgtggtatatgggaactggatccgctcctaaataggtatgtgacttctctgagctttatcttcttcacttaaaaattacaagcatcggccgggcacggtggctcacgcctgtaatcccagcacttagggaggctaaggtgggcggatcacaaagtcaggagttcgagaccagcctggccaacatagtgaaaccccgtctctactaaaaatacaaacattagccgggtgtggtggcacgcgcctgttgtcccagctactcgagaggctgaggcaggagaatcgcttgaacccaggaggcggaggttgcagtgagccaagaccatgccattgcactccagcctgggtgacagaatgagagactccattccaccccccataaaaaattacaagcatctgtaaatacataatctcaaataaaaatcttcgtgtatatctccatttttaaaatgatagaaacgagagtctcaatgattaccttgaaaagatcacaaggaaaatgaaacaaacatgaattaagtacctgtaagatagtttgctggttacttttacatatatgataaatgatggatcagggacttcaacctagatcacaaaatcaccaccacactgccctgcttctgtcatgggaaacacactttgataatttcttcattctttctccactccctggacttgaagcccgagaagtaatccatccgcaaatattgaacactttttatattcatatatgaaacgcacagtacacagtttttaaaaactggtctctgttgtcaaggaacttttgagccattcagagagacaacacttaaaacacacacacacacacacacacacacaaactgagggaagtatgaagtgaccaaataatggtatacaaagatgatctcatttgatccctattaccactctttgaggaggtactattattattgctcttttatagagaagaaaaggtagctctgtaggcagtaagcaagtctcaaggttactcaagcaggaaagggcaaaacagattcaaatccaagttctgactcctaagactttctctaactatatatggtaagacaaacccagaaactccagttccctaagcaagtaatagaccccatttggctaggagggctggataaatactgagaaagggggaagatgaagccgaaaaggtaggctagggcctaatgtaactcacggacttcagaatgcagactgtaggaatccactaaaggtttcttattaaggcagaaattactgcagtcttaacttgacatagtagtttctcaacttggtagaagcagactatacaaaaagtaactttacagttggctacgtgacttagacaaattactctctctgacctcaactcttacaggtaattgagaggagaattctatatttggacaatcgccgtgattaaacgagtgtatgaaaggcgtctgaagctagggggcgctagataaacactgatttcccctttagggaaaaagaatgcaggctttttgtttacatagagttggcaggcatgcgttatccagcaaggccggaacggaagacactctcagcctcagctgcaaccacatctgggtatgcagaaaccttctaagatcccagcgtttccagggagatgctccatttcccctcacttctccggacctgtcgctagaccatgaagacctgactgccctctaataaagtgcctagccagcactcttagaccgcccaaccttcccagctcttccttccgaggcggctactcgatgacatcacatccacttccgcttccgaaggcggcctcttttcattcctcgggaccgctctaggctgccaccacgccggctggccccaaaaactcgatggttgttgggcggggtcgtgacgtccttggcgtggctgcaggggaggccgcggcggggaaaatggcggacgggaaggcgggagacgagaagcctgaaaagtcgcagcgagctggagccgccggaggtgaacacaaccccagcgtcgtgggcagcgtgggatgctccgggcctttctttgagctcccagg

SEQ ID NO: 30099 - DNA, 2300 bp, Homo sapien
ggcacgtgcctatagtcccagctactcgggaagctgaggcaggagaatcacttgaacctgggaggtggagtttgcgatgagccgagatcacgccactgcactccatccaacctgggcaacagagtgagatgccactcaaaaaaaaaaaattctgttaaaagaggactgattgctggatatgtgacagggttttaattttttctaataggagagtccaagtacctttgctcagtttgtggaaagtcttttcataggggctctggactcagcaagcacttcaagaaacaccaaccaaagcctgaggttcgaggctatcattgtactcagtaagtattcaatatgtgaggcattcagttaatttaattatgtttttactcagttttcaaaaaaatatttgaagataatattaaactgtaacttcagtttactcttgattttaatgtcctttttttcttgcttaagggttactatttttaacatcttcgagatgtaaatcatttaccatacaaatcactcatttaaagtgatttcagattttcaaatgtactacctggaagtggggactgtgggaaagaagagtctcactgccagccagtttctttccccccctcttcttcattttccagatcctcctaaaataaaatctctgttacaatcgaggtaaaattcatataacgtaaaattaatcgggacaggcacaacagctcaagcctgtaatcccagcagtttgggaggccaaggcgggcagatcatctgaagtcagaagttcgagaccagcctggccaacgtggcaaaaccccatctctactaagaataccaaaatcagccggttgtggtggttcacacctgtagtcccagctacttgggaggctgaggcaggagaatcacttgaaccctggaggtgggaggttgcagtgagccaagatcacaccactgcactccatcctgggtgacagagtgagtctccgcctcaaaaaaaaaaaaaagtcattttagggtggtagtgtgggcgcagtggctcatgcctgtaattccagcacttttggagacaggtgggaggatcgcttaaggccaggagttcaaaactagtctgggcaggcagcatagcaagaccctgtctcttaggaaacaaaagccaggaagctctctcttttgcttttcttttaacttttaggttcaggggtacatcagaaagctctcttacagggattcgacaattttttttctttgttaaacatttgcctagtcactataagcttttcattagtttttagagttcctggtaaggttgattctaacagtttgccagtttgtcctctactttcgtggagagatgggcttttggagcttcctacttgatgtatttgttgatgttactctaattagtcttattttgaaacaaagatagtttgttatcaatacatttttagttattaatgaaagtacacccaacccaaacaggcttgaattaaatataaagtctaggagtctgggtggtttaatgtaaactggattcaaattcattagcacttgttttctctgaggcaccatatggacaagacaatggcagtggtttcagtctcatatcctctcaaattccaaattgtcaaacttcttttctggtagttccatcaaagccctgagagttactccatttacatcaagttaagtcagtcatccctgagtcaatcactatggccaagggaatgctttgttgtgattaatttaggcccaagtcatttgctctatccctagggtcaaaggtaaagtctaccctcaacacatggactaagaatgagagggttgaaatagggatctcaaagtggggtaatttaggagagagaatagtaaatttcctctgtaataacctttgggaactatgcacgattctttctaaaacatttctagtagtcttaagatgaaaagaacctaaaaccctgtagcctttatgtaagattagaaaattagggaattcttttaagttgagatcatcttttggagttctaaaaaactaaaaatagttactgagttcttggaaacttgttttaaaggaataagattatccaattgggtaactgaactttattgcagatgtgaaaaaagtttctttgaagctagagatcttcgccagcacatgaacaaacatcttggtgtgaagccattccagtgccaattttgtgataagtgctatagttggaagaaagattggtattcccatgtgaagtctcattctgtcactgagccttataggtgagtaaatttgagaaggagctgaacttaattgataacgtgtgtactct

SEQ ID NO: 30100 - DNA, 2300 bp, Homo sapien
aagaaaagaaagaaaggaacaatgggttcgagttaaatataactttatcaaaaaagcatttatatgagtgtagatttagagaccaaaagaggttgtattggccgggcgctgtggcttacacccgtaatcccagcgctttgggaggtcgaggtgagcagatcatctgagctcaggagttcgagcccagcctggccaacatggtgaaaccccgtcgctactaaaaatagaaaaattagctgggcgtggtgtaatcccagctactctggagactgaggcaccagaatcgcttgaacccgggaggtggagttgcagtgagccgatatcgcgccactgcactccagcctgggcaacagagtgactctgtctcaataaataaataaataaaataaataaataaataaataaacatcgtctcaggtttttgccttttaagacactgcacactaaaaattaaaaaaaaaacaactggattagaatcactcacagataatgaacttagaaaaagaaaaattctgaacacaaaataccacataacactgggttaagaaaagtgtgagatcacaaaggtcagctgtgtgacttttgttgtgttatttaacatcctagtgcttttagttttttcatctgtaaaacagatagaggctgaaaagggaggatcatctgagcctaggaggtcgaggctacagtgagctgtgatcgttgtcactgcaccaagcaagaccccctacgctctgtctccaaaaaagggagataagtattaaggttttatgaaggttaaataaatgtcaagggctaacgactacatcctgcatatacaagcttgatcaatgttacctatagttacaattatcatctttaacaaatcctgaagtattaaatctgagacatttgttcaacaaactaatgtctacccaaacccatccaaacaaaatgcactgattacttcattacctcataatttaatcttcgcatttgtctgtccttacaggaatttaattcagatattggtttaaagtggaaaataaatggaagaatttgattatccaatagttcgtaaacgaataaacttgatgatgtttataaaccgaaaagaactttagaaactattcagtaatttcgttattcacagacgaagtaaccaagatttgaatgaaataacttttctgtagccatattggagagtgacagcactgttcctaacaaaatttcttaaatgggactataaactattaactaattctgacagtttgaatattcattaactgtggagagtgaagatggttaagaagccaaggacacttgctatcctcccttacaactggttcccaaggagtcaagtaacttcagagctgtattttttgacaatcaaaaagtcacagtaatcgtaccttttctgcgtatatacaatgctacacagttcccaaacgcgtttttcacatcattaggggaaagattattaaaacattcagagttacgaatatcaagctgggcgccgtggctcatgcctgaaatcccaacactttgggaggccgaggcgggaggatggcttgaggccagatggagaccagcttggggaacgaggcgagacccgtgtctactcaaacaccccgcccccgcaaaaccaaacaacaaaaacagtaactgatatcttttacatttacttcttgttcttaaaaaaaaacgctcaaggcgatttctcaatcactccttatcacttctgcaaataattgtattattccttatttacgcagcagcggcaaaatttgaggaacactagcgaatgtgtccagagcagctcatactcgctcgccaaaacccaagcgcagcactaaagaaacgggagacccggcttcgggtgactcgtccccccttccaaacgtcagcacagtcgaaaacgtgcaccccgcagcctccactgccgcgagccacacgccacctccagagggccggggcctacagcctcaaggggccgcccaaggaggcggacctggcgcagcccaggcgtccggcccctccccgcggctggcccggcctccggggaagcccccttggtcccacccagggccagggcccgcccccagcttcgccggcctccttcctgtgggaagtgcggctcctttcgcgtcccccaccctctcggctccgcctggcagcagctccgccgcccagaggcgtccgagaccctccgactcgtgggtacgcataggcctcgccagcgagccttgcccaggcaacgagtcgccagcccgccccctcgccgcgggctaggtctcacctcgccaccagtacgtcttggacaa

SEQ ID NO: 30101 - DNA, 2300 bp, Homo sapien
attttttgtaatagttttatttagggaattactgggaaaataaagtcattatacccaacttgaatgtaaagctatgcttgctgatttttggagaataaaatgtctgggctaaatgttggcttttaataaagtggagctgcccattgtcattacccttgggtcttaggtaacctgggacccagaagaagctagaaataaacactacctgttctcactacagcaagtttagctttactcaggaagacaatttgaccactgggaaagcattttattaaaacgtttgtttctattggcccaaaggataatgcgtgcatcagtaggcttctcagtgcttacaggtggtgttttggcaaaaactgagtggagggatttttttaactcttctacaacctagctgtattgtttgcagatttgaatgtattcacttaatatattaaatatttaatattaaatatcaattaacttaaaatgtttagtttttttatttttttgagacggagtctccctctgtcacccaggctggaatgcagtggcacaatctcggctcgctacaacctctgcttcccgggttcaagcgatcctcctgcctcagcctcccgagtagctgggacttcaggcccagtagagacagggtttcaccatgttagccaggatggtctccatctcctgacctcgtgatttgcccgcctcggcctcccaaagtgctgggattacaggcgtgagtcaccgcgcccggccaaaatatttaaagacagtatgacaggagagtggggttggcctgacacgtagaccagcctcctgggttcgcagagggtgcatttggtcttctgctctcactgcccgaccccatgggggaaagaggtgcatctccatttttaaattcctcctttgagctatagtggcaaactcagcaactaagtagatcccaagcctggtagtttcttttttcttctgggccttgagagctcatgtccccgcacctggaatctttcaaggatgtccgggccatccgggaattactgcgtgtgcacacacacaaaaacacgcccctaacaccagaggctggctgtatgattctgttttcgagcctactgtattcacctgtctgcccgtcagctacttctaggagcgtcaaagggcctcacccagagactacagaccctccggtggagaagtgtactaggccgtgtctgcagctggagccctcggcctgaaatgttctggctttagcaaagcggcgacagtgtccaaccccagtccccgaggagggatgtcagccctgggcccctgtgagcgctgcagattcgtcccaggaaagggtgaccggggtcgctgctccgggattaccagctaaatacctgtattagcatcctcagcacgcactgggagacgcagctcaagtccgctccccttcttgcaccctcatatatatttggtgcaaaatggagaaccttttcccctacgtttgtgtaaaaatatatgtaaataaagccttaaaatagtgttaccgacccccttttccactcgcaataacattgactataaatgctgataattccaaaagaatctcgactcttccttgagtagtctggagctagcaggtgcaagtttagaaacaataactcatcactgagggaggcactgaaaattttataactgttaactggaatctaaatttccatgtaaatgggctgtctctggtcccgtgtcaagagactaatatttttccagaagcctgaaaatatgcttttatgatgttgggagtctcaaacgtaaaaacggactcctaaccctctggatgtttcggctgaactctcaactgtccaccagctccccctacacgtggctccttagaaagcgtggaaaagggaaaaatgaaaagagaaactgccaggacttaagatgtctgcttaaagactccctcgaactgcagtgaagggtcctacccgcttccaaaatgtccacccgcattcctgacgtcactggatcggctccatcaagccagaaaacgagagtgcgctccaatcagggctcagtccccgcccttgccttgcgtcacttccggtggtgcagcagccattttgtcagtcgccagcggatcccgcgcgctggagaagtgcagttccccctggttaccaactcgcccgcttttccttcggactaagggagccgtcgaagagcgctcgccaaaggcgcagccgtttctccctacggtgccgccgctcctcctgcagccgcccgtaggtagcgggccgttttcctcacctgtccctgacaggcgccctcagggagccgcggtc

SEQ ID NO: 30102 - DNA, 2300 bp, Homo sapien
cttcccgggttcaagcgattttcctgcctcagcctcccgagtaggtgggactacaggcgcgcaccaccacaccaggctaatttttttttttttttgtagaggcggggtttcatcgtgttacccaggctggtctcaaactcctgacctcgtgatccgcccgcctcggcattccacagtgccgggattacagacgtgagccgctgcacccggcctcctttttttttttttttttgatatggagttttgctcttcttgcccaggctggagtgtagtggcgcgatcttggctaaatgcaacctctgcctcccgggttcaagcgattctcctcccgcagcctcccgaggagctgggattacaggcgtgcgccaccacgcccagctaatttttgtatttttagtagagaaggggtttcaccattttgaccaggctgggctggaactcctaacctcaggtgatccgcccacctcggcctcccaaagtgccgtaattacaggcatgagccgccatgactggccacctaacatcattcttaagactggttccaggcccggcgcggtggctcacgcctgtaatcctagcactttgggagaacgagtggatcacctgaggtcaagagtttgggaccagcctggacaacatggtgaaaccccatctctactaaaaatacaaaaattagccgagcgtggtggcaggcgcctgtaatcccagctactcgggaggctgaggcaggagaatcaatcgtttgaacccagagggcggaggttgcagtgagccgagaccgcgccacttcactccagcctgaatgaaagagcgaaactccgtctcaaggaaaaaaaaaaaaaaaaaagactggctccaacacaattgtacagttttcatgacattagtcagccaacttgttagacattccaaatatcttcaaccagctaccttacaaaacgtttttagggtgagttgcatacatagaaagcagaactcagtcattacatttgtttcctagtcatatactgcaacctcccacagaattcaagaattgcctctggccactccttgtcatacgatgaaatatgtagcatcatagaagggctcaacagattgagcccttggcctcccagcggggctccaccgaccccctcaacttcactaggcagcaactccgaattgtagttcttaggcaggtacttaataggaattttggaaactgaatgagctcatgtttaaaaagcctttggcataattcccggcacagagaaagcgctcaaagaatgttaattataattaatgcaaagcgccaacgcgcactgttcgattcgcacagcctgagaaacggttcggttgtcattactttcttataaatggtgaaactattaatttgtttggttgaggaaatgggccaacagggaaggcaaaatgtgactggttttacctgcggggcattcgtctttgggtctctttatgagaagagaggacacctttctcttcagttcacattccctgcagccggaagatggctctaggatacttggcagtaagagaggcagaatgggccgggcgcagtggctcccgcctataatcccaacactttgggaggccgaggagggcggaccacctgaggtcaggagttcgagaccagcctgaccaacatggagaaaccccgtctctacgaaaaatacaaaattagccggacgtggtggcacatgcctgtaatcccagctactagggaggctgaggcaggagaatcgcttgaacctgggaggcggaggttacggtgagccgagattgcgccactgcactccagcctgggcaacaagagcgaaactccgtctcaaaaaaaaaaaagagaggagagacagagacagaatgactcataaaccaactgtctgactgcctttttggcaggccctctgggcccgagaaccctccagcgcctctggatgaattgcgccagaggaagtcagctgtcagggaaaacgagatctttcgcctcgcgatgattacgtcatcaaggagggccaggagcatcgaaggatattggggaggagatttccggcccccatccccgcagcgaccttataaggtctcttcccatgattctctctttcttttcgccatcttttgtctttccgtggagctgtcgccatgaagtaagcacgacccgtggttcccaatccgcttacatcctcgggcagaactcctctctgtcgtccctggcatggctgtagacaccctccctgatggactttcactttttgttgcagggtcgagctgtgcagttttagcgggtacaagatctaccccgg

SEQ ID NO: 30103 - DNA, 2300 bp, Homo sapien
ctgacctcaggtgatccacccgcctcggcctcccaaagtgctgggattataggcatgaaccgctgcgctcagcccgaaagggttaattttgaaaaggctgggttcaagatgctgatagggatattaaggtacaactgtgtagtgggaagttaaacatgttcagaagagtgtttgtaatatgatttattttatgttttaatttttttttgagatagggcctcaccttgtctcccaggctgaagtgcagtggatgatcagggttcactgcagtccctacctcctgggctcaagtgatcatcccacctcagccccatgaatagctgggactataggtgtttgccaccatggccagctaattttttgtatttttggtggagatggggtttcaccatgttgccttggcaggtcttgaactggactcaagcgagcagcccacctcagccttccaaagtgctgggatcacaagcgtgagccaccatgtccagccaaggatatattttagtagtaatgaacttatggtgacagaatatgtgggataacgtcacctactgtcacaagctggcttctctggaaacagttactgagactgactttggggttcaagatatttgttacagatcaagtcttgtgaagggaagggggagaaaacagtgttaggcagaggaagaagttgcatatgttataggcccaactaaacctcagtcaggccgtgtgtggtggcttatgcctgtaatgccagcactttgggaggccaaggtgggaggattgcttgagcacaggagtttgaggctgaagtgagctatgatcgcaccactgcaatcaatcaatcaataaacttcagtcaaccctgccaggagctatggaacaattattgtttgttggagtgttctgtgttgggctaaatgtgaagcctctttatacttctaccttactcagtcaccatatgggggctgccccagagaggtcatgacctcaagtgaggaagtactcagcagctgagccaggccctactgatagctggaggatgctgctgcccatgctgcccactgtgaggcagcaagcccttgcttgaagggggatctggatagtatgtttctgtgtctaccacccctagaaatggtgcctagagtgagtcatcacaaaaagaatcaggatagcttggtgtagtggcaggtgcctataatcccagctactcaggagactgtggcaggagaatgacttaaaccagggagttggaggttgcagtgaggtgaggtcacacaactgcactccagactgggtgacagagtgagactccatctcaaaaaaaaaaaaaaaagaaaagaaaagaaaaaagaaaaagaatcaggaaatactaatatttaaaggataggtgaatggaggaaaataatcaattgaaggaggctgagcagatgaggtcaaagaagatagagatccataacagtaacctcatagaagcttatggaagcattttgacagtgctaaaagccacataaagttcaagtaagacagtttcagaaatgtataaacatgaatgcctttgcagtgacttaagtgtgattctgttgtttccttctaaaaatactgccttctcaggtgtgggaaggattctatctttttaggctttaccaccatagttctctgcaggcttgcaatcctgaatcaggcttgacttcagaaagtgctttaaaagggaggctgggcgcggtggctcatgcctgtaatcccagcactctgagaggctgaggttgtggggaaaagcaagagagatcagattgttactgtgtctgtgtagaaagaagtagacataggagactccattttgttctgtactaagaaaaattcttctgccttgagattctgttaatctatgaccttacccccaaccccgtgctctctgaaacaggtgctgtgtcaaactcagggttaaatggattaagggttgtgcaagatgtgctttgttaaacaaatgcttgaaggcagcatggtccttaagagtcatcaccactccctaatctcaagtacccagggacacaaacactgcggaaggccgcagagacctctgcctaggaaagcaaggtattgtccaaggtttctccccatgtgatagtctgaaatatggcctcgtgggaagggaaagacctgaccgtcccccagcctgacacccgtaaagggtctgtgctgaggaggattagtgtaagaggaaggcatgcctcttgcagttgagacaagaggaaggcatctgtctcctgcccgtccctgggcaatggaatgtctcggtataaaacccgattgattgt

SEQ ID NO: 30104 - DNA, 2300 bp, Homo sapien
tttttgtatactctgtttagtttctcacttcctgtgagcacaacttcgttaccacctgcagcctgtgctgtcttttcaccttttactttagaactaactgttcagtctacccatcaaaagatgggtacatttacttcctccatcaagtcttcactgaagatttcagattctatttctttctcaattccctgaaatattagtgagctcagtcacaatcacaccgtttagcatataatagttgcatcaaaagaaggctcggcgccgttgctcacgcttgtaatcccagcactttgccgggctgaggcagaaggatcacttgagctcaggagttcaaggccagcctgggcaaaaaaaaattgtctctaaaaaaaaaaaaagaaaaaagtgtgagcctgctttcttccaactaggcaatgtatttcttgaatttggagactatataaaaatatatttatatacataatctatatttatatataaatatataacatatataatatataatatataaatatataacatatataatatataatatataaatctataacatatataatatataatatataacatatataatatataatatataatatatataacatatataatatataatatataacatatataacacatataatatataaatatataacatatataatatataacatataacatatataatatataaatatataacatatataatatataatatataaatatataacatatataatatataatatataaatatataacatatataatatataatatataaatatataacatatataatatataatatataaatatataacatatataatatataaatgtataacatatataatatataaatatataacatataacatatatatctaaatatataacatatataatatataatatctaaatatataacatatataatatataatatctaaatatatgacatatataatatataatatctaaatatataacatatataatatataatatataaatatatgacatatataatatatctaaatatataacatatataatatataatatctaaatatataacatatataatatataatatctaaatatataacatataatatataatatctaaatatataacatatataatatataatttatatataattataatatatgcaatatctatataaaatatatatatttttgagacatagtttcgctcttgttgcccaggctggagtgcagtggcatgatatcggctcactgcaacctctgcctcccgggttcaagcgattctcctgcctcagcctcccgagtacctgggattacaggcatgcgccgccacgccaggctaatttttttgtatttttactacagacggggtttctccatgttggccaggcgggtctcgaattcccgacctcaggtgatcagcctgcgttgacctcccaaagtgctgggattacagacgtgaaccactgcgcccggcctggagattatattttaaagttattttgaatactccctggaaaagttcttggttcatacttatacccgtaagtcaaaagatttgtcaaatattcaagaacaatcaaacaatcacttaaaaatactgtataaaagtttctatttcggcatactttacttttacttaactaaaatttcaaataaaatgtatccacttttatgatctcaacaagatcggtcattcctatagcggagttgaaaactttcaacttattcacaattatcaaaagaatggagcagcccccacagagacttccagcaatgagttgtaaaatgcagtctgcattaagtagcttccttacaatcatcccgatggtaaaagtgtcaaatttcgcaaacgcctggacaaggaagtgaaatgatcatctaataacgcagttgactcatctgtcaaataagcgagtgggccagggtccctgagctcactaccctcagattctaactccagcttcacatcattaggcgtaagcagccaattgggccgtctgggagccgtgcatcctgggagttatagtttccggctccctccttcagattacaagctccacagagccgcgggaggacggttgcctggtattattagcaagcagcaaatatggcggtggcgcgcgtggacgcggctttgcctcccggagaaggtaaggcgatccctaccccgagtcctaaggtttacttcacggagctgaattaaatagtggagagcagaaaacctaggtttagatgtgcagttctggaccagttcttttgatgcggatctgtgg

SEQ ID NO: 30105 - DNA, 2300 bp, Homo sapien
tggttacagctccgaggcttggcagcagtcagtcctctaaatcggggacagggcccaggggtcgaggcccgtcttcatggcttagaccaggagtgcattttctgggagctgtaaattcttgggggaagagttggtggatggttctcagacctctctgtcgaccccttggaattgtgtacaaaggctgtgcacttttctgagacagcacacccctttcatcaatttttcagaggggctcacgactcctcacatgctaagagccattagacaacgggaaaacgttgaaatcctccaggagagcaatctggcataattatttcctgcagtagtcctaatctgggtgtaaatttgaaattggccgtttctctggccccgccctctttggagatcggcttttcttaaaccacacctctcaagcccaccagggctacttaactgttaatagcagttaacatttacagagcactttgtatgacccaggcgatgttctcagtcctttttttttttgtttttttttttacattatctcattttctctgtagaactacatttataaggcaggtattatccccactttacagagtagaaaagggagcccaaaagaaatcaataatttgcctaatataccacaatggttaattggtggagccagggtttgaacgtctatgttatactaaagtgccttattgagtgcccggtggcaggaacggggctaagtactattcatatggtttctcttttaattctcatatcaagctagggaaatgggtgtattatcctattttatgggagaattagttgaactatactttgattttcaaaatcacagtttgggcactttaggatatattggtagttaggctgtaagctggtggattgcagtcaaaagtttagtaacatttaaacaatagtatcattacttaggcacaacaaatggaagtaatcgtccatatttaaatgtgaaaattttcaaagtatatcttagcaacttgaggagaatatcacacgtctagttttaatttgatatttctgaagaaaaatgagtaattcaatctggtcatttagaactcaagattgctttaattttacaatgttgatatttattatgctctactgttctttaacttgaaatggtatagagattttataattccagccctatgcttagctgttgtacatgttttattttatttgtgttttctaacatttccgtttcttttcaaggatcagtggtcaattggtcaggacagggactacagaaattaggtccaaatttaccctgtgaagctgatattcacactttgattctggataaaaatcagattattaaattggaaaatctggagaaatgcaaacgattaatacaggtaggtattgcaatctgggaaatggttacataggatcaatttattattaaacaaaacaataaaataacctgacaaaaagtaactgtgcagccctagcaagcagtcattgttgccttaaatttttacatgacagtttcttctgaagatgaacatacatgtactacattgagagtagattagaaaaaaaaagcattgttaagaaaaggaagcattttattttgcaaaatactgtgttactaaggtaaccttttacctcatgatgggggtaaagagttcattcattccttcattcaagaaatggttactgcgtccctcttatatgtctggcactgtattaagttttgactgagagtttaacagcactattcttgtggaacttacattctcaagttgttgctgtgttaaaaatgtcttagtagttagaggaggtctgatcgctcagctttatctgtattttctattgcccaggaacaataacaaaaaactgatagtcatactgtagaatatttagacaatatatgtgaaatgtacaaaaggagtttgtttgagagtgtttggctgtctaaataaaccttttaaatcactttaatgtgaaatattttatatatgttattcctaaaaataacaatatgtttcctttttacagttatcagtagctaataatcggctggttcggatgatgggtgtggccaagctgacgttgcttcgtgtattaaatttgcctcataatagcattggctgtgtggaagggctaaaggaactagtacatctggaatggctgaatttggcaggaaataatcttaaggtgaatggtttcttttttgtttacaaaactattctgcgtaaaaaaaattcaagcaatgtagaaataagtcaaattaaaaagtgaaagtacccactcccactctccagggataatctctgttaaaataa

SEQ ID NO: 30106 - DNA, 2300 bp, Homo sapien
gtttggctgtctaaataaaccttttaaatcactttaatgtgaaatattttatatatgttattcctaaaaataacaatatgtttcctttttacagttatcagtagctaataatcggctggttcggatgatgggtgtggccaagctgacgttgcttcgtgtattaaatttgcctcataatagcattggctgtgtggaagggctaaaggaactagtacatctggaatggctgaatttggcaggaaataatcttaaggtgaatggtttcttttttgtttacaaaactattctgcgtaaaaaaaattcaagcaatgtagaaataagtcaaattaaaaagtgaaagtacccactcccactctccagggataatctctgttaaaataaactaaaaataaatctcattttgaaacatataatatgacataatattcttttaaatttgaacaaagaatctatattgtacttagaaaaaagtagatcaaaccatagagtgtttaggagggagactatatcatgctgaattaagctttaagtaaatgtttaatgctataagggagaatatacagttttaaaagttaggagatctgaattctagtcctacttgcactacttagtaactgtgtaattttgggtaaattaatacatatttctgcgtcttattttttggcatgctagctgagaggactagattaccaatagctgccttttattgagccattaatgtatctgagctactgttctaaacatttatctgtattaacttattcaatctcatggtagcctgcgaagtagatatagacattatgcgtgttataaaggtgaaggaactaaagcacagaaaagtaacttgctcaaggtcacacagctaggaagttgcagggccagaatgtaaatccaggctgtttggttttaatctaaacttgtaaactctattctataccaccaactgtcatatattattactatggtttcttttgttttttttttttttttgatggagttttgctcttattgtccaggctggagtgcagtggcacgatcttggctcactgcaacctctgcctcctgggtttaagcaattctcctgcctcagcctcaagagtaactgggattacaggcgcctgcccaccatgcctggctaatttttagtatttttttagtagagacagggtttcgccatgttggccaggctggtctcgaactcctgacctcaggctgtccacccacctcggcctcccaaagtgctgggattacaggtgtgagccatagcgcctggccattactatgttttttttcaagctgtaaagatcttggatggtatgaactacttggtagccctctactcatagagagataatgaaagtgtacgtttacaacctgacaatctactaaattctgttagtactgccccttttctcttgctaagttcttctactctgcttctaataataagaggagggaagacactctttcagctgcaaagaactagggaataattttattttttgattttgttttcattaaatagtgtgatgcttttcttgtgataggccatggaacagatcaatagctgcacagctctacagcatctcgatttatcagacaataatatatcccagataggtgatctatctaaattggtatccctgaaagtaagtatgttttctttgtcatttgtgaagttttatagcaaaataccaagagaaagtaatcttactgacctaaaattagcctgctttgtatgagcagattgctttctttatgataagaattatgggctgggcatggtgggtcatgcctgtaatcccagcactttgagaggctgaggcgagtggatggcttgagctcagaagttcaagactagcctgggcaacatggcaaagccccatctctactaaaaataccaaaaattagtggggcatagtggtgcgagcctgtagtcccagctactcagctaaagcaggattggttgaacccaggaggtggaggttgtggtgacccgagattgggtcactgcactctagcctgggcaatagagtgagactcagtctcaaaaaaaaaaaaaggaattatgttagaataccagaaattaagtttgaaactttttgttgttagttatataactcatttatttgatgtgaaactggtcattgtagttaaggttaattttatttaccattctctgaacatgatggaattccctgtatgcccaatcaaccaatattagtaacttcagttattatatagtacataatctttggtgaggttgagattaatcattcctgaatttgagtctgtcttta

SEQ ID NO: 30107 - DNA, 2300 bp, Homo sapien
ccttggggcccaaatttcagtgacttgttcaaagggaggaagcaaaggaactgaatgaggaactgacttgggctcaggagtatgcatgtaggcctccgtgaaaacatctgaatgaacacagagtccactgtggtcaagaaatataaaaatacttaatgtgcttgtgcctcaagcttctgccatcagggacaggtttatttgcttttatttgtctactcttaagatctatgctttgttttgcttagagaatcaagtttagcattaataaacactagtgtgtaaactacattttcagatggggcagaaatgaccagttcctttggtttcatatcatcatataaacatttttttattttttgagacagggcctcactctgtcacccaggctggagtgcagtggctgctcttatttgtggttatgactgtaaaatataggtaaatataggtaagatcactcaaatgcctcagggttatgagtgcttgggggagaatggggtcaatgaggtccaaaaccatgacctagaagtcatcttgtcctaagtattttaccacttgtaagacagccaagctgtacatgaggcgggggatcctactgggagataaagcataatcagagcagaagtctagtatatgaggctcttcttcgatagcagaaggaagctacccttttatgtcctcaaaaggtcccagagtgctgtatttcctcgaggaagaaggagtatcagatcattactacaatggttgaactagtttacagtcccaccaacagtgtaaacgtgttcctacttctccacatcctctccaccacctgttgtttcctgactttttaatgatcgccattctaactggtgtgagatggtatctcattgtggttttgatttgcatttctctgatggccagtgctgatgagcattttttcatgtgtttgttggctgcataaatgaacacttggacacaggaaggggaacatcacacacctgggcatgttgtggggtagggggaggggggagggatagcattaggagatatacttaatgtaaatgacgagttaatgggtgcagcataccaacatggcacatgtatacatatgtaacaaacctgcacgttgtgcacatgtaccctagaacttaaagtatattaaaaaaaaaaaaaagaagatcattactacagaagagatcttccaccctgtggcagaacttccttttatcccattcacggatctggttgcccacgaagcaggcctgccatgaaaacatctgaatgagcatgcagagtccattatggtcaagaaatggaaaaatacttagttgtcatgtacattaattatttttcttaaaccttggggtaatagtccgggggcaggcctgcttttggggcctgtgttaaccccactgtgctccaagcacagagaaacacggtgcagcccacaattccttctggtttcttgaacaagtgtcttctcaggactcctctcagttcctgaatttcacaaaactgctaccgacgttttaccagttagaaaaatgtccaaaataggataacccagaattggggatggtggagggtgaggaaagtatgctttgccaagagaccgacatcatgtacagtgagagtaaaaggaacgggctgttttactggcgagtagaagttgttgactaatgtcaaagcaaggaaaagattcaaggatccgctatatccgtgcttatacttggcaaatcgcatttctctggttcagggcacaataaattccatcactccacaggaaagactgccctactagagtcaactgcggttgtgggcactttcgctgacaagcgaaaagccttgaggtaggtggatgctcccaggaaactcagacgtccgaagttcacgaggagttgggtcgtgagaggggccagacctcgatccgcggggcgacagctgcagtgtcgcgtcgcgagcaggagcttggcggcgtagagcgccagggtgccaacttcgcttccaggcctgtgggttccgcccggcgcgtgctgctgtcagtcaacgccctcggcccgcccccgccgaagctccaccaatcgtagccgggggtcggaggtgaggagacgtcgccgggtgaggaagcggggggctagcggcctggcgctgcggcgaccgaccggggcgtcaggatccctggcccccggagagcgaagggcgggcgggtcccggaggtgagtgctggatgtggtctgtgtgcggacgtcgggaggggccgctgcgggcggagcgacccattgcccggctctgccagcgcgctcctagactgcgaagcccct

SEQ ID NO: 30108 - DNA, 2300 bp, Homo sapien
tcaaatgtcagtgctctacttacagcacagagtcaggtcttttcctggcacaatcctcctaaattattgtcagtagaagcctctagctgggagggacttcttgcattgctgcctctggtcctgtagttcttttgctttagagtctcctgcccttgccttctttctgcatcactgacagctgtgtgctgctgctgcctggctgaaccacactgatgtcctttaaatggctagtgtccacacaatgcatgaccacacctgcctatggtgcaactaaattcctgtggactaccatctttggtcttttccctctctggccattgtggaaacctgattttttttttatggacaactttttgagaaggatttcaatggcagaacagttgggaccctgatgacagagttatcctctattttacagccagtttcttccaagaagttatagacagtttgaggtggatgagtgtctggatattggagagaggaggtgtcaggaaatggagaagcacagtctttcacatttcctggcatccctgtggaggtggccaggactggtggatttatttctccttaagaaggggctgacatcttgtctaatatgagtgtaagcttttcaaggggaatttctggcacttagtacagtgtgtggtatagcgtaggcctccataattatttgttgcatagattgttgaatcattgtgtaccatgtaaagaactaagtaccttgagcaaatcagaaaagtataatgcagtatcattaagttgcttttctctgatatatggttttttaaaaaaatacagtcataattggtatagtctagtttgagagataagaaatacaaatagagggagcatgagggagaaaaaaatacaaatagagatcagcagagaagtgaaaataataagtgctatgggaactctgaggatggagagcttgttggaatggctcacccttgtctcctttgtgaagctgattggcattgtcattgtggttgggactggttcagacaggtgaggcagaggagtgagagaatgggggcttgccaggtccaacacaaagtggaggggagagttgatgcagctgagttattctgagatactctgcaccatgattttgtaccctttctgcctttatttctgtgtcctgcccttcatggaaagtctccctggggatagaatactaggacattttctgtttacctgtatcaaaatggcaagtggaaagagcatttgaatttgttacgtgggagaacagttaggcactgctgactctgaagtcctctgcctctagcaggtgtgatgaaggattttgggatcctgttacccatttttcaagcttgactttcctctcccacatcttccaggcaggtgtgtgtcttcctgtgccttatcatgtagctgagggagcatcaggaccacatatgtggtggggagagctggaaacctaaagagtgtgtcgcgtctcctgccatacctctgtatgagaggggtagcacttcttgtttgccagagaatgtcaggatgctttgcacagtatcccagagctcttcatgaaaacagtttcctcttcatgttctttaagtgtaattaatgtagcagtgttacataacttaaagggaaggggaagggaagtgattttattgactgaggtctctgtagaaatttagcagttacttttatttcacaatttctgagtttgaagacatacttccttactttcttaaaagttaaaacctaaataggcaataggggaaatattgtatttacacggaagcctgacactgggaaaggaaactttgaggagattgtctggaaatgaaaagacgttactgtgctctggctctttgctttctccttgtgactttgggccttagataaggttaaggaagaggaaatgtgatgtttttcctctcaccccaccctaggccattgcaattggtgatgttctctcatctctcctctttgaaggatttctttgaagaaaaatgtgcttcttgaatcaactgcagtctctcctctgcataagagctcttaagggtactagcaggatagaagcaaatgaaactgaaagctcatctgcagctcagaaaagcaaagacatggaattttaaagagtgaaggtagcatggtgtcggccatgggtgaacaagacacagccagacaatgtggaccaatttcttcaaactacggcttttctgctgtctgcttgcagtgttgatggtggtggtgctggtcatcaatgttactcaggtagaggtgagtacccagtataatccctcataactaagggagccgagtctggg

SEQ ID NO: 30109 - DNA, 2300 bp, Homo sapien
agacagaacccataataaagcctttctatgcaagttacattttatagaattatcctactaaaagtaacctttcttcagcgaatgcaaaacagacctttggtgttccagtatgattcattttgccattctgaacaactatcattttaattaagaccatttaactgacacttcctggattcagttattaagtttcagattgaaacttgatccagtttaataactgaatccagtttcacatttatcaatctgaaaacttagtttgcagattggtaaatcagggtacttgacaagaataaatatggtacgcctttatatattcatgtgttacatgccagaaatgagtctgtttctggaccctgttcaaggaaatagtgatgactgagagaggtacagggaaataaacacccaagggaaacaacagaaataagcctccccaactttctaaaaaactgctcagcattatctctgtggattctgggtaaattcagctttttaacatcagctagtcactaatgccagaaattccacttcaagtgtatttattttcttgtgttaagcattattctacctggtttatgtctacaatgtagtattagtgtacttaggattcttgacacctcagtgtgcaataaataaaattttgaagttgttgtttttcatttgaaggtgagaccacagcccctgagtgctaaggggacctgggaatcctaggggaatggaggtggtggacgataagaggatggttgagggcaggagtttaaaggacacagaagctaggagagcagaaaatgtactccaccaccttctgtctaacttgtctcttaaaagtgcttttacattttaactttttaaaaaaatgtgggccgggcatagtggctcatgcctgtaatcccagcactttgggaggccgaggtgggcggatcacctgaggtcaagagttcaagaccagcctgaccaatatgatgaaaccccatctctactaaaaatacaaaaatagccaggtgtggtggcacatgcctgtcatcccagctactcaggaggctgaggtgggagaatcgcttgaacccgggaggtggaggttgcagtgagccgagatcatgccattgcactctagcctgggcaacgagagtgaaactctgtctcaataaataaataaataaataaaaaataaaaaagtgtgaacttaaatatatttatatgtgtgtacatatattttcttttttaatattctggttaaatgagaggccatcgggcctctttttaagagtctaatgatgtgtatatctaatgcccattccagctggattgtaacactgcttggggaagataacttaaaaaaaagtagtaccgagattacagcagctagtgtcctaaatggaaaagaagtgaaactaaatgtcataggagaaatcctttcagttttgtgcagtggttcatttgctgttaaatctaccccattaccattccccttactccttgaaaataaagtgatcttcatgttacaggaccattgctttatttatgtcacagatttcttgtcctttaattagtcagtgaaggcacatgattgcgatactactttttgattgccgtattgtaaaagctatatggtaaaaggtaactccctccacccgcccactgcaccctcacgtttaggggccacacagaaaaagcgaaataagatgaggtgaatctaatgagaaggcaactctaatgcccatcaggagattcactaggacattttaaaaggacgtctttaaggaaaaagttttgtttgtagatgttgcctctgattcctccctgcggctccagtccaggtcttggagccggccctcgaggggaatgtccgggactcgggtcggtacctttttggtctgggaatttccagtgtgcagaaaaaaaatccacaaatctaggcctcgctgccccctccctgcctcctctggccctcctcagtgcccacgcaacccggttcgaaagagaggatgaccgtattctgcattttagaaaacaggctcttagcttcccccgcccccgtcctcactagagtggagaactgaaagcgaacgctataaagggcgccagtgagaggggctggcctcctcttgccacgaggtcagacggcgagttcttagagaaaaaggctgcttagctgctgcttatcatgtaacctcaaaaggaaactgatcgtctttctcatgctgtcacgtacttgggttattatcgctgattacagctggaaacaattgatttgctcttacgtatttgtgtgacttgactcttcaaacacaaaggtatat

SEQ ID NO: 30110 - DNA, 2300 bp, Homo sapien
aaatacacttgtgagaaacaaggaaatacagtcatgcattgcttaacgatgctacattctgagaaatgtgtcgttaagtgattttgtcgttgtttgaacattatggaatgcacttgcacaaacctagatagtctagcctgctagtcacctaggctctgtggtatagtctattgctcctggtctataaacctgcacagcatgttactgtactgaatactgtaggcaactgtaacacagaggtatttgtctatctaaacatatggaaacatagaaaagaaacagtaaaaatatggtattacagtcttacaggaccaccattgtacatggagttcattattgacttaaacatcattttgtggggtatggctgtatttactttggacctacccccaccagggtcttatgccacctactaatactgagtaacaatccaaactcatcgtgtcccccccttcgtcctaaaacccaaacattctgctctgtgatcccttgtgatctggagctggtggccctgttcacctggtcgtggctccaagccatggcctgactggggaccctttcatttctccccccctccaaaagagcgagacctgtgggttctgccctagcaatgctgcccagctctgctttctgtcaatttactttctcctttcccactgtatctgccccagtgcccagtcatttctctcctgggctactgcagtggatcctaatggcctctgggctcctcatcttctctcaactgcttgcagattaattttgcctacctaaaattcatgttttctcaatgtttattaaataaaattccagtgtctcagctgctggaggtgctccacccaaaggcaccaagttatcttttatatttaatgccatcttctcctcttgacaatcgtaaaaggggactatacactctaatatgaaccctctccttaattctttgctcttgttctttctgtaaatgctgtgggccccaatcccacccatcctttaggacctatcttaaatgccaccacccctgcaaagattttcctcctgacctcctttttcctctaccagacctgttgtttctccttttaggtggctcactgaactttgtatccctcgtgttatttaatcataatcggtttatttaaacatagcatgtgtgtacttaaccttatcattcccgcattttttgctagttggacttgaacaaatagttgtataaatccattggaaaaaagtattcaagataggaaaggccaaaattactgtgttagtttatcagatagtgtaaagctatgcagaattttaaaagttatatctacatatactacagcacctacatgtttgtgtattattttgctaagatggctttgttctagtattgaaggatacagaagtgtggcattactttttattcatggctgcacctaaaacattatttgcgtcccagcagataatttgagaacataaaaatgctccaacatctctttcagttcgggatgttgcctaaaaccgtcgacaaacgctatgtttgagaagggaggctacgctggggcgccggaggagacaggcccttaagaaccttccagagatgccttaactgggctaacagctcgccgcgccggggcaggcagaggggtgcggggcgcgctccttccaggacttgccagtccccaagaaccaggccaaccggttccctccactgactcccgcctccctctgcaggcccagccctgcgccgcgcgccctctccccgggcgcccaggcccggcgggggcctagagggcagggatggcccgggcgagggacggggtcccggaggcgggaggcgggaggcgggaggcgggaagcgggaggctggaagccgcgcgctgtcggggtttcccggtgaagggcaggcaaacaaccggtcggtctgggcggagccgggcgggcggggcgagggcggagggcggagggcgcattgcctcatcctgtacattttactggaaatcggacgcatccggaggaggggctgggaggcggcccgggcaccgccaatggccgggccgggcgccggggaggtcggcgagcgctgcggcccgttaaataccctggcagtcccgcgccgcgcccgtactggcccgcgccgtccgcccgccgacagctccctgagccagcccgggaggcagccgcgcgcagcgagccggtggcgcaggtgtcggggtcctcgagcgcccagcctgggagcatgattgtggacaagctgctggacgacagccgcggcggagaggggctgcgggacgcggcgggcggctgcggcctcatgaccagcc

SEQ ID NO: 30111 - DNA, 2300 bp, Homo sapien
tcactgagagtttagtttcatatccaacaaatctaatggacttgtctcagtcctcattctccctgttgtctctgcagaaatttcagtttgttgaatgttctccttctatagcctctgtgataccatagcctgctggttcttttatctttctggaaacttctcttccacctccttcactagctgctttttctttctactgctccataaataaaataaaatcttctccacattctttgcctcatgtgacttcttatctactcacattgctttacacatgaatttcttcaatcttttttcccttcatctcaaaatctttctcctgatgattctaaaatctagcaatttccaattgctgttaagactttcttacttaggtaaccagccaggattttaaactcagtgtatctaaaatgaagcccattaacttatgttcatcaaactccaaactccaactgattgtctctattttgtttttataaatgacaccactattaatgaatcatctttcacaactcacaagtaattttttattcgtccttacttctcacaccctgtgcctactaaattatggagtaaggaagattctataggctttgtggtacacagggtgggaagagcatctattttgctgtcagataagtctgagttcagatcatggttttgctacttactacccttttggtcttgagccagttagttaagctcaccagagtcttgatatccttatgtataaagcagggaatataacattccctacctagccaattgagaggattggatgagagctgcacattttatgtggagtcctaaataaatactgatctcattcttttccctaatcgtggttatgcctctcatactcacttttcttttccattaaatggaataatatgcatcaaggacctcatgcagttcctgaaatgcagatgctcattccacgttttttttctcctttcttccttccgttgtggcctgctcagttcaggactgtgttgcttcttgtctggacaattgttgcggctcccgacatggctcttgctcctgcttcagacatttggattcaccgcattcactgctggttggtttttcttcctcatgtgtgctctgattaggacacccttctgctcagaagacttcacttattcatcatttccaagaaaatgaagtaggaaaacatgtggaccaagttatcttagagacatatgtgccatgactttcttacatgtgaggtctattttggccaagtggtaccattcactgttccttcaacatgtccttacttttctattctattaactttcctcctgggtctaggattgacaacgatgcagtctcaatctttgaaatctatttctaccatgatgctttccctgattctttaaacatatgggatttctctctgctttggcccccaaaagactttgcacctctcatgttcaccttagttctcattttagtggttatttatttacttgttcacacttacccattcctcccttcatgatacaataaggttttgagcctgtgtctaattaatatatctatatttttaagtagctagtcttgcaggccctgaaaaccttttggttcaattaaaatagtttaactttgatatacagacctatgcttgaaagtgaaagtcttatagacaacagaaccactgtttatgagaagagaaagagaaaagataagaggaataataagaaaaaagggcagcttccttgggttatgaggtaattattggaattcggtcagaaaagtaagaaatagaaataagtacgtgtcccaagagaagcagcaatacctaggattatgctgacagagtgagggggatttaaaagcagtctccattctaatgctttttaaattctcggcatagtgtaatgattactattccaaaacagaagatatgttggcaaactgccctgtatttgaaaatagaggaaatgccctggaaagaatgagatgtggtaaagagaggaaatgacaatgtactgaaaagactgggctgtaagtcatcacagcggcgccctgaaacccgatatgtcaggcaagctggtgggatcctgggatccctcatgtaacggcactcattctgacagaagcagagataaaacagactaagtacacagaggagtttaaggtttcgtgaatgtaagtgctgagtacagaatggtgctcaataaaagcttgttaattgatggaccacaggtttgtgacaagacttctcagagtctgattctttcaaggtgggatataagagtaaggtaagcacctcagaaaatgcctggggcaggtca

SEQ ID NO: 30112 - DNA, 2300 bp, Homo sapien
tgccttccctgggctggggtgagggggagggagaggtagatgttaaaaatggcttggcatttacctccctttctctcatgcttcctctctcaccttgtgatctctgcataccctggctcccctttgcctttcaccatgagtggaaacaggctgaagtcctcaccatatgcagctgctcagtgttgaacattccagtcatcagaaacatgagccaaataaaccccttttctttataaattacccaccctcaggtattcctttacagcaacactaaacaagttggaaatggtggtgggcaattgagtaggctttccagatgtgaatggttgccatttcacccattttggaactgcaggaagctgagaagttggtagtagctacttgcatggtcccgattttgggtggcagcagttttctttctctttgaggccacagacctgaaacatgtggcttcttcctggcttttgctcctccagtcgatgtaaggaggagcttacattttgctccttacaaattcaatgtaaggaactgtgtgcttataaaaatccaaaaaattttgtttataagcaacaattgtgtgcttataaaattccaattgaatttgttcctggttgaaatagtatgatttccattctctggctgaatcttgattgacacaggggattttctccacgtttatgcttttccagtgaagaagatattcattcctgattagtggagctcattaaactttggaaaagaaattttctataggccccaactttagcaagatcatgaggtttggttttatctttttaaaagtcaattaaggaaacatctcctgtacctcataaatatatgcacctgctatgtacctacaaaaattaaaaataaaaaaaggaaaaatgaaaaaaaatcgattgagataatataatttttaatcaaaataacacacagttaatgaaatccctttccagctgaatttctaatgcaatttgtgtctgtattttaaagagctaattaggctataaatacaaatgaagctgtaaaacgtgtatttcataaccaagaaacagagttttcaattgtatggttatgattagcaatgaacacggagaattgaatgctagggccatcactaattagtaatcagtgtccatctgaacttgattcaatgttatgataagatcatttatcctcattcattgtccatgccttcagggtagagagtgcagggctggcagtcatgagggattcctagagctttcacagaggtagtatgggggctttctccagaggggccctggatcagagaaatttctcctgcctatagtgccagactctcctgagcactccagggatatatcctcctaggtcaattgtcttcctcagccttttgactctggttcatgaagtgtctctctaaagctgttgatagctactattgttgtggacaaagaaacatttttgtaaatgtttttgtaacacttcctatgttccaggccctattctaagcactatatatataaacgccagcctagtcttactggttattgctgggaaaggcagggccttgtttcttcctccctagaggaaatagtagagagggtaatgggatatggtccagttgagcaatttaagtgattttcagttgctgcatcataacttccagttgagttcctatgtagtaggagaaagagagagagaggtggagtaaggaagtagtgagtacctgtcatcaataggagtgtcatttatataaatgtggatatccccagagaatcactagtgtagatgatcttatatgtttcgttcaactctgagaaactatgaatccataaggtgtggttgattgcagaaggacaatgatctcactaactaagtggccagaaacccgagacctggctcccaccggggccatgggaagtcacacatctctcctggctgtagtggcctcatgtgtaaagtactttttacagcaagggactggacagaaaatctctgaggtttattctggttcagaatctataggtctgtgacatcataaacattttattgtattaaatatgtccaaagtcttgaatttcattcctagttttgttatcttaagcgaaatgcattagtatgtataaagtgcttagaagagggcctggaacatagtaagtgttacaaaaatgtttactaaatagtctctgtcctcattcaggcaagtcaaatgatgaactccatctcatttccatgttgcccaaatgaaactctgataatttccagtcttttggttaaaggagcctctcttatcagaaaggaatacattggcatct

SEQ ID NO: 30113 - DNA, 2300 bp, Homo sapien
atttaaaacttcaatatttcttccttccaccttagaacttcctactattcttcttgctttattcatctccatagcacttatcacaaatatactctatattttacttgtagattttggttccttctgacttagaagttagaatgtaagttctatgcagatatgcaataaaaatttttctgattgctgtacctcagcatccccccactccctggagagtaccagacacatataaacattcaataattatttgatcagtatacacaagaataaagcaatactgatcaaatttaccaagaaattgccaaatttccatttgatttagcattatatgcatcattttctggaaggcggtgccacataatagttgagggttgtttctgtagtcattgctccgggcgtgaatcctgattctaacagtggctgtctgcttagcattgggcaaattacttcagattactgtgccttagttttctcattccccagtatagggagaataaattgcctatctcatagttagaaaacacatataaaagtatttaaaacactctggtacacagtcagctcttaaaacttataagtattacattaaatcaatttttgaaaagaacaatattctttttctttttgtcttgagacggagtctcgctctgtcacccaggctggagtgcagtggcgtgatctcggctcactgcaagctccgcctcccgggttcaaggcattcttctgactcagcctcccgagtaactgggactaaggcacccgccaccacgcccggctaatttttttgtatttttttagaagagacgtggtttcaccgtgttagccaggatggtctcgatctcctgacctcgtgatacacccgcctcggcctcccaaagtgctgagattataggcgtgagccaccgcgcctggccaagaacaatgttctttatgcactcactgcctaatgaaatagagtcatgaaaattatgtagatattaaaaaatattttgtctcaatcatctgaattatttaattcagagcatatcttaagcatacattattaatataatttactttctgaaaattagtaggacattaattttatttgaaaacctccaatcaagtcaaagagaataatgtaataattccaaatgtcaagctcatttttgaattctgcattgccatttactatgtctgtgaccctgtgcgagtcaattaaaatatttaagctttggttttcacatttttaacatgagtaaaaattaaatctatgtaattagttgaatattaaacatagcacagtgcctggtacatacagtaacagatctcaataaaaagattaaacaaagattattttatattaaaatctaaagaccaatgtttgtgacagaactataccaattaatataaaattgaggaggaattaaaagtgcattatatttttctgactccaaatttaattctaagcaaagaaattagagatttatatgttggaagaagtcattttaaaaagaaaatttagtatgagaaatattgacatatttgacagcaaatcacttagcatatgacttccttttctattagtaacagtttatgagatacagatgtctctttttttacacaaacacttctgaatttcttaaaattcaacattttacttataatcctccttctcctccccattcccatcaatttaaacttatgaagattctaaataagaaacacatacaaaactcttttgcacacatatcttcaaggccattatcatctcagactgtggtattaatattttgtattattggatgtattagacaaggcattcttgtaaaccactattaaaatccaagcagagacattggttgctgcacttagatgtggtggagaaggtgaaaaatgcttctgctcagattctctgtcaagagtttgctggagccacagtgggacagcaagcaccttagattattccagagtaaaccacagaatcaggttctacattctgaaaagaaactccactaaacctttataaccagatcagagctaaaatacacatgtctggaattgcacctgcctaagatctagggagcctgagcagccaggatgatatgtttttgaggaatgtaaagggtgttaacataatcccccaatcccatacaattcaatttcagaaaagtatttagggactgtgctaaaatagcatctccaagcttgctatggcaagatgatgctcaggttttccatgtgcaggggaaatgatgaaggtaaggttgaggatgggaaatttgcaagataatagttcatcagtttgttttaacttacag

SEQ ID NO: 30114 - DNA, 2300 bp, Homo sapien
aataacagttctgccaagaaaccagagggtcacgtaaatcctttttggattgattctgtaggtttatgttgatttactttcttttttctctctctaatattgttgttttaagtagtaagtgtgctgttgttggggaggtaataatagattttttattgtttcatcattaggattcaacctacaaccagcagttaattatccccagtataggattacctttgaaaaccaaagtatttgcagctgtccaagccactaatttggatggcaggtaatttcaaactcttgtcttttttaggttaaaactctttgactgcctaaatcctcatgagtcataaagttgggccattcatttttaaattcagtttgaaaatattatcattgccacaccatttaggcatgctactaaaaagaaataacagattacaaagtttaagaggttacactcatgttctgtcattaattggagaataacaagtcttcccataaagaaggggggtggttcttggaacggggcatgggaagatctgggatgccgaaatgttgtatctcttcatcagaaagatgattaaccaaatgtagtcattctgtgaacacttgatttgcttgcttttccatatgtatgttactcttcaatatgaatttattaaagaatgaaaggactctgcataagagtgtgtcaaaattacataaaatgatctccagaaacatctctataaaaaaactattaaatttcagatgatacttaagaaaattcagagcaatcaaactaaaatggagctcaaaagctgaagctctaaccgtgccctataaaaaaatgtaatgtgaaaatggcctgttttgggttgcttatgtattactatttaaactttgcatcctgaagagattggtatactctataaatttagttcttctttaccttctcccttcctgtcctgaagaatatttctattcttgtatgagtctttaaaattgtcctttaataatgcaggagttttttccatttcattggcattcgcttcccatggattagtattttttttataacatcggagttggaatggactaatgtataaatgtgagcaaaatctaaccttgtggaggaaggctgtggatatgtatgtgcctcatggctttcttcaccctaacacagtgtctattgtggactccacaatcgccaaaccactgattctgatatacaatttatgctctaaactcctttgttgtatttggtattataacattctctgattctgttagagacagtaatatctagaaacaaaaagctattgtttatagtgaacatataagcatctatgtagctcattttaaagtttacttctcagactttgaccattcagttgtcttgtacacaattattttatggcattagacttgactccccttaatgtgaaattgacaatttggtgcagatttttaaacactttgagttcaggagaaagttcttactttttaaaaacttgtatgggtacatagtaggtgtatatatttatggggtacttgagatgttttgatacaggcatgcatgtgaaataagcaggatggaataagagaaagttttaatgaacaataaacttccgcaaataacaagtaataaacaattatattccatgagataagaagtttgtcaggcaagcgcggtggctcacgcctgtaatcccagcactttgggaggccgaggagggtggatcacgaggtcaagagattgagaccatcctggttaacccggtgaaaccccgtctctattaaaaatacaaaaaaaaaaaaaaaaaatagccgggcttggtggcgggcgcctgtagtcccagctactcgggaggctgaggcaggagaatgtcgtgaacccaggaggcggagcttgcagtgagccgaggtggtgccactgcactccagtctgggcaacggaacaagactccgtctcaaaaaaagaaaagaaagaaagaaggaaaaagaagtttctcaatatttacttcccttgtattagtaactaatatccaaaaggaaattctgactctagattatgtttgcttacattctttcagatggaatgttttaatggattattgctatactaccccatcaggaaacccaaatgatgacattcgatatgatcttttccttaggtaagacttagctgtctaagtattatattgataccaatgacccagttgtagataattgaaatggaatatctaagtcagataaattataaagcactattatagcttttgaatttcaagttttacattttgaactttgagtccttataaagctgaaagtat

SEQ ID NO: 30115 - DNA, 2300 bp, Homo sapien
gcaaccccgagctgcaaaaccagcaagtttttattagggattttaaaaggagaggggtgtatgaatagggagtgggtcacagagatcacatgcttcaaaaggcaataaaagatcacaaggcaaaagggcagagcaggatcacaaggcaaggacaaaattagaattactgatgagggtccatgtctcactgggcacacattgtcttggtaaacatcttaacaggaaacagagttcgagaacagacaacgggtctgactagaattcaccaggctggaatttcccaaacctagtaagcctgagggcactgcagtagaccagggcatatttcatcccttatctcaacggcataagacagacactcccagagcagttgtctataggcctacccctgggaatgcattccttccccagggttatcaattattaatattccttactgggaaaagaattcagtgatatttctcctactcacacatccgtttataggctccctgcaagaagaaaaatatggctgtattctgcccgaccccgcaggcagtcagaccttatggttatctttccttgttccctgaaaatcactgttattctattcttttacagggtgccctgatttcgtattgttcaaacacacatgttttactaacaatttgtacagttaaagcagtcatcacagggtcctgaggggaggtatatcctcagtttatgaagatgacgagattaagagattaaagacaggcataggaaattataagggtattgattggggaagtgataaatgtctatgaaatcttcataatttatgttcagagattgcagtaaagacaggcataagaaattataaaagtattaatttggggaactaataaatgtccttgaaatcttcacaatttatgttcttctgccacagcttcagccagccctctgtttggggtccctgacttcctgcaacagtgggtaagggtggtattgatccttctgaacattagaaagatgctcaaaatcaacttgaatattaatacctttttctctgataaaagtattgcttaagaaattaaaatatcttcttatctcaggattcactattacaatgcagttcatcaaaaggaattctaagaaatcactatatataatcttgaagaatatgaagtaaaagtatgttttatataaaagatgtgtccttggctggacacagtggcttatgcctgtaatcccagcactttgggaggttgaggtggatgaatcacctgaggtcaggagtttgagaccagcctgaccaacatggagaaaccctgtccctactaaaaatgcaaaaattagctgcgcatggtggcgcatgcttgtaatcccacatatttgggaggcaggagaattgcttgaaccccggaggcagaggttgtggtgagcccagatcgtgccattgcactccagcctgggcaacaagagcaaaactccatcaaaaaaagaaaaaaaaaaaaaaaagagatgtgtctcagtctattcaggatgctaaaaaaaattcataaacttagtagtttgtaaaccataaaaatatatttctcatgtttctagagtctgagaagtgaagatgtccaagatcaaggcactggcaggttcggtgtctggtgagggcccgctttcatagataatgcctttccactgtgtcctcacatggtggaaagggcaaggcagtgtgctctggggcctttttgataatggcactaatcctattaatgagggcttcactttcatgacctaattacctcccataagtcccacctcctaatatgatcctcttggggattaagatttcaacatatgaatttggagtggacacagacagtcagatcacagcaagatgcttctgtatccttttaaaatgcttttggcatcaagtcgttgttgatcatttcacaaatggcagagtttaaaaggagacattaacttataatcagaattttacttattaaaaagtgaattttatatggaggaagatttgtaacatttcttttggaaagacttctttccagctctacccccatgattcatgtatttgtaccaaataaaacatattaaagttgccggaggaggagccaagatggccgaataggaacagctccggtctacagctcccagcgtgagcgacgcagaagacgggtgatttctgcatttccatctgaggtaccgggttcatctcactagggagtgccagacagtgggcgcaggccagtgtgtgtgcgcaccgtgcgcgagccgaagcagggcaaggcattgcctcacctgggaagcgcaaggggtcaggg

SEQ ID NO: 30116 - DNA, 2300 bp, Homo sapien
tgaacttccacaggttatgatccaccctcatcttatttaactcttcatattttaccaattattccacgttggcctcataatgaaccctcagaaggaattaaataatgaatcagattttctcttatgagttacttgaactcacagttttgctttacaatcttttctttatcaccacccataactatctacttctccaggttaatttgttttagtcaattccagcttctataacaaactaccatagactgggtggcttaaaccacaaacatttatttctgacagttatggagggtacagaattccagattaaagctgcagcaaatccaatgtcgggtgagggccctcttcctggtttatagtcttctttttctatcctcacaaggtaggtggtgagcagagaggacgcaagttctcatttcttatcctaagtgcactaatcctattaatgagggctccactcccataatctagttacatatcaaagggtccacctcctaatgccatcacattagtggttagaatttcaaaatatgactttttggagacattcagttgagaacatcagtgtattttaattcttagaaaattgtatattaaaatctcaaatccctctacctcaaatgccaccactctactttaggtcttgtcatttctttcctagatatgtgatagaactgtaatttgtcttcaaatatgtaagcaggaaaaatgtaacttttgtgtgaattaagatgactgctcaatctttcacagttccttttcctaaatcagaaataactctccagtaattgcaaattggtgtgatatcagcaaagctacaccccaaatagagctacaaggccacagcaagtgccattagccatatctagagaataagaagtggttttattagttatcatgaagaatgtcaaaatgtgtttgttaattggcacaatggatgctagaaattggctcttattagtaaatgtaaagtgataatgataacatatattttttgtagtagcattgttacagctatacgttacatgagctggtcctgtgtacaatgcctccaagccaccgtggacacatcagtaaagtgaatctatctattattgtacacagtgcagaaacagaatcaccctgaatttcaaacagatgactgagaatctgaaacccagtctctactaaaaatacaacaacaacaacaaaaaatcagctgggcgtggtggcgggcgcctgtagtcccagctacaggctgaggcaggagaatggcgtgaaccgtgaaccccggagacggaacttgcagtgagccgagatcgcgccattgcactccagcctgggcgacagagcaagacttcgtcaaaaaacaaacaaacaaaaaaaccccactcatttttgtattaaaaaattgccagcccttgagaggcagagcaccaaaaatacccaaggacatgccactgagtgccttctctggaaggctgacggccagccacatgtggccagatctgtcctcacttttaaagcttatgtgaaacactccagctgttcctcttttaagtccttctatctcaagattttcctcctctactatttgtaatttcttaagcatgtcagcaaacaatgagccagccttcatgagttctaagtgtgaagactggagactttccctttgtaaggcttaaatctgagtgcagcaaagaatgaagaaaccgaacaccagaatgttaaatgatagcggagccggtgccaattgagggaaacactcctaccctcccttagagctcactttggtaatattaatgtttaaccggttagcaaaattaacaccattatttcaatagctactctgttgtgcatagtaaatgctgcaagatgaacatcacatttggtgaagctggtttgagaaacttttgggggaaattgtgcctggccctcaacaggaccctaagctcagagaaatgaacagaggcccctgaaactgctgtgtctgcgaccatgcgtgtgcagctggatcccgtggtagccagcgagactccacttccagcagatgaggtggacaatgaagacaatgaggatcaggtctgtcagggcgctgcccatggaaacggggatcagcatgtttttcctcctccaggagacattcctccgcggatcagaccatgctccttccacattgaaagcctgtgctcacactttgaatatgttgactgaaagaccttcatgagccggacacgctccttggtgttacacttgcaggagttgccgatggaggcctgcagtactctcggagttgttggcagctttaaaggtagggtcca

SEQ ID NO: 30117 - DNA, 2300 bp, Homo sapien
ctttggagttactagtccaagtggcttatcaaggcattttcctaaactaggacacattcctttctaaaaacaattctggaagcagtggactacacattcaaatatatattatacatatgcccatatatatatgcatgtgtttgtgtataagtataatatgtacatatttgtatagtcagttgctcccagaattccacgtgtgtgtttgtgtgtttgatctcatttgatcttcacagcaatcccatgaggctagcactattatcactttttacaagaaaggagactgaagcttaaagaggttaagtgagttgaccaagatcatacagttagtgtcagagcccaaatcagtcttccttttgcaaatctacctttaagcaattatgctgtattaactcccatcgtaaaatagaggagatcagatagagcgttcgcggacctaggttaaatatattgtcaggtcgatttattctaatacaccccacttacaaccacagtgaaaaagaaaacaattccctaaagcaattctacaggagtccatggaaatgctagcatttcagccaagcttagctcaaggaatatagagttaaaaggcatttgcctcctagcgatagccttcctgttgattcataagatgcaaatgaaatgttaatgtttaaaccaagtgggagaaactacttattttgagaggaaaaaaatatggtataaaagctctactctagaatattgttaatgtaaggagaactggaagaacaggacaagcaggcttttgagaaaaatcacagctgaagatagggcttaatagtttagagcactaaaagataaacaattttaaaaatcagtgtgtgagtgtgtgtgtgtgtgtgtgtgtctgtgtgttgcgagtctccaatctcgctggtaactcgcagttttctgatgaaagtgcagtatgtaacgattactagttggcatcctctgctggagaccagtctcacaaaagggtgaccctgtgatgcacgaaaggctatttaatgccccagcgaagtgcttcagggaccaagattttattattctttggtgatgagagttgtgatcctgcatccctgatttagagccacttagggctccgacagctccaccccggtgttctagaggaaaatcttccttcatgctctctgcctgatttgaaagcaacacagcttcccgatgttcctcctgggaggtggttcaatctttagaaattgcctaagaagcctgtccatctgctggagtgcctggctttcgggaacggaccaagacggacttggcttttaatctgaaataatttgaggattttctgtctataacttaaaatcaccgcttaactcaaagtaaaaaagtgacacgctctctagagggcttttgtagacattgggaaaatccgtatgacgaagtacggtttagaaattccggatttaatttcccccgggaaaagcaaatatcttctgttggtaccgggcagtcgactcacgtagtcttcctttaaaaccaagtctatgccagccgggtgtgaggggagtggtgggggtgagcagggggaggagagagattcgaaaagtacaggaggaatcagtccagtacaggggttgcccctgccaacaagtagctattcctgttaactcccaagaagcaagtttccacctttgccacttcctcctgccctttcctttccttttcccttcactcccgctcttggacccaaggttcgctccccaccgccaccgccctgccccactattctctttacaggacagaaggctgcagcagcacggcggagaaaaatctctgaggaatgagtcagtgggatgggcgtatgggtggagggagagggcagtcgatttttaaacctcagcgagggtgggtgggcagttggaagccagaggccttatcactggggcgctgcaacatcacagaaagtgttagtcccagggctctccctggcgcgcgcggctcctgtgcttgcttcttattggcggacctggccctgggggcggagccgcggtgaagcaccgctcatccgggctccaggaccggggcacgcggttctccctgatcccggagctgggctcagggctcggactcagtcctgcagcgcctctaggctgcggatccgcgcttcaaccacctgctttgcgctgcgtccggggaagtggggaggagacgggagggagggaggaggcggggagaggaggaaagaggcagcttacacacgccttccagtccctctactcagagcagcccggagaccgctgccgccgctgccgctgctaccaccgctgcca

SEQ ID NO: 30118 - DNA, 2300 bp, Homo sapien
agccaagcttagctcaaggaatatagagttaaaaggcatttgcctcctagcgatagccttcctgttgattcataagatgcaaatgaaatgttaatgtttaaaccaagtgggagaaactacttattttgagaggaaaaaaatatggtataaaagctctactctagaatattgttaatgtaaggagaactggaagaacaggacaagcaggcttttgagaaaaatcacagctgaagatagggcttaatagtttagagcactaaaagataaacaattttaaaaatcagtgtgtgagtgtgtgtgtgtgtgtgtgtgtctgtgtgttgcgagtctccaatctcgctggtaactcgcagttttctgatgaaagtgcagtatgtaacgattactagttggcatcctctgctggagaccagtctcacaaaagggtgaccctgtgatgcacgaaaggctatttaatgccccagcgaagtgcttcagggaccaagattttattattctttggtgatgagagttgtgatcctgcatccctgatttagagccacttagggctccgacagctccaccccggtgttctagaggaaaatcttccttcatgctctctgcctgatttgaaagcaacacagcttcccgatgttcctcctgggaggtggttcaatctttagaaattgcctaagaagcctgtccatctgctggagtgcctggctttcgggaacggaccaagacggacttggcttttaatctgaaataatttgaggattttctgtctataacttaaaatcaccgcttaactcaaagtaaaaaagtgacacgctctctagagggcttttgtagacattgggaaaatccgtatgacgaagtacggtttagaaattccggatttaatttcccccgggaaaagcaaatatcttctgttggtaccgggcagtcgactcacgtagtcttcctttaaaaccaagtctatgccagccgggtgtgaggggagtggtgggggtgagcagggggaggagagagattcgaaaagtacaggaggaatcagtccagtacaggggttgcccctgccaacaagtagctattcctgttaactcccaagaagcaagtttccacctttgccacttcctcctgccctttcctttccttttcccttcactcccgctcttggacccaaggttcgctccccaccgccaccgccctgccccactattctctttacaggacagaaggctgcagcagcacggcggagaaaaatctctgaggaatgagtcagtgggatgggcgtatgggtggagggagagggcagtcgatttttaaacctcagcgagggtgggtgggcagttggaagccagaggccttatcactggggcgctgcaacatcacagaaagtgttagtcccagggctctccctggcgcgcgcggctcctgtgcttgcttcttattggcggacctggccctgggggcggagccgcggtgaagcaccgctcatccgggctccaggaccggggcacgcggttctccctgatcccggagctgggctcagggctcggactcagtcctgcagcgcctctaggctgcggatccgcgcttcaaccacctgctttgcgctgcgtccggggaagtggggaggagacgggagggagggaggaggcggggagaggaggaaagaggcagcttacacacgccttccagtccctctactcagagcagcccggagaccgctgccgccgctgccgctgctaccaccgctgccacctgaggagacccgccgcccccccgtcgccgcctcctgcgagtccttcttagcacctggcgtttcatgcacattgccactgccattattattatcattccaatacaaggaaaataaaagaagataccagcgaaaagaaccgcttacacctttccgaattactcaagtgtctcctggaaacagagggtcgttgtccccggaggagcagccgaagggcccgtgggctggtgttgaccgggagggaggaggagttgggggcattgcgtggtggaaagttgcgtgcggcagagaaccgaaggtgcagcgccacagcccaggggacggtgtgtctgggagaagacgctgcccctgcgtcgggacccgccagcgcgcgggcaccgcggggcccgggacgacgccccctcctgcggcgtggactccgtcagtggcccaccaagaaggaggaggaatatggaatccaagggggccagttcctgccgtctgctcttctgcctcttgatctccgccaccgtcttcaggccaggtgagcaagggcctgggagcagccccagacaga

SEQ ID NO: 30119 - DNA, 2300 bp, Homo sapien
gcctaaactcatagattaaaggttttgacctgtaaagaacctaaaaattaattaactacttgactaaggtcacattgttggccaatccagaactaaaactcatgtcaattgatcattcagcatatataacagctttcaacaaatattaatggagtgctcagtatgtactacacattgtgcttgaggatatggaaataaactaattactatacattcaagatcctatcactcaaagatgttatgttctctcagggaaacagatatcaattaattaactatataactatttgctagaaattttggtaaatgtcacaagaacaatgaacagcattttacaacaaaggggccagatctagtctgggatttaagagaaactcagaaaacgtctagcaggaagtgatatctgagctacgtgctgaggaataatctagcaaaggatgtaggctgaggaaataacatgactgaggatgctaaggtggtaagaaacatggtttctaactcctggaggtgaaaatgtgcctatcccttttcatgaaaactaaagaagttttgaaggttgaggcaaaaaccaaggattccttgaagttgttcaaatactttcctgcaatctccctaattgacttgccagttgtgggatctacaaaaggatgtctttgtcttattgaaatattcacatattagtaaatatttgtatgtatacctccctacttaaaaaataaagtggaaacataccatatacatcattttgtacctttcctttttcatttaacagtacattttggagattaaaaaattgtctcatagcagcacctatagctctacctcatttttaaaaagtgtgcattggattttactgtactatcatcattaatgtaaccatttcacaagttcctggaagtttaggttgtttccaatctttcgttattacaaactagagcagtgaacatcctaatcatgttattgtccatataagcaattggtggcagttgttggtaaaatgtcttggaagtgaagttactgagtcaacgatgtgtttttcatttagaaagaaattgtaaaattactgctcaaagagtacacatctttaaaaaaatcccaacaaaagtaagataatgcctttcttaaactctcttcataaatctgtactattacattcctctttttaaccagtatcataagttggttttcatttatttaaagcttattggaaaagttagaattataggagtagtaggcatatacactcacatacaaggcaaaacctatattggtgcctaactttattatacatgagattgggccagaaatgggaaaagacaggtatttaccatgaatttttattattgttctttctacataagattgctaacttttagaacataaactgtataattataagccataacctcttccattttgtaaaattaatactctgtacaatcaggattaagagacagccacatttgagccataagtgaatttaatactgcttttcaacacaaagaaatggtttccaaatatttgtattagttcgttgtaggtacagtatacattttatgggtggtctgactaatgccactttgtaaaccctgtataatagtcattactaaacaaacttcagttatttttaagtaaatcatatttcgaacaattattccaacaagtttaagccttaagtaaatcatcttttgaacaattcttccaacaaagcttgtcagaattttgtataaactgataaaaagtacaatattttacaaatttttttaaaaatcagtgccactaaatatttttcacctgtaattttttaacccattaaggaaagtaggaataaaatctattttagtcacttttacatagaaaatagcaggatatatatatatagttttgaaaaattatatgccgaaagtaatatttttaaacaaatgataaatattcataatggaggtaatgtttgtatgcacatactgtaatttaatgagtaaagcagtttctgcctggtatttagtttagatgttcaaatctggggcacttatactttattctgcaagcattttccctacctggtgataggtacaacactttctaagaagaatgtttatggtgattttaaggtataggttttatatttttgcagagatggtcatggatctaagtatgaataacagttttgatatcagatctaagagtaaaatgtaatttatatttggatttactccattacataaatcccctgttccacccagcctcaatggatactggctagttctcaaatagttttttttttttttttgagaaatgct

SEQ ID NO: 30120 - DNA, 2300 bp, Homo sapien
tttaaaatgtagagttatgggatttttttttttcaggaattctgattcagtaggccaaatagggctcagaaatctgaattttaaacaagtatctttgtgattctggttcatgtaaattaatgtcttcagttaatgagctggaagttactgataagtaagaagtgctcatggtaatcaattagagacaatatatcctatataggacattagcccctgtttcactatcaaatccatattcactatttataaagcattcagaaagcattatttatattttattcaaaggaattacaagcactgaaaataatatttaagataataaatatttgaaggggtagacctatagattccccaaatccagattgtataacgaaatctatttttattctgttgcttattcttctgtattgagtaaatgaattgtttttgctgtgaatcaaatcacagaagtcccgtttttcttacatatgtacttaaaatctttctctgcttaactttagagcaaccatctaaacctgaaattgtaagcaaagcactgtttctcgaaacagagcagctaaaaaaggtaagaattgtttttgattaatacctttatttagccagtgttgtaagtgccttcttctgaccttacattccaagacaagtaagaaaggctttgctcttgtggagatgacagtgttgcagctaccaatcagaaattatctacaaggcacagagggtacaacatgctcacagtctcaggtaaccatgaggacatcaaggaaggtggggtcatttctgaaaagaggagtctttctcatttgaattaatggattgtttaatagaaggatgaagccagttagcatgattcatgcctgtaagcccaacagtttgggaggttaaggtgggaggatcacttgagcccaggaatgtacagcatggcaagaccttgtttataaaaaatatttaaaagttagctgggcatagcggtacatgcctgtggtcccagctgcttggtaggctgatgcttggtaaggaggactgcttgagcctaggaggtcaaagctgcagtgagccatgtttgcaccattgcattccattgtggacgacagagccagaccctgtgtagaaaaaatatatagagagaatgatgaaagatgaatagattttcaccaagccaaaggtagaaatggctttccaacaatatgaaataataggatgtgaaagagaacggtgtgtttgggaaacagcaaattttggcattgatgaaactgggtgccaagacagaaaacaagaaaggatagaaagagatgaatctggagaggcaaagaaaagttggatcatgacaaatcttacatactaaatagggagtttggactttattctgttggcaaattatgctactgaaagattgaagtaaagaggtgagatcagattcgaacaacacattagcagatatgtgaagggaagctgtattaaagtgggggacaaagttggagttccatattgaataataatgtaactaaaataccaaagttttcctttgttgggagatggaaacccaagtcctacattctttgtgtcatattaaattttactgcataaaattatttgatgaataccaaatattaaagttaaaatacatttaaagaaagtgaggggaattatagagcatgataatgtatatcctcttgaaatatatgtagtatgaaactggagacacagccccattttaacaccaaattattcttccgtatgaagatctatgattcatggtaatagtcagtgttaatagagtaatgttatttggttaatgttaaaaatgaatagtgtcaaaatgaatttggcaatgctttcaaatgaatgtgattttataatagtgacaccatctattgcacatttaaaaatcgtcaaaagtatattttcaaataaattgttaaaaaggtcttaaaaagacattgtttttataccagagagcatgtattcagtctttggtcagtgttggaaaataaacgggtcaagaaacccttggaataactctgcattgcctgagtttctggagtttccaaattgacagcccctgattgaaccaaggtaataacattgcctttttattttgcagttgggtgactgcatttcagaagacagttatccagatggcaatatcacatggtacaggaatggaaaagtgctacatccccttgaaggaggtgggtgtgagggcaggaggacagggagtacattcagaggacctgttctgactttctttgttctaggtattctttaaaccagtggtctccaacctttttggcaccaggaac

SEQ ID NO: 30121 - DNA, 2300 bp, Homo sapien
tagaattcagagtgctttaagcaaatgtcagtcttgcttagaggtatagtacaaacttcctaataagtcctttgcactcaacagtaccattaataaggtttcctctagacatcatccactacaatcccactgagtataaagagactttagaaattgtcttgagtacatagttctaactctttcatttgactcataatactttaaaaacatgtgggatatgagctaaatttttgagagagatacagggaggtacattggggaataaagcaaccagatggttgcttctgattgtctgatgttgggagtgctcccttgagagccctgtaaaaatagtggactgttatgttcacagctgggccatttctccatttactccttgcttatgttgcttgggtttgaatgtgtctcccatcaggggctagttacagagaaagcagtagcttccagtataacaatattatccagtcctgttccatgaaaataaaataatgaagaaagagaatatagccagcagatagaaccatatgtggaatagctagctctctattatcattgctcatgatgtctttgggccaataatcaataatctagtgccttagagatggtgtgatgtgcttatttttaagagatgcaaggtacacaggtctctaaaagaaaagggctcttatttactttacttgtagataaggcaggggaggatagatggcagactgacaaagcaaaagacttggttgcagccatatagtgcctacgtgtttggctgtgatgggggaaaattaaacaaaagtgtgtaaaagtttaactggattttagtgcatttaattagatttaaatgcatcttggttttgacaggtagactctaacactgggttttaactctgttgctgactctgttcctcctcaaaagctgaaaaaaagtatttcaagtaaatcaacatctgattctaaattatatggaaacataaaaatcctatttttacccacttatctttgattgcttgcttattttccaaaaacaagatttgtttccttttcaaacatgtctaaaggaagtgtgggtagagaagcgccaacccattcttgcacatgtttgcagaatagactgctcatcaagtctcacagcctacaaattcctagttgctgatgaaagtcactgtttccctgccaatatatgcacacatagagtcttcatcagagctttcaaagtccatcattgtcctgtaaaattgtttatctcctctctggaaaattagctatccagctaacaaaaacttctaactcatccagaataaaattttcatctaaatacaattcacccaaatgttccaaggaaactccacttttctacatgttggtacatggtttcatattaatgagaaattgagaaagcatgctccttcccttcattcattcaatagtaatgtttgagagtctaccatgtctcagccactgtggatatatcagtgacaaaccaagtcacaatcactaccctcatggtgctttcagtctgataggagagacaaactttaaaaatgatgttgcagtcaacaagttgcaattatgacattttaaaccaaggagaaacttggagtgtaatggcaagtcttcatactgtagaacaaagacacaactcctagtgtggcaagcatggtcctcttcagtctggtctcaatgaattgtatgagtttaacttccatgagttgtcaccacttatacccaattactcaccattacaaaatctgccaagctttctcatctcttcgcctttgcttatgtgaccaaagttttccttacatcttcccctatcaaagtccttctcaaccatcagaggccacgaacatatagtgttccctttacaaagcctttattactgctttgaaacccagtttggctctgttctctatacttccattaagtcttcatttgtacctctgtttctagcctgcctttcatctttcaacaaatatttagtgaactccaaatcagtgtcaggtttgctactaggtgctgattttatgggctgtgtgttatagtcagcatagtacctctacctcattgacttataaggtcattatttatctctgcatctctcatcagtgcttgggacttagtagctgtacaataaatacttgttcagttgagttggaattttctcatacagatcagactatgacagtaagatttttataaagattgttttccatcaactggatgagaaatggaatagcactttttaaaaatatctgctgctatagtaaattctctctgaagaaacacaactactatctcatggtttttca

SEQ ID NO: 30122 - DNA, 2300 bp, Homo sapien
atttcctcatttcttttttaagtagcaaaccatttcctcccagtcttcccttagttttttataatctctcaaataagtactaaattttcagttttgcagtgctgtactataaatcacaggcagtagtactttgctttttacaacagattagtctctgtatgtgtatccatttatttctcaaacacttatataagtgataaattggctgtgatcatttcagtttgttttaatcctgtggatataatatttttctttagtttttgaagaatttattttagaaaagctttattactttacaaagttttcttatcaggggacaattggtaattattatactctgtgtagcaattgtgttatatctaatctctttccctttaaagcctgaatgcttccaactttataatttgctttagagagcccagtttaccctatggctgacaaatagcaaacttaggatatgatgcaagatagaacatgataatgattcaaaacagaaccataagcaggtatttttgctatttataataatattttgagtgtatctagtaccttttaaataatatagtttaatggaagaatatagtacagtggtatattttatagtctatgtatggctctgaagtgtatccagagtttactttttaaccttaaataaatagatgattagaaatagcattaagtgtatttgacaaacctataaatttcccgtaaagaaataagcaagtgtatgtattgtaaaagacagtctttcctctgacttaatgttgtatcaggggcatttagagtctacaagaacctaaagtaaattttatgaaatatctagtgcaaaatctttgggaaatttcaaaatttatgctgaaatcaccatatttgtttcctttggtttctctaacaaaccaaaagatcaacattgtctcatgcgatttatcttctcattccttcctaaaaatatttctggaaaattaatggagctggaccaccaattcttcaaatattgaaaactcaaaatctaagagttattttaatcttgaaattaatgaaaacaagttaaagagccttgtctaagtcaaaaagtcctcagcaaagctggtgataattattatactccaaaaaaggtgaaaagataatggcttcaaatcctgccttacattatccagtcaaaaactaatataaaaatagtcaatatttaagcctatgttttcatcgtaagtaatcaaatacttacatattattaatgtctaagggagtggaagttaaaacaatgaaattcaatcgggtcttctttaatatttacaatttttgctttacattagcaattcaggtttcactgattttaaaattgtgaacaatctgaatttgtgtggatttatttgtggtagttaaaagtaaatattaagtgcaagctatttgccaagagtgttctaggtgctatgtttgatttaggaggtataattcaaacatgagaagtaggaaaagatccctcagatccctgtcctcagaagaattgacggtactttcagagatatcgacaacataaaagtactatgagaggaaagcagcggtgcctgaggtgggagtgatagctagataaattattagtgaaccaaggttttcagatgtaatgtttgtctactcaaaaagggaatcaattctctaagaatttaaacccatataatactatgaatgttaaaccagttgggtttatggtattaatgatttaatacagcaacactgacaaaatctctttttctccctttagttccagttagtaaatatcatattttttactatttcagatgccccgtctctgactgccaaggtggtaaattatcacattttactgtatattcaaatgttaattactaaatggcataattttaacaattaaatttactattttgtgagccaactaacaacaatgatgttaagcataggatgcccaatataataataagcaccttgtatgtacagaagattttacatgcacaaattcatttaatccacacaaatccgaagtttcaggtctgttttacaaattttgtatgcccaatgcttagagagatcaagtaatttgataatactcttatagggaggatccaaacccatggttttatgtatatttgtttgtttgttttttgcttttactttagaacagtttctatacattgtacaggttggattgggacagaaaataaaatttagaagctgtttttattgtcaacaatcttataattaaatatatctgcaaaatataaatataaaacaagtagtctttattatctggaaataaatgtgaagag

SEQ ID NO: 30123 - DNA, 2300 bp, Homo sapien
agtttctgctttgatatactctattaaaatttgggggataattgataaatcttccaggtggtttatggatggccagggaggaaatttgccattgttttaattatttaattttatttgcctctgtttttacacttggtaaaaatttggaagtgtttcagatagtgaagaaaaaaaagaattaagaaaaacattccaggccaggtacaggctcatgcctgtaatcccagcactttgggaggctgaggcaggcatatttcttgagctcaggaatttgacaccagcctggccaacatggtgaaactccagctctacaaaaatacaaaaattagccgggtgttggtggctcgcgcctgtagtctcagctacttgggaggccaaggcaagagaatggcttgtgcccgggaggcagaggttgcagtgagtcaagattgaaccactccactccagcctgggtgacagaacaagacgctctctcaaaaaaaaaaaaaaaaaaatccatacttcctcctcctaatcattgataggtatccttcctttttttttgttgtttttttgtttagttttgttttgttttttgcctacgagtatgtaagttcacatttatgtaaaatttatttctcatagtatatgctatttataaccattttccagttaatatgtcatgagcaatgtatatagttgttaaatatttgtacacaatataatttttattgatgtatatttcctcatttcttttttaagtagcaaaccatttcctcccagtcttcccttagttttttataatctctcaaataagtactaaattttcagttttgcagtgctgtactataaatcacaggcagtagtactttgctttttacaacagattagtctctgtatgtgtatccatttatttctcaaacacttatataagtgataaattggctgtgatcatttcagtttgttttaatcctgtggatataatatttttctttagtttttgaagaatttattttagaaaagctttattactttacaaagttttcttatcaggggacaattggtaattattatactctgtgtagcaattgtgttatatctaatctctttccctttaaagcctgaatgcttccaactttataatttgctttagagagcccagtttaccctatggctgacaaatagcaaacttaggatatgatgcaagatagaacatgataatgattcaaaacagaaccataagcaggtatttttgctatttataataatattttgagtgtatctagtaccttttaaataatatagtttaatggaagaatatagtacagtggtatattttatagtctatgtatggctctgaagtgtatccagagtttactttttaaccttaaataaatagatgattagaaatagcattaagtgtatttgacaaacctataaatttcccgtaaagaaataagcaagtgtatgtattgtaaaagacagtctttcctctgacttaatgttgtatcaggggcatttagagtctacaagaacctaaagtaaattttatgaaatatctagtgcaaaatctttgggaaatttcaaaatttatgctgaaatcaccatatttgtttcctttggtttctctaacaaaccaaaagatcaacattgtctcatgcgatttatcttctcattccttcctaaaaatatttctggaaaattaatggagctggaccaccaattcttcaaatattgaaaactcaaaatctaagagttattttaatcttgaaattaatgaaaacaagttaaagagccttgtctaagtcaaaaagtcctcagcaaagctggtgataattattatactccaaaaaaggtgaaaagataatggcttcaaatcctgccttacattatccagtcaaaaactaatataaaaatagtcaatatttaagcctatgttttcatcgtaagtaatcaaatacttacatattattaatgtctaagggagtggaagttaaaacaatgaaattcaatcgggtcttctttaatatttacaatttttgctttacattagcaattcaggtttcactgattttaaaattgtgaacaatctgaatttgtgtggatttatttgtggtagttaaaagtaaatattaagtgcaagctatttgccaagagtgttctaggtgctatgtttgatttaggaggtataattcaaacatgagaagtaggaaaagatccctcagatccctgtcctcagaagaattgacggtactttcagagatatcgacaacataaaagtactatgagaggaaagcagcggtgcctgaggtgggagtgat

SEQ ID NO: 30124 - DNA, 2300 bp, Homo sapien
cacatagaatagggctcaagtactgctggtggccctacattccagcatctctccatgactgactgagggataggggagatggcaattacttcagtcatctgtgccatctttacttagtgtgccatttccttttgaggtcaagtcaatcaactgaaaacattttataagtacagtgttcccttcttttccaatgaaaaactaaaaaatgttttaatgtgtttcttcaggcatctcactgaggtaggaaatgcagcacttggaaagagaagcacattttcattttaagcagatgtctgtcttaataagtgaccctggttagaattatcaacattctgctgaattattacccagaattgttaatagtctacagcgcaggactttatttttttaaaagcaagaacctaaacactccttgctattgctggtgtttagataagacatctgttgataaaatcatatcattgagaagacaaagaaataacgaggagctaattttatgtatcagaagaaccaagtagctagtgatgtatttgagaacaaaagatattccttctcatcaaatataagttgttacaattttcggttctttggctcttacaaatgtgcagtaatttttaaaaactaaagtaggatgagctttttttggtctctttgggagtcttattttttttcattgctggataagtgaggagtataattttaatacgttaaattttaattgttacatcatattggatgtgattttttgtggcagagctcccaaatcttgaaaataaatttgaattataaccatcattaccatttttctattgttacagaaaagtaataaacgttgataatccctaaatgtaattggagtgaattctttatctaatttgttcttgaaagctgatggatgaagtatcttcttttgtgctctccaaagagctctttaagcttaacactttctttccctgtgtgtatttttccccctttggaacatcaggagaagtgaattgtcaatatgtagaaaaagtgacccagtaaatgagtaattcaatttaatttcagtaaaaatccatcattattatgaagattcaatacatgataactatttttaaatgaactatatctggccccttaaagagaagtggccaccagagagaatagaaatgaatttcagatgaagcattcttgcattatctattcaaatatccgtctcttccattacatacgcacttttactttgctctaaaaattcagagtaaatcagagaaaagtaaaatgtaaactctgatttctatagctctttgtcagttgattgttatagagctatatgctgaaggcaaaatatgctccttatcttctcttcctgctgctatcttcccatggctcaattttaaccattgtgttcatagtatgattccgaagaattaataccaataatttggctgggttcggtggctcatgcctgttatcccagcactttgggagggtgaggtaggcagatcacttgcggccaggagtttgagaccagcctgggcaacatggcaaaaccctactaaaaaataaaaaaaattggctgggcgtggtggtgcacgcttgtaatcccagctacttgggaggctaaggcatgggaattgcttgaacctggtaggcggaggttgcggtgagccaagatcatgccactgcactccagcctttgcaacacacagatacacacacaacaaaacaaaaaaagccccaacaactcaagcatacttttctggtaagtagtaccctttacaaacacattaaaaactgtacttgtcgtgtacccaaggcctttgctaaagtcattttctgtagtgtcagagggccagaattttgttcttggcagtggtgaaatagtaccacaggctctagttctttgaatgttcctgtcagaattgtaatggaattattgaaagttcaataatttttcttcttttatgtgctgtagcttatttttattacaaggaaattttaagttacagaagcaaaaatatgatattaaatactatcaacaaataataaagtcattgagactgctatatgtttttgccttggcacatacatctttttttacttcaaaaacttgaccaggttctattgaattcttccacagagataagttaattttacatagtgtttaggatatcaacaatttttgtggcccttgtaattcttggttatagtttaaaaaaagagagactgtgttacttgagatatttacttctacattttaaaataagggatgagtatcttgatgttattactggtaattttgagaaaagaaaaat

SEQ ID NO: 30125 - DNA, 2300 bp, Homo sapien
aaaaaccatagtaattctactaaccagaggttactattgataatgcctttttgtgtatatcctgtatttgttttcctatttacaacacatcatctataatgtggtatttatagccttttaatttaatagaactaagattgtactgagcatagtatcgattaccctgcctttttcactctacactttcattttacccactttcccccccccgatcctctcacacagtgttatgtgtgagaatagatttccagactcactgcaatgtctcccatccttcaaagggccccactggcaaccagtctgtgttggctttcaaacggagaaggcatatctggggcacttgatatgcacttgcactaccactggttcccagttttctatgaggtatctatatcagatcatggctaaaatgagtgggaattgcttggcaaatttgtgtttgtttttatctttatatttgcacatactgaataaagataattttaatcctggggaagaggtagaaaaaatctcatgattttagttttctctgttagtattgcacgacataagcaccagagagatgacttttttcctcctttggttcatttgtattttacttgtcctattccaaaagaacagtattgaaatgagacacaggtatcaataaggaaaatttccagagccagaagaaggaaggaactgtcagggaacaattagtgtgacgggaaactatgttatgcttcctcagaaagtatgacaaatatgttacatttacttgagtttctggaaactgcacatgagggatatagcattaatttcctttgtcttgttggtattctgttttaccattcatgaagaaagaaaaaaaatgagagaaaataaaaggtctcagaactcacagagtaaagatatttttctaattgaaagtcaaacttcagagttgtaattctctgttaaagtgggttttggttaaaaattattttctgtaaactaattttataggctattcctatctgtctgttcattagcacagttttggggtcagcaaattattccttatagtttaaaaatattttttataatctttgaaattaacaaacttttatttgatagctattttaagaagttgttacaggtgtaagactttttcttctctaacaaagatgtgcgctgatagagctgaaacacaatatctatgtaaaataaccatggtgcccttcaaggaaacctttgtgccctggcagataaagtgttgtggcatgtcacatatgggaaggggtagggaaaagattccatgtgggtattttgacgtaaagctggtgcatttgagaattcaacaggctgagacatagaaacattgtatcagagtagggtgaacgaatggcttaactcacggaaagcagaccatttggatagcttggggagaaaacagaagtagtgtgagaaatggtggaaaggacactagaaatacttgaggagtttctaactatattctattgagtaaaaacaagacaaaagccatccttgatttgtcaaaagtgataaaaatggtgtaacaagtagaaataggattttcctgctgggtttggggtagaacttggaaaaaaaactgatcaattatgtctttttgagccatgtgtttaaaattaaggtggaggatcagaagcaataaatatggattaattgactccattcagattgccacttcactgttttatgatagactactgggaatagcaaataataagaaacttaatgtagatttgtttaaaaaatttgttactactgttgtttcaatgtcaagtttattttgcttgttgatgaaactggtcttttatcacataactctaggtcataaaagtatagtttgaatttccaacatttctaatgtttctttttcttttgaaaaataatcaaagaaaaagttctgctatgttctggttacttctgtatgaatctcatagcaatcatgattttccattgtgtttacagaactttcattgtgttttatcgtaaaggaatgaaagaatggattattttttcttttttgtctcaatggagtggtctacattttaaaggtttattttacaaaaggatacttgttacatattaggtttcatcaaaagaagttcaatactaaagataaagagttttccttattgaaatatatattgttaagcttttaaaccaaatgaaagtatgagtggtcatatttatactgtagtaggttttcataatagattttccggattaaaaccatttgttgaaatcatcaaagagatgttaatcctgctttagcattaatgcaaagttaaaat

SEQ ID NO: 30126 - DNA, 2300 bp, Homo sapien
taacaatatgctgtaatacaagttatataaatgtggtatttttctctctctcaaaatatctttttgtactatactcacctattttcaaaccctggttgtccacaggtaactagaaccaaggaaagtgagatggcaaataagtggtaagggatgctaccgtatctcacatacatatatttcaaaatacgtcaaaccatacacctcaaaacttgtaatttatatcaacatgatatgcttgataccataggcaatgccattttctcattaactcatctctttcagttgcaaaacaccatataaaaggaatggcacatgctataacatgtattttgggtattttacatttatccagatatgaatataagtaatatacttagttataatgttcccttaagccactgttttgctacatgcttctacacattaattcttttaaaatttattttaaaggtaacacagtttttttcttttacagtctccccttagtaaatgtagctactacgactatgagtaaaagagatatggatgggtggaggagatatggagaggccagcacttttgtagataaatgcaatgtgaaaacaaggaactactctttaattactggcacagaaataatgacaaggaaacaaaattacttcctgaatcacactttatcacctgactggttgcaaaggcacattttttttctgttttcgtcaaattaaaatcttaaccatgtaaattcaaggctgtaaaggaaaactcaggatccttcatagtaataattacagtattaaaattcttagttgctagaaagtggttagaaccattgagaaacattttatcaggttacgtggttagagcaagatttgaaaaaacaaaatcaaaaacaaaaaacccaatgtaaaatatcagaacatctgagatgtccaagctgaaaagtgtaataaacgctatcaactgtagtggaaagaaagttccaaagtatgaagtccagagcaattgttggtagcatgagtggtgggattgaagtaaactgaaataaatggaaggcatttgtttaacctatgatattgctgaaagacaagtcccagcacagtagctttctcctttaaagactagccagatgtcggcctttttaagagcacaaagaagggagccacagaaagaggtaacaatgctggtagagaatggcagctacagtaaggttgtttttaaatggatagaaatctatgtaaaggtgactccgacaaaacacagtagctgtctcctcctcagtcatttaggcagaaacttgcactaagtaaaaaggtgcaaggtatttatcagcaattcccattatctggtacttttattgctttggcatgattagcagagactgtttggccagcgttgtcaactatttgctttttcatcagcctgatgtttggtctgcaatccctctaaaactaacagcaaaagagaaactcggaaacttgggaagtttcagttggcattcagatgtcaccccagcctactctctgtgagatttattctgcattttagaagctcagtggctgttgctctttttgatagccaacaagaagcaacgtcatagacctgtttggctgctgtcctgggtagaagggtttggcagccctagggagatgaatttctccagcgttggacccgcccagagcggagaagcaacacccttccagccactactctgttgctatgaaacaaaagactaggaaggtaagcgaagcaggaagtcccgcctttcagccccagatggctttggctcccggtcccgacgctcacgcccacctgccaccccttattggttagctccttcgtgccttgcatcccttcgtccatttcctttcccgtttccactttcgttcccgggagagtccaggcccctcatttctctccgagtccaattcctttctgacgtgctgcgagcgggccttcctctggggccattgtgtactgtggaggacgtggacggggcggcagcgcgaggaggacgggcgcctcccgtccattggctgcacccgctgtcgggcagtgcgcggttgcgcggcattggctcagcggcgcccggccccgcccccgccccgccccgccccgagcctgggtcctgtgtgtgccacaggggtggggtgtccagcgagcggtctcctcctcctgctagtgctgctgcggcgtcccgcggcctccccgagtcgggcgggaggggagagcgggtgtggatttgtcttgacggtaattgttgcgtttccacgtctcggaggcctgcgcgctgggttgctccttcttcgggagcgagctgt

SEQ ID NO: 30127 - DNA, 2300 bp, Homo sapien
tcataattattactaacatattcctaacatataggaatcttatactattttggaacaaatactaacaacacatttatatgatataacccaaagaaagttaaacatcattttatatttgatgatgtatcctatatggttttaatattccaaataaaccaaatatgtctcttctggacttcagggaacctaatacttaaatgacgaatgaggtcaaaaaaggactgaatttagaatttaattttggaaatttgtcatatatcaaaggtttaaaatacttgatatcacaatacagaatccaaagtcaatgtaagttaaattattagccaaaatgatactttaaaacttttcaaaggtttttaaagcaaaaacctttactcatagataaaggacagacagctttcccaacaagacccagtaaagacagcaggaggccaactgaatttgtctcatctctcttctctctcccctctttttcttgtgatttattcaaaaggcaaacaaaaatctttcattatcttttaatattatatgaaaatattgttaaaaagagaaagacaaatttcacctttgcattaactcaattcctaataaaactttgtaaacaaatatatccaatcttaatcagtatccaatccaatcaatatggcaatatttccataaatcttttataatactttacaattttctgttaaagagcagattaatgctctaagaaaaccctgttactgagacccatgagctcagattctggtcctgcatcagtgtgcttttattttgatgttcaatttatggaaaaactaaataatatctttttaattttatccaacttgttccacatagaatttttttaaacaacattactctttcccaagccttttacaacttgcttaaaccttcagttttatcctatattttttaaatatttgaaacaatccttaatttctctaaatgagacaaaattatttttaaaaacaacatgttcctatacctttttattaataacacataactcttattttaaatgtaagcagttttaattgtgtatcatgtgtgaagcctatgacacaggacagaactgcagatagtgtcagactctttccatcactggtagggagcatggctactccactgtccccaggcattacctagaatctaatggctccaaagcagccaagttgaacaattattaaaagtcatagagcagtgttctaaccttagagcatctagcaaaaaaattatacctgacctgcctcattcagacaaaaatgtgtaaattttggagacattttagttttaccaaaaatctttaaaactgtctttatttttcaaagattattagagtgacatgaacaaaaaggcatttaggtttttattttcctgacaaaatattttatttaagcccttattatttttaagccaattaattagagctttttcatatattttgatagtgaaacatcacacacatgacacattcaagtacacaaaccgatgcagatttggtagagtgataagatttgttatttgactgtttttaagtttctctttcttatgttagaccatcagtctcttgattacctgttccaggccctaacaattgtcaggcatgcagttccaaatttgcgtctttaaaaggataattctgaagtgaagcaaaatagaaaattcatattttatttacaccaaggaaaaatggtatgggtaaaatttcagtcaagatggccaggaaaaccagacagtcttacacatggagatttccttaaagatgtaagtttcttgactaggttattggctttaggatggagtcttttcgggaaaagggtcaggaaagcccacagtttctacggcctaattatcaggtatagctggaaggcaaaacagatctgcaagataaacatctaatttttacagcaaaccctggggccccccaaaagggaaatgctatggaagaagatagtgcaatgctttcacagtgtatcttattgaaaggacatttcctctaggctgctgggcaacccaacagcaatcaggccactctttaattagctcatactctattctttttttttgttttttgttttgttttttgttttttttttgtttgtttgttttccaagttcctttttatttaaatgaatcagaactgcaatctgcacatgaaaagacctggggggaatgcctacatctggaatttcattacgtcaatgttaaattttgtccgaccagttcttcattgctgatcacttttgataatgacagatccaacatgaaactcctgaagcaaatgaatatttaccttg

SEQ ID NO: 30128 - DNA, 2300 bp, Homo sapien
taggggaaaaaagatgcaatataaaatcaaataagtaaaaactctataaccttctattagaattggaatatcaacacaaatttattatttattttcatctttctttgaaaaactacatctctcctagatcttgtgttgaaaagtctgggaagtgataagccatttaaccatgaacatctttcagtgcagactgtagcatccaaatacctttttcactggaagcaacaaggacacctttgagaaatggctgattctaggtctgaggcagtaaatgtacaatatgagactggaactcttacagtgtcagaaagcaagtaagctatcaagacattcgagcttgtgtcaaataaacaaaggagccaaaaatggccaaagacgggcaatttgaacttcaaaatggataatcactgcaattatataaaagtgtaaaaagagatacagatacaatcaacatgaaactcctagaagcaacaggagattcaatatggtagcaagatacaaaattagacatagaaatcagtaccttcatttatgtaagaatctagctgttataaggaaaagtggaagagataatcccacttacgataccaacaaaaaagagaaatactctaagaataaacttaacaagtgaaaaacctttatgatgcttccttgaaagacacaaagctgaaacttgagcacgagaaaaaataaaccttgcttttcaaaaggaaaatgcaacatcataaactgaaaaggtatgcagaagattttttttttgaaagtacttttatggggctatattctatagttaacatgaaaaaataacccagcattaaaaaaacacttaagaaaacagcaatgatgcagtctagccctaccagatactgaaatatagtctctaataaaaacagtatattagcccataagtagacaataagatcaatgcggggaaaaaagaaaatatatcttagacccaattacaatgtggaaatttacgtatgtgataaaaatattgcaaatcgctggtcagggaggtgctttataaattaaatgttatgacagctaaaaagtcatttgaaaatagataaaattggatacatcacctaggtagaattcctgcatatatgtttgtgtgtacatatctattactcgtgaatcttataatgaggaaccaatctgacatctccaaattgaaggatattctggaagaccaccgggctagacttttcaaaaatgtcaataccaggagaaacaaacaaaaaaggctagggaactgctctatattgaaggaagcgaaagagacttgacaactgcaatatgtggttcttattgatgcactatgtgattcttgttaaatctcggatttacattttacaaactacagggtaaagaaggacattttgggacaattgaggaaattcaaatatgaaatatagattattgtaatataacaatgttacatttcctaagtatgatgatgtgcattgtgatcctgtggtcctcaattgaggcaactttgtacctctcctttttcccccaaccctcaccactacccctccccccctcaacccccccaaccacaccgtttgggtttggcagtgtctggaggcatcgttggctgtcacaactgggggagggggttgctactggcatctaatgggtagaggccaaggatgctgctaaatagtgattgtttagcacaggacacccccaccccaccccgtcaccccaccttacgggtacagacagcaaaaactcatcctgcccaaaatgtccatagcgcggggttgagaaaccctgatgtagaaaaatcccttattcttaggggatacatactgagatattaggctgaatcacatgacattgtctcttgcgtaggtcaagtatcggcaatatttaaggacgaaaggttatgacgttcacaacaaactctcaaaataatgaacaagccccttccgccccggctgccccgcgacctaggggacccgagaagggcgcactcgcacgggccgcggaggccaacgccgagcctgcgcggcgggaggcgctgagaactcactgcgcacgcgccggtcggctggccgcacccacgcggcgcagctcccaaagttgcagacagcccggcgaaccgcgcaatgcgcttcttctgcctgcagcagagaaaaggaaagaaaactccgcaggggctccgttggcttctccacgagtgacaaccatgttttcccagatagaagaccggagccctgctcctttgcgatccgccgagggctgcagagagcatcctcatccatttgggcacccctgcccaggaagagccc

SEQ ID NO: 30129 - DNA, 2300 bp, Homo sapien
catacaatgctggcaggtctataaatttgaaaaactgcttggcactgtaattatagctggttatgagcataccttagatatgtatcgcaatagaaatgtgtatctatgtgaaccgattcacagaataacgttcacggaagtattatctgtaatagctccaaacctggaaagaactcgaatgtccagtatcagcataagggaccagtcacaaaagacctcatatcatatggttcaatttttgtgagatgtccagaatagggaaatctatagagcagaaaaattagtggttgcttggggctagaaaggatagggaagtggggttgcgggagtgatagttaaagggtatgaagtttccaggtgatgaaaattttctaaaattgactgtggtgatggttgcacatatctgcgaatatgctgaaagcaatgaattgtacacattgaattgcacactttaagtagatgaactgtatggtgtgtgaattatatctcaataaatctgtaattaagaaaaaataacagtagaaagaataaattgtgtatactcatataactgaatttcatacagcatagaataaaattgtaaaaaagacttgttacatgcaacgacacggatgaattcaaatataatataaagggaaataaaccaaatactataaaatatttaccaagtaattcatttcatgtgaaatgtcagaatagacaaaactaacagggggatgaagaatgctactattagttaatttcttgagctgagttgtggttgcccggacatgtttgtgttaatctttgaaagtttactgaactgtatttgtaatttgtacacttttttgtatgctgtacttcaacacgttttattaaaaatatttctaaaaatccaaatgttcagtaagttgtcctataatatgcattaaaaaagaattaaaaaatacacaagcatttcaaaagttattttttgtgggttagggttatggagaatttcttttctgctctatacgtctcagaattttccaaatgaccatagtagacatatattacatttatcactagaaaaaaatactattaaaatacaattgtctgagataatcttgtactacttttacactaaactaatttagttcaaatgtggggacttcagcttttgctcccagatgaaaagagcttgtcattttggagcaaaggagggcgtggcagttggtcggagtgtttcctggtggcctaggagactgccagaaactcaccaagggccaccggcctagggggaggagcagaggtgcaggtgcagggagggattcaagagactgtgaactaaacctgggtgggtcccagtcctcacaaaacctgggtcctaactgcaaaactatggtcgggcctgggaaggggcggaggactcactggcgctctagcctctgtgctgggtgaattagtgattaggctctaatcttcacagtcctcatgattctatttttgtaaggccagcagctaagagtggtttttacattttcaaaacaaagacgaatacgctacagagacagttccaggcccaaattctagagtatttgctttctggctccttacagaaaaagtgggtaaacttcttgattagagggtctaggcagaagaattctaaggtatttaaaatttttacctgggaatgcgcttgctggtgaggcggagccggcgtgaagccagtgtgcccagcggcactggtaccacgcgatgctggattgcctaggctggtcagacggagcaaatcggaatccacggaagaaaattcacctcttaaggatccagtccggaaagggatggccgggctcttcctgggcaggggtgcccaaatggatgaggatgctctctgcagccctcggcggatcgcaaaggagcagggctccggtcttctatctgggaaaacatggttgtcactcgtggagaagccaacggagcccctgcggagttttctttccttttctctgctgcaggcagaagaagcgcattgcgcggttcgccgggctgtctgcaactttgggagctgcgccgcgtgggtgcggccagccgaccggcgcgtgcgcagtgagttctcagcgcctcccgccgcgcaggctcggcgttggcctccgcggcccgtgcgagtgcgcccttctcgggtcccctaggtcgcggggcagccggggcggaaggggcttgttcattattttgagagtttgttgtgaacgtcataacctttcgtccttaaatattgccgatacttgacctacgcaagagacaatgtcatgtgattcagcctaatatctcagtatgtatcc

SEQ ID NO: 30130 - DNA, 2300 bp, Homo sapien
tgtactagaaggtgtacatttataagttttgaccttgagtcgtgttcaaggagaaagtgacattggaacttggaaaatttaaaaatgattctacttgaaaaatttgaccattgcatagaaatattagctatcgtctaatcttttgtaatcttagaaacaatcgtgaattgtttggtgaaaaatgaaaaaataaccatttcttatgtctccgtgacctttatagaccaatgtcaccaacttttcctaaggtaattgtttcctactgtcaaatagctctagtgatataaatcttaacaatcaatgaagggaaaactggtggaaacataggaggaaaaatactgggataattttcatcacaaagtattggcattaacattggttagaataggggagaaactgcatgacttgacaactggacattcctgtatgttgtatgaggccctgtcttaacagaaatagtgatgtcatcatcatcctctcttatttggtcttgaattgccaccaatcggataaaacctttgaattatttaactcaatatatgttaagtttctactatgtgctgtgtattggtactataaatatgaataagacataagatattacattcaaaaacatcagaatacatgttcttttaaagtataccccaaaacatttaccatgtgttctggggcgcatgttaggctggatcacaaatcaagtctcaagaatttcaaaagattgaaatcatatagagtatgaattaaaccagaaatcaagtacataaaggtaacaaaaaatttccaaaatgcattaatttaaggaacatacacctcatgacccatgagccaaaaaataaatcacggcaaaattgcaaaaatattttgaaatgaattttaaagaaaatacttagcatattaaatacttagcatattaaagctctaagtacatatgttagaaattttaccgaaaggttggctatcagtgtttccagaagccagggaaaaagtttatacaatttgatcgctgaggcagggaaacaaagtgagacctccgatcgccctgcctttctgaggtgagcactctggatcccatcgcaggagatcagagtcttgctgagttgaggagaggaagattggagttgatactgagatagcttgaattttcaggacaaagtatcaacaaggaggaaggtagacaaaaaaatccagaaatctatgtagagaccccattgtgtacattgcggaacactaagcctaacaattctcaaaattagcgtgagattgggaaatatctaatttccatccagccacagtggagagtcctgactgaaaaccaggcattcgctaaagatcccagaaaggttgtgtgttacatacgtagggctaaactatcctgactaaaaactacactacacttgctcctcacccccacaaaaagcttaaaaacaagcctcaatagtataaagctgatctgtaagtaactaaactacctgcagaacaaagtccaaatttattagttccagtactccaaaaaaaacacatgtaaaaaaaaaatagatttacaagacatttatttggggaaaaaaagaatgcctgagggttgaaatggagaggaagccagagagacagagtcctcagaatacataaaatttctggcctccatggaggtgtgatggttaattttatgcatgtcaacttcgctgggccacaggatgccccatatatgatcgaacattatttctggttgtgttcatgaagctttttctggaggaaattcgcatttgaattgatggactgaataaagcagattgcagtccccagtgtggatgggcttgatccagtcttctaaggacccaaataaaataggtggaggaagcttgaattttctgcctgactgtggcgctgggacacccatcttctcctgcccttgaactgggactgacaccatcagtgctcctggttctcagaccttcggacagcagacttggggccttctcggcctccattattgtgtaagccaattccttataataaataagggtttatttattgataaatccttataggttgattataaatccttattaattgattgatagagccataggttttattgatcctgtttctctggagaaccctgactaatacagaaggagagagggaagaaaggcgggttgagtagcagaaagcttaggctgtagcacaattccgataaagtttaaggtcagctgatgaagaacactcaaaccaaagtcgcccattggaggagccccctacctcacaggaataggcctgcattattagtataccttcttcattca

SEQ ID NO: 30131 - DNA, 2300 bp, Homo sapien
gagtaaggcaaaatcccagatattattgatgagccaaaattttaaaattactgctggaaaagctcactgtttgtaccaaatcctgggccaacactgaccctccaattgggcacagatagaagaaacagtgatttggtagaaggttggaattggcatggatccaagagggaatgtccttttgagtagaatgggactgctccttgagagacatgtgagtaacacgtcattttgattccagagtgttcagtctaatgtgtttagagaataaaattaagtttttacctcaatatataaaatgggccaaatattatttaatatttcaaagggtttgaatttcaaatactgttatgtagaaaaacctataagaaggaacatgagaaatggctgctgttatttttaaattctaaggcagtggctctcaaagtgtggaatgctttgtgtcatgagaccactctgtaagtgtgacaatgagggcaacaatatttcaaaataatcccaggacaccgtttgtctcttccactgtgcttacatttgcctgttgaaaattacattgcaaaagcaatggtgggtaaaactgttgataccttagcatgaactacagcaggggtaccacactgactaacagtgactcaatcagaaaaggaaaaaaatacaagaaaaaccagtttcactcaagaatgtcctcaatgaagcagtaagaatttttaatcttattagatctcaacccttcagtacatcttttttatattatgtatgatataatgggaagtaaacataagtgcttctgcagcttaacaaagtatactggttttcatgaggaaacgtacataagtatttgaattacaaatgtgtgcttttttcatggaacactattttttcttgaaaaaaactgacaacaaactacagtgttcatagttgggcatttggcaagcatttttgcaaaaaatggatggagggaatctgtcacttcaaggaaaacaataaaccagcttgataaatttcaagattttcaagctaaaattagaattttgaaaaatctgcatttgctaccatgagcttggcctcttctcagtactcaaagacttttctggtgagattggtggagatattaatgaaaatgatattttgatattatataatacaatgagttgacatttggaagacctacataattcagtgaaccattgtttgccaaatgaccaatacatgatattatgcatctattcaaaataaaaaatagaccagcggctattaatataacagagtatgaaacttctttgatttggcctaaaatgacacattgcagctaacttcttaaaaaaaatcatttgtcaaattttcataaagtagcaaagaatgatatcctcaattatctgaaaaagctatgaaaatactctcccctttccatttacgtaactccatgaggctattttttcttcatatacttcaaaataatatatcacaacagatataatgcagaagcagatatgagaatctagttatcttctattaattcaggtatttaaaacacttgcagatatgtaaaacaatgccactcttctcactttttttttagaaaaccaaattattttttatgaaaatatatcacttatgttaacatgtaatgggtttttaaatttaaattaataactaattatctaagactttcttagttttaatgtctactataaaatgtaggtagatataacccaaataaacaaaatctgtgtgatcctcaataatttttcatttttatttttatttatttatttatttatttattcattttgagacagagtcttgtactgtcgcccaggctggagtgcagtggtaccatcatggcatactacagtctccaccccctgtgctcaagtgatcctcccacctcagcctcccaagtagctgaggctacaggcatgcaccaccatggctggctaatttttttatttttttgtagcaacaggtgtttttctgtgttcctcaggctgctcaacaatttctatgattcaaaaagagccctatgaccaaaacttttgagaactgctgtagttaaatatgtttgttctaagccagcagtcattgtgacatcagcagcaggtcaatgattaccatatgaaagattccatgcagttgactattatttcacagagctctctggttgggctgctctataagaagctaatcacctaacagtgtctattgctgtggctgatgatttccagagtgttctaagatgttatcaggaaaggcatccaacaaatagtaagagaaggaccatttcatttgtacattatttcttc

SEQ ID NO: 30132 - DNA, 2300 bp, Homo sapien
taatttgaagagagtctatattctgacatcatgatatgaactttccatgttaatgaaatttctgacaatttagtgtgctattgaaattcttcccttctctagtggttatggttgcatttctaaaatctgttatgatgttggaagaattacattaaaagtagatatcatcaatgttttgttcattattgtaataaaatgaaaacatcttagtgttgtgttataaatcctataattagtctgtaatccttccctcccttccaaaggtatttcagggattagagtttttaattgtgcgtgagattcataaagtaggggcacagccttgttactactattacacattttttttcatttggataatttagccgttatcacttcaaaaatctatttagagatgactataatagctagtctctacatttttacattggatttttctttcttccaaaaaaattactgctccacaaaccccaaatatatttttaatttagggaaaaagtgcttatatctgagaaaatgtggatttggagaatatatagaacctttcctcgggaattccgaaaactcaagcgctctggcttaccaagtgaagtaggttttcaggaaatcccagcccctcaggactctcgatctgaaccaatcccagctgccatagctccgcgctcccgggatggggctgtgttgcccacgcctcgcggcgcgggcggacacacaccctgctaggactagctcagtcctcccagtttcccttccgagatgcctcggaatctttaccacggttatcaaacgattctgtggatcagtagttcccaacttctagggacagacgcccttttaaaattcaacgtaacagaccaccaccctccaaacagactgtgatagccgtatttttaaattctctactgattgagaaaactcaaaaacaattaaaaactccaatagagcctacagtactttcaaatgactgtatattttaattatagcatttgcatacaactgagtttatttatctatgctgtacgctaagtttaggggcaggcttggtgcacagatggtttcgcccaccctttgcacagggcaagccccccccaggcgcccaggctgggaggcccaagtcccggcagctgctgcggtggacttagaggcagcagctcctgcttctgccccaaacgttcagtgtagtcggattcccggggacagcagggcagtctgcgcgcacatccccggggcatcgcaggacacctgctgccccctatcggtggtgagaacaataacccgaacccggttggaatcaactggaagaggccttttgaaaaaaagaatattccaggactacgcagtagccagacgactctctaagaacatgggtttccgcagtcagctccgactgcctcgttttaatgcagtttttcgccattgtaggagagcatgctggatcgaagaggactctgacactgcttcggtgaaggcggggagtggggaagggggggtgttgaaggggttcaagatacacccaagggtctatttgttttccacctccctattcagcaacccatctggtccttatgcaaagcacttgccttctcccgggatggggacacacatcagagcacagcgtggtgttttcccaagcccccgaggcacctgttccctcacattacaccttgaggagagtccagtgacctctgctgcagaggcgacaaaggctccctgggaagccggcctcagtggtgtccaggaatggctttcaaacagcgtgtactcctgtggtccctttaataaacataggactatgcttcagaaaagcaaaaataaatgccgagaagtaaaaggaagctatcggttaccccgttacctctgaagcctgtatatgtgaaattttcttctgagaccgagcattaaaatttgcttccacttggacatagccaagattgctaacaggctgggaacgtgtgtgtgtgcgtgtgtgtgtgtgtgtgtgtgttgctacatactctgggatttctaattttattttcatcactttctccccgcttattactacccccccaccccaatacacacacacttggcagtatcctaacttcttcactcttgtccacatttgtcttggcgctctggggaagaaggtaagaatagatagacgaacgaaggtgcgtgcaagaaaggagggaggggaggaggtacggtcggcttgcacaccagactgtgcttgtttgagcaggaatagtggcggggtgtcttcgagaggataacggaaatgccccaccacacgcccacagcgcaagtgccggcgtccc

SEQ ID NO: 30133 - DNA, 2300 bp, Homo sapien
caggcaggagtgcaatggtgcagtctgtactcactgcaacctccacctcctgggttctagtgattctcctgcctcagcttcccgaatagctgggattacaggtgccaccactacgttcagctaatttttgtatttttagtagagacgggggtttcaccgtgttggacaggctggtctcgaactcctgacctcaggtcatccacccgcctccatctcacaaagtgctgggattacagatgtgagccaccgcgcccacccctaatacaaactttgatattatctgtttaaaatgctgtgattggctgggcgctgtggctcatgcctgtaatctcaacactttgggaggccgaggcaggtggaccacctgaggtcaggagttcgagaccagcctgactaacatggtgaaactctgtctctacaaaaatacaaaaattagccaggcatgatggcaggtgcctgtagtcccagcttactcgggaggctgaggtgggagaatctcttgaacccgggaggcggaggttgcagtgagctgagatcacgccattgaactccagcctgggctacagggttagactccatctcaaaaataaaataaaataaaatgctgtgattttttatatacttttccttttaaaaatgatttttctaaaaaaataaacatcacatttctaaataccactttgttttctgaactttttaaacttttctgattttgtttctctttctccctcttacacaggagtgctcacatgcacacatacactcttttaacaactttatggatgcgagagaaaaaccttaagacagcatcaaggaaataaaaggggaactgaaataagttgccctagttgggttttctttaagttttaaagctacttacctaggccataaaatcgtagtgtttatgtaatctccaaaatgtttgtatttgagaataattcaccaactcttaaaacggaaggaaccctaagaaaacatctaggcctaagataatgcctgacacatagtagatgctgaataaacatttaattgagggaatctggaaaagcttcttattttaatcttaaaaatcaaaaccaagtctgagcattggagaggttaagtaacttgctcaagattgctcagctggttaaagagtttaatctacaatttattccttctaatttccagctttgacttctttccaccaacctgttgacttatgtgtattgaactgtctcatataatcttctgaagttgcattgttgaaaaacaatcagaaagaccagtcctgaggttcatcatctccaaaagtcatgcaacatatgatgttcacatgagatgtgaaatatgtaaagagtcatatatttttatatataatatgcaaaatataaatcatgtatatattgaatcaaaggtctgttttgaaggctaagggtcaatagccaatcttccatgacttattttacctaacagcacagtttgcatgtccacacaggtgatggcagtccactgaccagttaaaagttgtttggctatttcagcaaaatgtttatctttgtgtgttgttatattgatttttttgaatctacctacgaatgaggcactaacaacctcaatgcattagagtcctgataaacttatcttgcactattttggcctatgtgatagctaacccattgacaaaagaaatccaaggtgataaaagcctttcttggccacttgttagccgggtcaggctgtaaaatcgtaacacaatgcaggcctcttccatggggcaccaaaaggcagcgatgaaaaacccccctcacttccatatccagtggagttgtagtttattaccataaccctcccaagtcaaaaggacaccagtttcaagccttgcaacttggtgcagacaggggttttcccctttaccccactctgctgggcctctttacctgtcctctcctactgtctacaggtcccgaacattagaaaatagaaaatgtgatgatctttgtgtgtctctgtaaaatgtgtgtatgtgtgcgtgtgtttgggtgtaacgggcctcttgtttggctgcgcggcctgtccgtcactgcgcgggccaatggcaggctgccttatataaaatgagtgttttcagtctctccgggttgcatgtactgtatgtggagcagtgtacagtgaagcggaggcagagcggctccgcgagcttctctccactttcccatagagaaaccctgactggccgctgagggctagctacacacacgccctcacgcccggcgagcccgcgaggtaggcgccccccatccccagccctccctgggcgc

SEQ ID NO: 30134 - DNA, 2300 bp, Homo sapien
ttatctgtttaaaatgctgtgattggctgggcgctgtggctcatgcctgtaatctcaacactttgggaggccgaggcaggtggaccacctgaggtcaggagttcgagaccagcctgactaacatggtgaaactctgtctctacaaaaatacaaaaattagccaggcatgatggcaggtgcctgtagtcccagcttactcgggaggctgaggtgggagaatctcttgaacccgggaggcggaggttgcagtgagctgagatcacgccattgaactccagcctgggctacagggttagactccatctcaaaaataaaataaaataaaatgctgtgattttttatatacttttccttttaaaaatgatttttctaaaaaaataaacatcacatttctaaataccactttgttttctgaactttttaaacttttctgattttgtttctctttctccctcttacacaggagtgctcacatgcacacatacactcttttaacaactttatggatgcgagagaaaaaccttaagacagcatcaaggaaataaaaggggaactgaaataagttgccctagttgggttttctttaagttttaaagctacttacctaggccataaaatcgtagtgtttatgtaatctccaaaatgtttgtatttgagaataattcaccaactcttaaaacggaaggaaccctaagaaaacatctaggcctaagataatgcctgacacatagtagatgctgaataaacatttaattgagggaatctggaaaagcttcttattttaatcttaaaaatcaaaaccaagtctgagcattggagaggttaagtaacttgctcaagattgctcagctggttaaagagtttaatctacaatttattccttctaatttccagctttgacttctttccaccaacctgttgacttatgtgtattgaactgtctcatataatcttctgaagttgcattgttgaaaaacaatcagaaagaccagtcctgaggttcatcatctccaaaagtcatgcaacatatgatgttcacatgagatgtgaaatatgtaaagagtcatatatttttatatataatatgcaaaatataaatcatgtatatattgaatcaaaggtctgttttgaaggctaagggtcaatagccaatcttccatgacttattttacctaacagcacagtttgcatgtccacacaggtgatggcagtccactgaccagttaaaagttgtttggctatttcagcaaaatgtttatctttgtgtgttgttatattgatttttttgaatctacctacgaatgaggcactaacaacctcaatgcattagagtcctgataaacttatcttgcactattttggcctatgtgatagctaacccattgacaaaagaaatccaaggtgataaaagcctttcttggccacttgttagccgggtcaggctgtaaaatcgtaacacaatgcaggcctcttccatggggcaccaaaaggcagcgatgaaaaacccccctcacttccatatccagtggagttgtagtttattaccataaccctcccaagtcaaaaggacaccagtttcaagccttgcaacttggtgcagacaggggttttcccctttaccccactctgctgggcctctttacctgtcctctcctactgtctacaggtcccgaacattagaaaatagaaaatgtgatgatctttgtgtgtctctgtaaaatgtgtgtatgtgtgcgtgtgtttgggtgtaacgggcctcttgtttggctgcgcggcctgtccgtcactgcgcgggccaatggcaggctgccttatataaaatgagtgttttcagtctctccgggttgcatgtactgtatgtggagcagtgtacagtgaagcggaggcagagcggctccgcgagcttctctccactttcccatagagaaaccctgactggccgctgagggctagctacacacacgccctcacgcccggcgagcccgcgaggtaggcgccccccatccccagccctccctgggcgcactcccctcactttctgttttcctactcacttgcgagccgccgggctgcagccccaaggactccgcggcaggagcagcggcggcggcggcggcggcggcggcggcagccggtagggtggacttgaggaagacggagggaaccccgcgcgtccggagccgccgccagccggcccgctccctgggcactttccccctccgccaaaactttgggtcgggagaggtcgggggcgagggtcgcggcggccgcgccggctggggccggggggcggggggcgc

SEQ ID NO: 30135 - DNA, 2300 bp, Homo sapien
aaaggttagcttacctgaattcctgaaaaagacagctctgttgtgaatccttaatatttcatgtcttccctgtgaatgatccgaagggctgtgtgctcttgtcatgttcactttttttaattgcagtgtctgcctctctccaccctttctttaatttcttcccagacttactaatcataacataattctcacaggaagattggtgatgcattgaaaatactaagagaaaaatgaggtaaaaaagcatctggtatttaattcaatgtattatccacctaaaaatgaattttacagatggtaatgatctctgacaacttgccatttaataaaatgatggtttttaaaaacagatcagtttcctactcatgtgcttgattttgcattgactcagcaacccccaatactctttcccttctaagttgctaatacaaagtagataaaataaattatgactaagacttccttgctgcccttgaccaaatcggcatcatcaatctctttataagttcctcaaaggcagacagacctgaccttattgatttttgtatcattagtgtcctccatgggggctggcattttgggagccttgcagttaagtgtgtataaatgaaaacccaggcactgaaaacaggttttacaataagcttaaatttcccattttaaaaaatagctctatattaaagtttcaaggtatctgggagccagagaggaaaatggcaactttccccttgaatgttctgtacgtgaaatttggggagttttgatgagaaatataaaaacttaaccaaattggggccagatgggttttggtgttcagaatctttcagattttaggaaaattatacagtagatacatattacactaagtaacttccccagtgcatatttgaatgcaccactattccaataacaaaaagtatgaatggtcacagtaagtgaaataaactatttaagactataaagtttcaggttggttcaggtcagaatttgcagccagctgagttcacatcagatcaatttgccagcaagtgagttaagaaaacaaaaacaagtttgttctcagagcatttatgactttagagttgtctatcagcatttgtggacctataatgttttgttcattaatcaaaaccttctgtaattgtttagcaaatggttatatcatttctaatttcaagtggacaggtagaaattatttctgctttcctcatttcccctggaaaaaaagaaaaggcagatatctgaacagagtttgaggatgattaaatacaggttgagcattcctaatctgaaaatccaaactccaaaatactgccaaatccaaaactttttgtgtaccaacaagaagctcaaaggaaatgctcattggagcatttcggatttctgatttttggtttaagaattctcaaccagtaagtatataacgcaaacattccaaaataaaaaaaaaaatccaaaatttgaaacactttcgttttcaagcatttcggataagggatattcagcctgtgctacagttaagtacatcgtttcacttagaccacacagaatcctctgagataggtcctaggatcgttttccttttacagaagccacagaggagtgagggggtaagtgattcattctgggtcacaaagttaataagtagcaaaactaagaatcagacttgggtctttcaactctgaatcccttcctccttcttccaggtcttgttttcataggaaaagcttctgttgaagctagaaaatgacaattcagagatacgtttgacgagttaaatgactgtataacagtgcccacagccttctatcaatttgattcatttcagttagtttggcagaagtgggctgattgttgtaaagtttaaagtgtgttttgattatttttaaaacagatataattgaaaactttaattttgaaggtggaataataaggatactttcgggtgctctcccattttgttttaattgtttagatgtgcctggcatcagaagggatgaaaatggaagaatcaaagctaataaaagcaaaagaatccgatggtggaagaattaaagaattagagaagggaaaggaagaaaaagaaattaaaatggagaaaacagatgaaactaggttacagaaggaagcagaatttgaaaaatcggctaaggaaaatttaagagattctaaggaattgagaaattttgaggcattgcaaatagatgacataatggctataaaaatggaagatcccaaagaaattagaaaggaagagttagaagaagatcacaaatgtagtcattttcctgatttttctt

SEQ ID NO: 30136 - DNA, 2300 bp, Homo sapien
gtccttgattgaaattttcccacttcttaaagagttgccccaaatctgttggtacttaaaatttcatctcttcaaaatggaagtggttagttgtttgaggccagagggtatgctgttgagttgtatgaggggaattcagatataaaatcttaggaagggagacagaatgggaaggaggaaggggaaaaaaaggataaggaaggggacagaagagaaaaaactctaaagcaaaaacagttttcattaaatgatgtaagtaacagcagtaactgttaaacaagatattggaacacacttgttattcatcgtcctctcctgtctctaataacatatgctgaataagtgactttttcttccttttattttacagaggtcagaggtcaactccgctcacccatgatggacagccaaaagaaatgccgcaggctcctgtacttatttcctgcgctgaccagtgaagcgccctttcattgtaaaacattgtgctttacctactaccctagccttgtctttaccgagggatgctagtgagtccaagtggtggaaaatatagactgcaaacaagtgcttgttgccccacacggcccagattcacttgaagcagaagttagcatcctgggccagtttgttctctcagaacccagaatctttgagggtaaggttatctgtctgatactgagcagaaacagaatgatcctggagctttgctttctattgaaggcttttgacggtaataggtggtaacttggtaaaaggctgcctttactgtagctcacccagcatctcttttaccaaccagagagtgtgaaactagtttcatatattacctagttattctttcaaaacaaaacaaaaaaaaaacaaaaactgacgcactgcactagttattattagatattcttagtcttttttgtacatggagatttaagtttaagatggtttatataataggttatacctacatttatattgtagaataaatattaaaaagcctgttccagagactcccaagcagcctgggcaggcagatgtaccattgttagtggtgtatgctcggcctcgtggtccatatattctgcacttttatatttgccaccagaatggtagtttgctggcaaaaaaaaaaaaaaaagagagagagaaaaaattacaactcttacaatctgaatttttttcttagccttgagtgaccaagaagaatttgcttgaggcaaattgtggcaaatattttcccagacaggggaagagtcctgcagattacagattactggtgttttcatgccttgaggattcttttatttttacataggggtctaagtgaccaatggattgttcatacaaacaaaaaaaaagacaaaaatattattcagaagtgaccttagtattacttcactattctaaacacattgaagacactcacttcatgtggacttggagctacagaccttttacatccatcacagattggctggacgggttgcaattgctatgcacagcctgattggcactgcaggtttttagagccattttgagtttgtgttgtttaggaggtactgagtcaatgatgagggaggtatgcctgaccagagtgggactctcagtcatagatccacctgcaagtctctgtttcctttttgtgttttgttgcttttgaacataaaaccaaccatacataagcagcgccaagtggattaactggcttagaacattcaacatattgacttaaccacctgacattcacagtgtcttgtttcctagcaacagatgcaaagtgataaatcaaaattagtctgaggctacagattttacagggtatttgttctatagcacaaagtatttccccactcttgcgtcacagcacaaactaccaaattttaattattggattccagcaataatttttaatggttttcaaactggcggaattttgacagtgctagttcgagtttgaagcttttgaattagatctctaaatggtgacagtttacatggttttatctagctttcttatttatacttgactgaattgtaatgattttttttctaattgtaatttgacgtaatagccatacaaaaaatgactctattcatactaggtttagcttctcatggttgtagatattacttcagttccggtgctggaaaatatgtacaacatactaacaggattgaaaaaaaaatagaggtttttcttcttgtttttttttccaaagcaggtaaagagggtagcaaagcatcggaatgatgtgctcaaaaatgcatattcctggtggggatggaggaagaaggcattagtaaaa

SEQ ID NO: 30137 - DNA, 2300 bp, Homo sapien
agatagatagatagatagatggatagatagatagatgacagagatgatagatagatttcaagctttgtcacacagcctgacaattcatttttcttgggtaaatacccatttctctttgggtaaatacttaggaaatgggtaaatatttacccatttctcttgggtaaatatttaggagtatttacccatttctcttgggagtatttacccgagagaaatgaaggcatatgccacccaaaaacctgtacacaattttttagcagttttatttattattgccaagaactggaaataacccaaatgttcatcaactgttgaatgaccaagcaaaatgtgatgtagctatactatggaatacctctcagcaataaaaacgaacaaacaaccaatagacacaacaacatcaatgaacttcaaaagcatcttgctcagtgaaagaagccaggctcaaaggttacatattttaggattctacttatatggcattctggaaaaggtaaaactagaaggaccaaaaacagttcagtgttgccagagtctaggggtggaggtaggagactgaccacaaaggggtacaagtaaacttttcggagtgatgaaaatattctgtattttgattgggtactagttacatgatggcacatattcatcaaaactcatagaactgtacactttaaaagggtgcattttactccacgtaaattataccttaaaaacctgacattttaaaaaatcactgatgatatcattatatattgattaaacattttaaaaacatcctcatgaacagtgtgcctagcactcagtgacattaatgttagttgttgttgttgttaccattgactaaggtgacaaaagtatagaaaaacaaaaataaattagaaatagtttcatttattatagaaccaagattaggatctagtcaatgtaagggtccaaaactttcgttgattctataaattcaatattttaatttaatcaagtaaaatgtcttgtgtacaatgttgctaaacagtaataatcattacaaatagcaattctgttaaacagatgtaagctgaataattagggctgtgtgtgataccacctcagatgccagagtgacaaagcctttcaggagttatcaggctgcttttccacctgtcagatgtgcacatctagaaaatcaatttttatcaatgcactctgagatgataacgttataggagactgatttacgttaacgaatcttagaaggcactgatgtataaacccgatgtacaatgtgtcactcaacagaatgataactgccacttgggtcaccacagtactgtgcgctgatgtgatcatcacattttttccttgtgggcaggtttaaagggggagccgagcattaatcagcttcctcggtgggcagggggtcagaataaggaagagaagttagtgttagaggacacacaacccaggtcatagtaaaagttccacaaatcattcctgttcccataattcaccagattcaatgtctttctttattaaacaatgtggtatagaaaccaatataatcttgttggtaactctcttttatgtagatttcatgttcctcactctttagtctttctgcagatctggtacattaccattgagagaatcagctttcatgatgacagtcacttctgttccttccttcctgagattttgcctttattgaatttggtgttcccaagtctcctccaatgcacacttaatagatatcatctgatgttacttctacagataatctcatcctttcatggattgcttttgctagtttaacaatcaaagagtgttttggttgcctattgccccataacaaaccactcccaaacttggtggtgtaaaataccaccaatcattttattattaactcccacaagtttgggaagttgcctgagctcacttaggcggtattcactcagagtgtctcacacacttgctgtcagacaatggttgacactcaaatattctgaatgcttgatgctcacgtggctggcatgtgggctgggaccactcaaacagctggaatttggaacttctagggaccctaggaatgcttctttgtctctgtgtggtctcttcagcatagcaacagcagcgtagctgaacatcttacggatggcccagggctccaaaggctcgtttcctaagtgagagagagcctggctgaagctgtattaccattcattctccagcctccgaagtctcaaagcatcacttccaccatactctaactgtcaagacaaacacaaaggcccaggtaggttcaaaaagagggggagtaggct

SEQ ID NO: 30138 - DNA, 2300 bp, Homo sapien
caagagaaatgggtaaatatttacccatttcctaagtatttacccaaagagaaatgggtatttacccaagaaaaatgaattgtcaggctgtgtgacaaagcttgaaatctatctatcatctctgtcatctatctatctatccatctatctatctatctatctatctatctatctatctatctatctatctatctatcatcatctatctatcatcatcatctttaaatagagatgggggtctcactatgttacctaggctggtcttgaactcctggcctcaagcgatcctcctgccttggcctcccaaagtgctgggattataggcatgagacaccatacccagccaaagagcttcaaatatattatgttacttaattctcaccagcagtcaactgtggaaaatatactattgttagttttttgggtttttttttcaggaatcaaagctaagacttacagaggttaggtatgcctaaaattacatggctagtgcagataaacccagggtgttttttttgtttgtttttttttttttttgagaaggagtctcactctgtcgcccaggctggagtgcaggggcatgatcttggctcactgcaagctccgcctcccaggttcacgccattctcctgtcttagcctcccgagtagctgagactacctgcacccaccaccacgcctgtctaattttttgtatttttagtacagatggggtttcaccgtgttagccaggctggtctcagtctcctgacctcatgatccacccgcctcggcctaccaaagtgctgggattacaggcatgagccaccaggcctggcccaggctgttttactatagagaagcaggccttaactgttacctcttctgtagttactactaactttacccaggtaatggctaaccaccatgaaaataaaagtaaaaagtatagcctcatcacccctgtgatcaaatgtggtagatttggtttcagatggagaaatgaaaagattcgagtataacatgaaaaggctatatagaatcaatatggaaaaactgatgtgggtcacaaagtgacaaatatatggagatgaaagtcaattcaaagctcagttcaaagatgtgtcctgacctttacctttttatccagttcaaatagtataggattgtgccaaatgtagcattaaaatagagctctggtcaatgttttcttataaggcttctctgctgttgacacttactaaatatgttagcatcaaacgcaagcataaacagtatatccccttaaaacatacacaaacatttgtgaatttctaacattcctttgtcacaaaaataatagtaataacttgagtataagaataatttacatctttaatagctgcattttctattcaaataatctattgccttggattccaaaatgatatttgtgatatgaacaaaagagaaattatagtaagattaacctctaaaaatgtattgtgaagattatgcagctgttctgtagaattggaaataatggaaaattgacagtgaaatataaaagtagatcatgaatagttaatacccaatttttccatgatgaaggaattaaaataatgactaagtagtcaccacagtgacaatttaagacaaatttgtcatctcccagcgcctagcacaaggtcttgcatttattatgagctgaataaacatttgctggtctaaatttaatctttccaggatgaatgtttataggcatagtgaggtaatagtgcaactattctgtataaagtctacgggtttggtattaataaaggcaatacatttttgtcttactaacaaaacaaaatggaatacaagtgttttaagtacggtaaccagcttccccaaagaagttaaaactgagagtgattgttgacggttgtgactgatgcttgttcttgccccaaatgtttcagcactagtgcattctttactcacagaatttaggttctgaggaaaaccctcatatgtctttctgaggatcatacacaggagactttagcagaactaaagcaaacgcaaaagaatccagaatctggaatcttctgcatgtgatgccacaggtgacattctcccactctgggatgaaatagacagtttctcccttgcttctcctgaaaccagtacattggctcaagctgtaggctctgcctgcaggatgcaccagctcgtgtttgaattaaatacagtgacttgaagaaggaagaactctacagagtctactctggcaacaccgggaacagaagcaacaggacattcagcttccagaaactgcagcggtgcagttccaatggt

SEQ ID NO: 30139 - DNA, 2300 bp, Homo sapien
caaagatgtgtcctgacctttacctttttatccagttcaaatagtataggattgtgccaaatgtagcattaaaatagagctctggtcaatgttttcttataaggcttctctgctgttgacacttactaaatatgttagcatcaaacgcaagcataaacagtatatccccttaaaacatacacaaacatttgtgaatttctaacattcctttgtcacaaaaataatagtaataacttgagtataagaataatttacatctttaatagctgcattttctattcaaataatctattgccttggattccaaaatgatatttgtgatatgaacaaaagagaaattatagtaagattaacctctaaaaatgtattgtgaagattatgcagctgttctgtagaattggaaataatggaaaattgacagtgaaatataaaagtagatcatgaatagttaatacccaatttttccatgatgaaggaattaaaataatgactaagtagtcaccacagtgacaatttaagacaaatttgtcatctcccagcgcctagcacaaggtcttgcatttattatgagctgaataaacatttgctggtctaaatttaatctttccaggatgaatgtttataggcatagtgaggtaatagtgcaactattctgtataaagtctacgggtttggtattaataaaggcaatacatttttgtcttactaacaaaacaaaatggaatacaagtgttttaagtacggtaaccagcttccccaaagaagttaaaactgagagtgattgttgacggttgtgactgatgcttgttcttgccccaaatgtttcagcactagtgcattctttactcacagaatttaggttctgaggaaaaccctcatatgtctttctgaggatcatacacaggagactttagcagaactaaagcaaacgcaaaagaatccagaatctggaatcttctgcatgtgatgccacaggtgacattctcccactctgggatgaaatagacagtttctcccttgcttctcctgaaaccagtacattggctcaagctgtaggctctgcctgcaggatgcaccagctcgtgtttgaattaaatacagtgacttgaagaaggaagaactctacagagtctactctggcaacaccgggaacagaagcaacaggacattcagcttccagaaactgcagcggtgcagttccaatggtttctggcctctacagcctgtattcttagtggtttatgctccaatttctatacacattgttagtagcagcggtgtcttcatgagactaattccgtggtgtgatattgtttgaggatgcttatgttcgtagtcatggaaatttagtgattgcctccccagcattcattctctctgttccctttctgatggggacatgcagattggttgggactaatctcacagcagctccagggatgggccctagttacagtggttgggatggcattatgatccaaactttgtcaaaaagagagaagatgtttgatggggagcatctggagaataaaattattctgtctttcatggatgctaaaaaaagatgctcccttcatccactggttgtgaatcaggaagcaaccaccccagttgttctggtaactatgttgatatggtgaagctatcaaaatagttttagggctattctgccactggggaaggctgagacacagaaaggaagtcggtcctgggacatcattaaactgctggagcaagcttacctgaagggtcatctggtaagcagatatggagatggaattaccagtgtccaagctttattgaggtaatgtttgtgaaagataaaagcaaggcacaggaaatatatgggcagcaaaacccttcagaccttgatccaggcctgacacctgtgaaaacaaagggaaaccccgcaggattgggcaggaagggcctcaaactgtgatgcagatttcataaagtctctgccagcaccaaagggagatctagagcaaaagctgcttgttggaagagtatgacaatgggcggaaatgcccagacactagtactcccactgtacttattcgccagggctgtcgagaaagctcaacactgttgttccaactcaacactgtagaggacccttaatgcccactggctggcggctgtcagttaccggcatcctgcacacgtggatagtttgttcttttttgaagggagatccaagtaagtagtacacctccttccatttctgggtttcttaaattacttgaaccacaaaatctttatattattactgttgttgctgttattatgatttaaac

SEQ ID NO: 30140 - DNA, 2300 bp, Homo sapien
gagtaaacctttgtttattgcaatactatcaagtattcacttctcacaattgaattggttagatacatatcttaggtttttaaatttgattatcatggattcagtagagcccatgtctcttcctgtctttagctatatgcctagctatcagtgggaattgtctgctaacgactattactccatggaacagaaaagattaccatggatcctgtgcgggaatatgtttgaaaacatccacaaaaatcagtttttctcatttctgctcaaggaaagttgtcagaaaattatggaacctttctgctttaagttgatgatgatagaagatggggcatttattaattgcctaaaagaattatccttgaagttatactgaaaaattttttttaagttttttcaaaaacactatagtaaaattaaatttattttttatttatttattttttttgagatgaaatctcactcttgtcccccaggctggagtgcaatagcaggatctcagctcactgcaacctctgcctcccaggttcaagcgattctcctgcctcagcctcctgagtagctgggattacaggtgcctgccaccatgcccggctaatttttgcatttttagtagagacagggtttcaccatgttggccaggctggtcttgaactcctgacctcaggtgatccacctgcctgggcctcccaaagtgctgggattacaggcgtaagccaccgcgcccagccaagtaaaattaaatattcttgtattctttttatatctctggaaaagtattaaatacattcttccagaaaaaccttcgctgaagggcttggctggactagtttcccacagcttatcctagggcctctgggtagaattgtttttctttattgtgtggatagatcagactcagtacggagaccaacaggctctctgtcttctcctcagaagcaactgggattctccagagcagtcataaggtgacagaaaggccccagaacagatgtttcgtgtgtgacagagcctccagggagacgactctgttgctttaacagtgctaatgaggccaggttgccagtgggtcctcacctgagccagttacttatttatatgactccatcttattcctcaaagggtttaaagtgccctgtttgggccaggtgtcttcacactgagaaaagcggcgttccacggtcacagccaggtgagtgcactcgcccatcggcatgggcatccgaggagagcagggctgtggtgggtaaaatgcgctctgcgaaacctcgcctctaactgccttgctcaaagcaacctgccacagaggtcaagagcgtcatttactcatataaagaacagttctttctcctcaacccctgagaagcaaagccaccgtaataattttcactatacataggaaaaaatttttgtaatcaaaaaacgaaacgaaattcctgattcaacacattccgagggctgtccaaatcaacctggcagtgacatcagtgctggtgaaaaccacattttatgactctgccttcactcgtcctcctgggcattttttattcttcaaattggagataaaaataagggttggtctctcaaggttaggagggagagagcagcatatgttcttcaaaagactcaataagataatagatttttttaaaagctgttgctagtgtaacttacttatagtttcaaagggcttttttaaaatgaaatctttgcaagcaatagtaaagaaatctagaaccccctgaggtgatggttagagtcctgtcacggatttaaatctaattattagcctgaaagtaaaaaggagaaaaaaccggccgagtgtcagcccggaaaacaataatcgccgtggtggtgttcagcagcccagttattagtgccttcaaggatagttcaccgcatttattcttgcccttgaaagacagccacagaagcttcgatgttttctgataattgcttctttttccatggagtagaggtgcttcctgtgctcctaggtttcatctcttctgagcacctgatgaaaagcattggctgtcagtgcaggcacttagaagagaggcaatgtgcacagagccgagtgccccagcctgcacttccccacctgtgtgaccttgtgcacgtaacctgacttctctgtgcctcaatgtcttcatgtgtaaaatggagattaaatgagagaaagcatgtcaggtgggtagcatggtgcctggctcaatgtaagttctcaatatgtgtaagctgtttatctttttcctcttattatactttggccaaggtggaaaaagcttaccatgacacag

SEQ ID NO: 30141 - DNA, 2300 bp, Homo sapien
agtagtatgagatacctttggctgacgggcagcacgctcttattttttcctcactatctgggttgtcctcccttttactcccatgccaccccatgccttccatatctagcatagaatgatcttcagtacagttgccagcaggtctggtgacaatgtctcaagtggaactaagcattgtctatctgccacctccttaacttcactctcctgccttctccatcacttacgttcctccaagcctgtgaaaccactgtactgtacctgtcactgttctgacattaaaattaaaatgacttaaatcttgacaagtaccccaaattattttttctttgtcataggttagcatataagtatactatatgctaaaatttatgctatatgtttaaaatttagtgcaattttattgatagtgtcctaattttattgatagtatcctaaattaactttttaaatcaacttgtctgatgccagggttcagagggacacctacagtcagttgaaaggcaagaagagacaaggtacaggaaagttgctctttagataacatggtagactaggaggaacattaatatggtttgcttatataatctgactgtgtaaatctgaatctatgtaacattaaggttgcaaatttgagcgtttatattaggaagttaaaattttaagtgtctccaaaataatttttactcattgcacgtgttctgttttagaaaagcctaatgattgtgttttgatttaaatgcaataaaatcctcaaatagttaaaaatccaagctttctcttcaagaagaagttaatgtcgctatgagatttttaacttttataatttttattatttccaactttaaatttgtagccttaatttgctattttaaagagtaggcctttcactttctacaactttctgtgaaagtgactttcactttctattttttaactttttaaactgtgttgtattttttttcttttattggaagcattttaattttataagatgagaaaaaggactgggcacaataacttaatgtgaaagcatagaaaagattacaagaacctaaccaaactcactaaagttgggcttgttgtttgtagagaacgtttatataattataaggatcaatactttctcatttttaaagccattaccagttagttcaatataagggcatatagtgttttgatacaaatcaatctggtagcagtaagtaccatatttaccacaacatcccagatattttagaatgatgcagatgcagaatatatacgtagaatttatatctatgtatagatacaaattcagatattttcttgttcaatttaaggagaggtaaatttggtatcaatagaaaaaatgtttctgaaaaatttaaaccctggaaatgtatttatggcatggagtcagatgtttcagggagagaagaacaaatcaagaagcattgcaagtatgctcatatggaatgcttaaggcttgtggttaaaaaatatatatatatggctgtcaatgtcttaggctcatggtagcagcagaaatcgtaataattcttttgtcacatgggttatatccatattggagagaattaactcaggtgaaattaacttgtacactgtttggttttataatatttagagggatcacaactgactgatgtccctttgaagtaccattcttcataaatctttttttttcagaatgggccagccaactgtgacatcccttggatcggagatttagaactagaaagtattctttctacattattagggaagaaaaggagttacttggcggttagcaatattctattttgttttgttttgtttttagagacagggtctcattatgttgaccaggctggcctcgagctcctgggctcaagcaatgctcccacctcagcctcccaagtagctgggactacaggcatgtgccactacacctggcagtgtttattctgataaatacatttatgagctcaaaaatgtaactctaaaaccttatctctgaacttccatattaccatcagaaatttagatagttgtttagttctctttttctttgtagaacatagatataaggcatggtttcattgaagtcagttgtatatacatgtaactatcctgatgttcccaaataaagctctgtatttctgcttagtttattggggaggctgctaaatgtagtgcatcccaacccattttaccctgttctactttaaaaagaggttggcttcttgtttggatacaaggaccaagtcactcccccaggttcctccacagtaagggaggcctatttaaagccgcccatg

SEQ ID NO: 30142 - DNA, 2300 bp, Homo sapien
ctgtgttcaaaacattctaatatgtattatcccctccctctctacccaagaaactccttacatacagataagatgagctcaacatccaaattaaaatgctttgaaaagttaaaaggcaaacctttaaaatgattaaatactgaaaagagcttaaggttatctcagagagaggataatcaaacctaggcaggctgctttggactgtctctcctgggatatgcctgcttttgccccaccaccaaaacataccccagctagattcccaagagcagcagtggtcacccaggtggcctctcattccattttctgcacaaaaagacgttaagcatatagctcagtagctcccagtgtaaaacagaacatcacccgatctccacctctgaaggttggggacagtcctttctagtcactcttcagctttaggggggttggttggtatcagggacagctgacagccttatttagccaaccagctgctctgtgatacacaatgtccctaatgctcaaagtctggtggatgattcttttgtatccacataagcagcagttggaggagaatcgatgagtccctttggttgcctcggggtgtcaaggctgccattcaaatcattaccaccataattattaaccattgttttagtgagatgtctgccaggcaattgtttttatttttcaatcattaaaaaagcaatcaaatttcactagagcaatgcctgcctcacgccgcatcaacacatttattaaaccccttctgtttgccgagctcaatggaaagtcttggaggagggaatacttaaaatgctctcggatttaaaagaattgataatgctgtggggaagaggttcacacaaaaaagcaattacaggaagaagctcgatagtatacaatacactggtacagagtgtcatagacagtgccactttcatacgctggattttatttctgtggcaatgggatgcttgggaggagccgcactgtgtagaggatttggagaagtggggtattgtggtgggaaattgctttctttcccaggaggtaggaggaaaacaatcaaggaggtggacaggatgtgcactccattagagcagccaccagagcctgactttttgataagagagtacatcagttaggataacggttaaaagtatctttaaaagacttttgcttcaggatgaatgatgtggcctgtgtgattcagcgataaattcaaaagccttgtccctattgtggcttgcggccacatttcgaacccatttttcaagcatgttaaacccaagcgcagcgcagagggctgcacatggggcagtcacaaaccaagctcaataaccttgctggtggggatgtgttggatacgctgctaatgcctgtttgcgacaatgctcgctagtcccggtggtggcggtgttcacaggtaacaatgtttaccaccgtgaatggaacttgtttgattaaccctgatcagaggatgaaaacactaaagaaccaagtgagaaagagggaagagaaccgcatagggaagagcagagcgagtagacgagccgaacgcagagcccgcgaggggcgagtggaagctccctgcgggcaggtacccgaccaccgccctgccctgggcgtggcggcctcgggctcagggaccgcttcggcgctagacggccgcgtccggaggaaacgggcgctggtgaaagcctaggtgtcctggtccacgcgcgcagccggacgtcgggtccagggagagacgcgggctggggcgggacgggacccggcccctgaagcgcgagggtgggagtgaaagcaaagaggagaaaagtagagagagaggacagtggggcccagcgccgcgcgaaaggcaggaaccgacccgcggacaggaacgggtgcaatgaggtccccggcgagcgtgggaacacagggttcagcctcctgcggcgggcgagcacgcggaccccaggggcgggcgggtgcgacaggacgtgacctggaagcgcggcgcgtgccaccgccctggagcaggcatccggcctccgtggagcgggcaggcgggccccgggtctggagcctgcgactggggagggcgccgcgtcaacagcagcggttgcggggcggggccgagtgcgcgtgcgcggctctcgcgggcggggagcaggcgggggagcgggcgggaagcagtgggagcgcgcgtgcgcgcggccgtgcagcctgggcagtgggtcctgcctgtgacgcgcggcggcggtcggtcctgcctgtaacggcggcggcggctgctgctccggacacctgcggcggcggcggcgaccccg

SEQ ID NO: 30143 - DNA, 2300 bp, Homo sapien
ccttctttgccatgttgattcagaggtatgaggagcccaaagtggccaggtagcagtcttaatttctgttcaatcaaatcattgttgtatcttctggttgaagaattcttccttttggaactaagacctctaggccagcaaagcataaggtcatgggaacaggaagcaagaattttgctagtgggctactaggggtaatagcaagtggttccactccatttccaccccttgattcctggacctgtaaatcctggctgtaggagaaacagcaccatatattggttgctgattcattctagtaactactattaaagctttttacctattggtgttcagtccagtatagtttaagaagtatctattgattgcttatgtaaacagtactgatcaggttattgtaaaagcattagaaacttgtctcttctcccatgagcattgagtcattgacatttgaatcatttactctggttgttaagtagactcttactagtgcaaacatagactagactaagccatttgacaaaagtgtatacctctgcttcagttttaagatataaagtgatcacttttgtctgcacttctgtcctactaccccactctaaaaaaagtaaatgtcacttgagtgtatagaatctacatttatgttgtttcctattttactaaaatctttctggttttccaaggtttagcatagttctcatagcttaccttagttgccccacccctatagttgctttttttttttttttcttttgagacggagtctcgctctgtcgcccaggctggagtgcagtggcacaatctcggctcattgcaagctccgcctcctgggttcatgctattctcctgcctcagcctcccgtgtagctgggactacaggcgcccgccaccacgcccggctaattttttgtatttttagtagagacagggtttcactgtgttagccaggatggtctcgatctcctgacctcgtgatccgcctgcctcggcctcccaaagtgctgggattacaagcgtgagccatcgcgcccggccaacccccatagtttctgaggagatatgggatagagccttagaatttgcattctaaggagtacctaggtgatgctgatactgctgctctcagaaccatacttggagaaccagtatcttacatatttataaattgttgaagttaagaattatctttgaaatctactacagctttgtatagttctacatatggaagtgttcaccaactgacattctcttttttccttataaaatcatgacttgaggacccagttccattggctttattatcgtgtccttaaggttgaaatatccttgttaaatttttgttacttactatggcacttgtcaccacaaagacatatgaagaaaaggggagctcatgttttgtcctacatgctcatagaacctgctcagactccatatttactgcatattggggagggagttggctctcaaagggtcactttctacccctgccctctacatccaattggtctgcagataaggattagctcggcatccacctatactatcctttttaatagatttaagtaccatggaccaaccagtactggtaaccattattttatcaagcttgaacataccagagatgagatgtcaaaaatatgtatcaatgtgattggtcagagaaagtgagaatattctctgtcagcctctcatttttgtccatttcagttatattgctcaaaaatatccattaattccctctatttataccaaatatgccagccacttgggtttgtttcttgccctgtttttatatttatctgtagttctatagcaatggctcccttcctttccctcccccagtttttttcctttctttattgactacaaaaatggttctatttaagtagtagtaccatcaaaacctcaaaaaacagatgaactgttaataatattgtgccctactttatgcacacgttcactaggcttttaaatacccttttctacactagtctttatatcaagcttaatatagcttagtatagcatataggtggaaactggaaatatattttttaattataatttttaataattttttaaaaatttattttctaaggaagaagagacagataatgaagaaaactttattgatctcaacgttttaaaggcccagacatatcacttggtaagtttcatcagatacatgcaggaccaacaagcaatcaatgtacatgttctgctggaaatttaaatgagtagaaaccgttgttggccattgttttgtatgctgtttcaaaagtagctctcaaaattgct

SEQ ID NO: 30144 - DNA, 2300 bp, Homo sapien
ggaatcagcaaaaataatccctgggctttacaaaacaatgaaatttcagtgttctttctaaaactttttattggggaaacatgcagtattgaacagttagcttttttgttctctttgtgccacaattactggaaatactttatatttttgggtttttttcttcttcacaattaaggggggaaattattctgtatactgctttcaggccaggctgtgtcagtattttacctgggaaggaaatggctaagaccctgggagtcgttttgtttcccccaagttaaaatacatacgttgctggaggatttatcagctaaaaagcaacgtttgactatttcatactgtgttacgtaacttcctgaaaatgtcagaacatcttaagtaggcagcatgcctggcaggaacatctccctccctgagtgtaataaatttacttccaaagtctgagagctttttcagagtcatgtaaaaagccccagtttgcttgttagttaacttaggaccccaaaacatatctaagctttcatttttcagtcttataaagccatacatctatcttacactactgtgactgttatacatacatataacacccccaagctgcacatgtggtggtggttggggtatggacttatcggggagaatcactgtttcaaaaaggcaaagaccaggaaagatcaatttggtagtggggtaacatcaaatccaattttctcactcaactttattaaaagcagctggctcatgacttgtggtaggcaagcaatgttatttatttaaaaagcaattctcagtgggctgcccttcaggttattctctacataagtctgtaattttatgtacttcctttctttaatgaaaaaatggtatttgcccttctgacttttcactttgataaccttattagtatcagaaacaagttagctgtagacggattacaatgaaaagtgttctcattttttctaataaaaacaggatattgtagatacatttcaaatttcagttgtccaaaaatgtagcccttctatattttgtagtggcagatacaagagatcagagagcccttaaaagtcacgttataaacatgaacatatgttcaatctcttgtactaagttttcttcccaaaaactgccaggcatccaccacttacctcattttttgcaactgttaagaaaattgcctaatacagaagccttttgaaaactgtaaagctgggccatttctgtggtcagttatgtaccttttcttaaattttctaggtcaataactgcagaatacagtagtaacaccctatctttagccacccttagagctttagggcagggaaattccttttaagaccatctctattctgttggatttaacgaagtacccaaacactttatactacatgtaatgggtttgaaacagattaagcagcaggatggaagcttagtattcttgtttttgaagtaaaacaaatccttccaaatgcctccttttgttcattgtcttcctcatccttccaaccactttcctagcactggagtaacagccaggcaacgtaatacagtacttcaagctttacaatatactgttaagtgcagcattgcctagtgagagaaagataaaattaaagaaagaacgagagaaacctctcgttggaaagttcctgcagtaaaagtgaaacctatggtattgactatctttacaactatgaaaaacttttcaattctgagaaaataaaggtatcagtgagccagtgcagccttcagtgctacacgtcttcacctccctttaatctttttaacagctactagctgacccagatgcccgcttaattgcttttagcaaccaccaggtccaacacacctcaagccagctcaagactcactaggcaagcggagcagaaacgtaagccggctcccttcagactttcagcgagggagaagacgcagccggcagtggggcgcgaacgccacgcctccatgaggggcggggctgcttcccgaccaccatttccacagaggcagggcaagaagagggccacaggtgacgtcattcaggaaagccgccctgattggagggaaggaggcggagtctagtttccctggtgacggattgtccggtggtcgcctggtaaccggtcgtggctgtactggcggcggcagggctggcggcttaggccgcagaggtctgtgggcctgagcccacgctggactctgtccgttctgcgatgactgctgctctggccgtcgtcacgacgtcgggtttggaagatggggtgcctaggtcccgtggcgaagggaccggggaagtggtc

SEQ ID NO: 30145 - DNA, 2300 bp, Homo sapien
tgatctagtcttcaataatggcatacatatcatagccactttctctgtgacataaatctcagagaaattgttctttccttcctcagccattgatattatttaaaaccgtgattctatttttaccttcagcttgaacaatctctgcataacaggtatgtttgtatgcatacggcatttcttcctaaaacttcaaaaatcttcaaaaaatatgtaattcttctattttcaaattccgtgagagtctgctctcctcatgtgtatgctttaggagctctgctatttccctaaactaatattacagtggtgtgatgtaccattaactacatggccatggagattcagaggtgaaagcagggattgcctgcatcttttaagtcccagtttgattttgatttcatttcataatagatcttattaatgataaaagttggcggccgggcgcggtggctcacacctgtaatcccagcactttgggaggccgaggcgggcggatcacgaggttaggagattgagaccatcctggctaaaccaggaaccccagcaaaaccctatctctactaaaaatacaaaaaaattagccaggcgtggtggcgggcgcctttggcacagcacacaaatcccctgatcatataatcatagggccctgtctagctttatagcctttggacattactgaccacatcaactttaacctcctgccacacatgcacactcaggggagagggcaaggtacatttggggaactccccctcctcttccccatctcttccttgacttccttcttctctagtcagagtcatccatagtgagccttctgctgcccactggaaactgggttgaaagtcccagctactcgggaggctgaggcaggagaatggcgtgaacctgggagacagagcttgcagttagccgagatcgtgccactgcactccagcctgggcgacagaaagagactctgtctcaaaaaaaaaaaaaaaaaaaaaaacgaaaaacaaaaacaaacaaaaaagaaaacgttggcgtgggtgactttggggattctaggaagagccctggcgctttcaacccagtttccagtgggcagcagaaggctcactatggatgactctgactagagaagaaggaagtcaaggaagagatggggaagaggagggggagttccccaaatgtactttgccctctcccctgagtgtgcatgtgtggcaggaggttaacgttgatgtggtgagtaatgccgaaaggctataaagctagacagggccctatgattatatgatcaggggatttgtgtgctgtgccaaggcttggatggcatcctttgttccagacagaagggtcctgtttattgtcctcctaaggtaatttttgttcactttgtaacttttgctcccatgcactcagcaaacagatattgaccagctactatgtgctagtaagtaagtggtagttgtttgggatacaatagtgagtaaagcatgactcttagcatctgttgtatgtgcatgcatgccatgcatgtgacactgagggagagagagattaaatgatatgacagcatagaggctgggcactgcccaactttccatgtggaattcagagaggtctttatttctctgaagttgagtttaagcttgggtgttctagcgaccagaactgtaatgggaattgtaggtgcagatgaactttgtgtagggttatggttctttctcacagaactattggcacccactgcaaccagctacacaattttctttacaactctgcagcaagctagacaggtcacaggcagtccaacctcaggaggttgcctgtatcatgttgatggtgaagctgacaccatagcatggaaaccagagtccactgctcccacagctcaatgcttagctgtttcaatatgttgtctgaaactgcatcttctaattcctggacttttcagatctgtactgactcagatctgggtggggcttagtttgaaggagggagtccttggtgatgatgtgatttccttggtctgtcataggtagcaaatcaaacgtaccttggactttactctctgagaaactcatagctgaattcaatgtttattcttatggactacttagcatttgactagacggtatgaatttctaagtaaggtaaggatttctttctaagttgtttatacctagaacttaaaagtgggcatgaataaatcaaatatgggtggtttttagttgacactttattttcccgttaggaaaaaattagtgactgatcttttaaattgatttagtgcatatactatgtattgtgcatatgca

SEQ ID NO: 30146 - DNA, 2300 bp, Homo sapien
agattcaggtgcaagtgatttattaaaatagtgctcttagacgaaaccagttagggggtagagaaagccagagtgatgggtagattaggaatataaaccaggtgagccaataataggaaaagcatggtttgctggggcttccaggaaataagcttctctccttaataagaagcgctggtgaagctccagttcttttcgtctgggtttagcggtgtgtgaggtcaggcctgaaacatctacagccacttcattatcacgagggaagctaggttgtgtataaggtaaacccacaggaggcaaagcagagacgtgaaacctagtgacatacgtcctgggtagagctggccagaggctcctagaagcctcagttatgtttctcagaagattccctttgttgtctaagccagttccaggatgttgctcttattgcttgtaacagaaatctaaattcccaaacactttattttaataatgctgtcatatttatctaaatgttctttaatctgggaattgagagtaatcaaaaatgactaatgacatcaaatatttacgtttagcttctaacacagctgaaatatttcatagcagtacaatgaaatgagagaatttcctttctctcattttcactgaaattttctcttcctttcactggaaaggaaggaattatacatgcacaatatctcttctaatttatgtcttctgatcttggagttagtctccttaaaatttgagtgtgaggagacctaggccctccaaaccaatgttccctattgaatttagcgttttattttatatgcaaaacattatatcctaagtgtgctttgtagattacatttctaattcctgttcactcttgtgcttttagtgttgcatgctctgacatagttctgcaagctgtctttgaaaagctttttacctcttctttttactgtacttttgtcttccctgtgaattccagagacgtgactgcagaaatagatgactgaatactaagtatgtataggttctattttcccacttttatttacgtttctgaggattccaaacacgtttgttgttcttgaggcatttcttctagagttatcttcttacagtcttttttattaaggtaactccagttcaattcttaccccttagttcctccccaccccaccacaattttcctcccctgcccccaattatttcaattgtccttgtctcttatattcctattttcttccgtaggctaatttgagagactgcattgtttctctttcccttttggaagttgagggtggcccgtggtagttttaatctgcttggcaaattcttgtaatcttttctcataaggattctacccctttctccctcaactcaagcagcctcaaggtcatcttgcctcctcctttcttcttggaaccaagcagcatgctttacttttcacttcttcctgcttgctaccttaactcctctattgtttctcttctgcttctaaattggtttcatccgagtgactcgagtgactcgcatttaccaagtattgcctatgagctctgtggtttgtgtgctgcctgtacaatataaaaggtaatccacataactgagctgaggtagtgggttgatattctcattttagaagaaagttgagatatgctatagtttaggaaataagacaagtaatctagatttgatttctgtgttgctatttatattagtaatctaattcacacaagaatgtatacttgtgagttacatagatctgatttttatagtagggaaatgaatattaacatgaagattaaacagtctgactttaaaatggtatataaatgagtttgaaagagaaaatacctgatttcattttctgttctgttgtagtaggagggttagtctttcgataacaggtctgaaatagcatgatacctggaaaccatgattactggaaactgtaaatattttaccatccagggttcaacctcctaccccttattctcctgacagtacgctgagacaaacattttattaactaacatctctctcaacattttcccctgctaattgcattttgattggttcaaattccgtgtggggattccttgattctgacagtacaagacattcagttctcttcaagtcatgtaatcgacttttttgaattagttttcagtttcattttgttttccctaattcaagttgggaacacttcattttccccaattcaagttgggaacacttccttggtatttccttgctacatggactttagcaaatgctactttactctccttccagctactcaggaggctgaggcaggagaatcg

SEQ ID NO: 30147 - DNA, 2300 bp, Homo sapien
catgtagggatacataatagcaacatgacttactgataatgttaatctcaatcacatggttaaagtaatgtctgtcagggttttccattataaaattactattttttcccccatgctctggttgttggaactgaatgactaaatccagcccacactcaaggggagggaaattaagctgcccacctcttggaggagggtagtatgtttatatatattatttgaaattatttggtatggaaaaaagttatgtattcaaccatttatgcacattagtggattatttatattacatggattttttattctttgggttataatctaatattataatttattttgctgcttaaaatttctagctgctttggtcattacaggctctttaaagttgatgcctgtgtccttttgacatacccctactttttaaaaattagcactttctttctcctcctcatgactccccaaatttgtattcttataccgcttatatttatctagatcagagaaaatatatttttccagagagaaattaggctaaattaataaaagatgttatattagtcccagttttgatatttataggaaaaacaagtcttacatgaataaaaagcaattatacattttacatattaccttcaggggaaacatacccaaagaattcaaaattcatcaaaaatacctgttaatatatttgtgttattttcatccatcatattctgtagagattaatgacatattgttcccctcttattggaaaaaatcagctggcttaattgttaatttttttgaaatttcttggcaagtcagagtaattcatttggattatcaagagaaatgttcatagtataatgatctgaattctgattctcacaagtcattaatcactgaaaatgaactgcatcccacatccacattggcagtgagaataaatttgcttgtttgttatgattatggatttgatttctcatctcagcacatatagaactggatgcccttgtggtacatctcaaggctgatttgaaagcttgagagaccatcaagaattggatttggggaagaggtgagtatttgctatactatattttactctatgtgtataaattccttgaacagaaaaattttaatacaacatttaaaagacatattcagtcatcatctttagcacaaatgaagttttggcaaatgtatgcagatattcctacacaaaaatactatttcttgcacaagaaatagtattaccattcaccaaaatgcactataaatctggtagagggttgtaacttatagaccttccatgttgttttaaagaaatatagaattaagaacatttacagaaatctgttgtttctcactttaccaagtgtaaataggggtatgtgtctgtatctagcatatgtacttaggaaattgttctactcataacaaacctatggtcttttatcagcggtgtgatttgcaagtagtagagaacaacacctgggaagcttgtctttctgtgttttctaataagcctgtaatcattttgttaagccccttgggatggccttggtctaaactgcctcttgagtaatcccaagtactgacacaactttgcaaataataatcaaagacacatgtaaatatgccaactaaatttggacctatgtttaatgcttacttatgttatttagtgcacagtgaaatatttaaagtgatggctaacattttgaaaacatcaagtaatatcaaacattaagtattatttacccagatataagaaggagaaaatggaaattcaagtgagaggagcatcatggtaaatcagtctgtgccaaaattatgaatgaaatggagctgcattcttgatactaccttcaaaaatcctccaacttttctagagccaagctctagaaaaagcttatccctttttctagatttaagattgggtattgggcacaagaaaggagtgtagctttcaaggttggtcttttccatagttgagaactagaaactgagctagagaaatcatacatggtatatacacatttgattgcagtaactagggcctgacatagatttgattacttctattttaatctcaagagatgtctatgtccccaaactagtttactctacatcatagcagagaaaatggacaaaacacagctgttttggtaagtatataactcacttggtatgaacagaattgtgcagatgtactgcagcggtgtgtcagtgtctgcttatcagttcttgttctcttttctgcccttcctcactctgctatgtgccacattgcaagaaaccacatttcccagactgcc

SEQ ID NO: 30148 - DNA, 2300 bp, Homo sapien
tgatcagaaatgtgtatgttttaaaaaaggaaccatgctatttagaaattgtattgtaatctaatttttctccgataacctattaagaaattccttccatgccattgaaccatcctttacaatattatatttaatggccacaaaacaattatttgtatgaatgtaccactcttttccaattcccttttgcattttaaatccataacatgtgcactttacttctctttgatagcatgactaatatgttctgcacaagacatgaaggcacagacagcactgtctttcttcctcattctcataacatctctgagtggatctcaaggtaatttcgtttgtaatacaagtgttagttatttgcattatcagatagaaacatgagcacacaatgcaaggtggctatttcctccatagccacagcatcgtgaactttcctaaatcatcagttaatcagaagcaaggaacaggctggaagtctgcatgaagactaaaaattatatatattttttctgtccactctgattaagactctttctaatctgttgtctgctaccagaagtaagttcactggaaaggcaagtttgattgattgatttttttttttttaagtgtaagcttggtacttaccacttgacagaaggcattatcagctttgctaggtcctatgacaggcattcttaattatccagtgaaacattagaggggtttagcagagcaattagagagatcgacagtcactcttttcctttcccatctttctgtgtctttctttcagcatgatgccacatccctctagctctctgcagagagattaagtctctctgaggaagagaggcgggacatggtagggtagaaagagccccagaagggaaggtagaggataaagactgtgacagagccacttgggcacgcagttcttccatcttgggtggcctgggccatgagccaaaggagttactccattgtccaaaaaataaggtcctttccagtgctaatatcttagaatccatagacagggcacaagatctacttaaaatattttgtaaatcaaagcagttagattacctccttcaatgataggaagtgtctgggtatattttctttgcaaaaatctcttattctgttgatttcatttgctttttgaaattaacttgtgaagttgacagtgaaaagaaaacaaaacaaaataagtaaatcaagagaattggggattaggcttccagatttatctccagatattccttacctacattttgaccaactcaggatatcctgagagcagtcttaaactcaaagcaaatgaatgactctctttcccttttggactcctcctgctcatgtccttccctatttagatctagtgtacagatatcagattcctgaacccagcattgtcttctatgtgctccaaatattttcttacccagtcaagctgagtttattccattcttttagggcctgctggctgttgctagctggataaactaatttattgttgctatagtaggagttaaatgtgaatgtgttctgggaatgaaatccaatggagtcttttaacatacatgatttccaggccaggattggaagagagataagattattgatcaagtgggcagcaaaccagtgtttctatgccttgggctgttaccagttctcccagttacattgcataaaacagatattcaattaaaattaaaactcaaacacagagcttcacaggtttgtttctaataatcagacaagtgtttttgattatgtggtctactaataatcaggctgctaacctaggatagttcttctgggtagttctggtataatcctgaacaagcacatggcattaattctctttataacttctctgctcttgactgtaggcatattccctttggctttcttcatttatgttcctatgaatgaacaaatcgtcattggaagacttgatgaagatataattctcccttcttcatttgagaggggatccgaagtcgtaatacactggaagtatcaagatagctataaggttcacagttactacaaaggcagtgaccatttggaaagccaagatcccagatatgcaaacaggacatcccttttctataatgagattcaaaatgggaatgcgtcgctatttttcagaagagtaagccttctggacgaaggaatttacacctgctatgtaggaacagcaattcaagtgattacaaacaaagtggtgctaaaggtgggaggtaagtgtgcatgtaaagtttcatgaaacagcaatgacatcattccatgttattagtaagcgtctttttcctaat

SEQ ID NO: 30149 - DNA, 2300 bp, Homo sapien
cctggtatgcttgttaaaaatacaaattcctgggccccatttcaaagctactgtaagaaactgtaagaatcacaatttgtaaaatattttggtttagggaataggtaactttggttgagacctcgcctcccagtttctatcattcttcctactgatggaaagtagccagtgctacctggggtgatgcaggagatagaaatggacccagcttgtgtagggcatggtagacaaaagcttgatatgcatgtcaaaggtcattgtagggagcatgggaaacacatggaagcaaactctagagcaaacccaagaaggctgagatgagttcagattgtaactgtgattaagaagttgacagagctatcattatatattattatatataatatctatttatgattattttaagggagaaagctaaacacaaaagaatccaaaaaaaaaaaaaagaaatattttgaaatccttctttgcttagtcaaaattccagcagaactgagtgaccccatttcaattaacattgtgagtatgtcagagagctgccattggggaaagaatcttcctactgctaaactgccacaccattgctcagcccccaaatcctgctgtcatgtttaatgaagagatcaatgatggtcgattggactgtcctctttgttcagtgatggtgacaggtcttgtatacaggctgaatggaatgcagcaaaaactgttctgcttgtcaacctggggtgaactaagataaaatgtccccattatttcccatacattggaagcttctctgatttgcattgacccttcctaaatgtcctgatacttctttctatttagcccctgttctggggttttcagtgaagttgtacatttattattctatacctctctccatctgtgcttctttgagccccgtttgctgggtaggcagccattctccagccaggagctactcagaggccaatagcctggatttttacctccccccagccccccactcttgatctaattagcagacacaagttaagtgaggcaaatggatcattaatatgttgcccaaactggcatattatgaaggataggtgaggtctcgagatggaaggtgaaaatgtatgtaaagttatattacagcaagacccgcaacaattaagaacttgctcatgaagaagaggttttatttagccaataaagaagacaaattagaggggtctaaagttatgaaaggtgctctgtagtaaaaagcccctttgctttttacttgacccataacacagaaacaatgggtcacccagtaagagctggaggcagtgcctgtgaaaggataaatgaaagagtaccacatgctctttgtgtaactccgtgctggcagaatcattgaggcaaaaattttagttggaaataacagtgaactctagttagtgacttgcaaataaccttatgaattctaaatttagcctatgaatttaaaaaacatatgactcagctcaatttattagaagagatgtatattaaacacgtacatccatgcacttataacagttacagtgcaatattcagagggaactctgctttcttaaaagatgatttcctgagcagttatcaacctcaaactctgtgcctacatggatatttccagaagctgtggtttaagcagcacaccactgatttttggaggcatgctagctcctttaggccaccaggattctattaagtgctttagaagaagtaatctaatctactgaattggcctgagagattgaaagcacctccaaacacaagcaacttctccacttctcagtgatcggatcagggacctgggaatattattgcagctgtttaggaaaggtaggtgaaagtgctgggcagagggcaggcaattatctctttgctgtgtgttaagcagcattttcgcctagctgataaattacttccagctgttggcaacaattttctcctcatcatggcaggagcaagagacactggcaaatgttgaagagcagtgcgagtggctgattaaatccaagatccagctggaggccagagtaaaggagctgtcggagagggtggaggaagaagaggagataaattctgagctgactgccagggggcggaaactcgaagatgaatgttttgagttgaagaaagaaatcgatgacctggaaacaatgttggtgaagtcagagaaggagaagcgtactacagagcacaaggtactttttccataatgttagttaagaaggcctagcagccagaattccactctcaaatcaggttttggtatctgacttgctctattcaagttaattaac

SEQ ID NO: 30150 - DNA, 2300 bp, Homo sapien
tgttctttggaactaaaagacaagaattgttcagaatggccttttttttaaataattctttaagcaccctctgaaaatacttgcctccaagtttctgacggatctgaacattaaattgcttgtgataaccatactttctcctggggaatccaaataatttaaaccagggttataattctttttaaaaaattaatgaaaggtagtgttattcccttttcatagatggaaaaactgaagtacaaagaagtcaagtgtttcactgagagacctggggtgtttcaaaagaacattagtgattgagcttcatgacatctgccatcgcacagttgctactcaggcgcagagaatattttattagttttccatattgacagctaccctattctgtccagcttgcctatggattttgttgttgctgtgttgcacatcttagtaacttagcactattcaaatgtttgtaaagctggttggcctagcacaggttctttttcttcaagaaaatggaaatagacttattattttttataaatcatgaaaataaatacatgaatgttgctaaaaacacagacaatatagaaaaactgaaagaagaacataaaaattatctgtaatctcatatagattaacaaactgtttacattttggtatttacacctcccaacatttttcatgtttatagtcacctataacacagctgcacttaaaaaaacatgtatacatactcagggtcatcatatataaaatttaggctttgtaaactaactttttatctaaaaacatcctagaaatctttccatataagttatatggatccacatcatcattttaaaagcttacagtgtttcactgtatgcatattctctcataaattaatctcctatgatgtgcatttgttgatgaattttatttttgcttaatttttttgcaatgactaaataatgcttcagtgagtatcattgcacagttgcctgattatatccttaaggaaaaacactaaaaatatacattttgtgataaaagacataaatattttgaagcttttggtagatattgccatattgttctagaactctggtgaatttatgcttccatcagtggggtaggataatgtgataaaaatgagctttttacatgttttcatctttttctttttttttttttgctagctataccatttggggagaagaaacgaaagaaaggagcttcattccaaacggttgcatctctgcataaagtaatttttaattgcgtctattcatatattaattgcctcacaatctgcatatgttattatttagttgacatttcacatcttcaaataaggataaagtatcaggagctagcaagttggaaaagttgaagtttatgctgttattatcaagggctttagaggacactgtttgttcccacttacatcccctttatcatgcctgcacccatcttccagctgatgtgcatattggctcataacaactctgagttgtcagaattgcacttagccaaaggggaaactaagctgcctctttgccctcctctccagactttagcctctcccttgcctcaagggagaccacctatgctgcaattggtgcattcgtgtttacagctcttgcttgcaaggatcagactaaagctgagtctgaatcattgcttttctcttcccctgctgttcccagctttcttcactccctaaaaatctcttgaaccagaattcccatctcaggtttggcttctagagaatctgacctaagataaaggttttccacagagagagaacttgagaaacaatttcttttttcaagccattttatagcccagccataactttgatattgctatcaaattcaaaataggtagagatgattcacaatttaactatgtctgtcaaataaatattgacttgccataggaaagaaataatgtgcatttggtaggcagtaaagaatgttgaattcattattttactgttagaatacatcttggctgtgagattaagttgatagatttggagacatttgtgaggtggattggtgtttttagtgatttgcaaagtgattttgtgtttattatggtctccattttaggaaaacctgaataaattgatgactaatctgaaatcaacagcacctcattttgtgagatgcataaatcccaatgtgaacaaaataccaggtaagaactagatttctttgtaattcacactaggaaatagatttgatattagctatattgaatatcttttaaagaaatatttattggtgccttttatataagggtagaatttcatatagaaaaatgaa

SEQ ID NO: 30151 - DNA, 2300 bp, Homo sapien
cagagtttcaagtgcccgtgagaactcaccagatgctgcaggaaccatgacactttacaacgcacaggccactctcttggaatgaagccattcaagcacaccctgcccttctcaaaggaaagagaactctccctggggtcccaccggcttctctgggatctgtcatgttatcatacacattaattttaaaaataataatatctttctttgtattcccactggttttaggtttctcatttctctgttgtattatggttaccacctgcctgaaatctttggtctcattctccctcattcatgagttctgtcctgcatcctgctacccattcagtctttgtaaaataccactagttttaagccaaattttgctgaaaagccttcaatagtttccaataacttacagcaataattctcaaattgtgcttcactgaaccccatgatagcgctcatcttgaagtcaacacttcttgaaccagaacagctattccatgctctacttattgtattcaatatttcctatggtttcttgaatatattaaatacagttataataactattgtaatgtttttatctactcattccatcatctatatcatttctaggtccattttgattggacttttcttctcatttaagctgtatttttctgcttctttgaatgtgtggtaatttttaagtatttttagagcagttttaggttcacagcaaaattgagaggaaaatacagagattttccatatatcccctgtccctacacatgcatagcctcacccattatcaacatccccaccagagtacacatcttataattgatgaacctacgttgacacattattattactcaaagtccataattcacattagggttcactcttggtattgtacatcctatgggtctggacaaatatattcaccactatagtgtcactcagaaaagtttcactgccctaaaaaatcccctatgctccacctatttatctctccctcttcacaactccctggaaatcactgatattttcactgtctccatgttttgccttttcaagaatgtcatacaattgtcaaacagtgtatagccttttctgcctggtaatttttaattagatgccagacattgtgaattctagcttgttaggtggtagatatatttgtattcctatagatatctttgagctttgttttgagttgcagttaagttacttagaaactgattctttccatttggatttttaagttttgctagaaaggacaagagcagtgtttagtttacggctaatctccactattgacatgaaacccttgtgaatacacttcctgattccccatgaagtatgaagttttccactctggcttgcaggaacaaaaactatttctaaagggctccaaggacttttcttctaatttatttgggtggtcctttcctcatacacatgcacagatcactacactactgatgacttgataaggatcctctgcagttccccagagctctctctgagcagctctctcctatccagtactctgctctataaactctagccatctcagccactacagactgctagcttcatctccttaactcaaagaggttgctggtcatggtctgaaaactccctgtgttatgtcttggaaactcttcaagctgaggcagtcatggagctcaccttgtttgctcccctctttcagggatcagtgtcctttgtgtttattaatcaattatttaaacccattgtatcatatgttctgtgcttttttcttaagttgttttaggtagggggctaaatcttttccctgtttccccaccttgttggaagaaaatgtctcagtcaagagacctatgttggagattgtttgaaaaaatgtgttttgccttaaaagaatgttttgaaatatagaataaaatctaaactccttagcgagatagccaaagccttccacaatgtgctctcagtctgaattttgaaattatttccctgtcccaagcacaatgactaaatatatcttgtatgtttccacctctttattcacagatttcccatgctgtcaacataatgttgccttcctggctatcattctctcatcggatcctcaatttaggtcatttctacttcatatgatcattttaattgtatttacctcatcttaccaaaaagatcatggtgagtggactcccaacatatgttttaatttgtctaacagaatgctgaatagcctgacagtagcagcctagaattttattcttgatggtcttaatcagcagcacaccaattactacatgatagtataaaaataggctatg

SEQ ID NO: 30152 - DNA, 2300 bp, Homo sapien
aattttataataaatatttttttaacagcaacaacaaaaatacacaggaagcttttcaagttacaagttaaaagtggtctgtaaagctgctctattttgtgatggcctgcttgcataaactggtaatctgacatgaaacaaaaccttaagagcttcaaaggggaatctgcagcctcactgaacatggaagtcttatcctctgcctctgtgtgtgaggccttcccaccattttgactgtgtcttggcattccctgtcttatttgtgttgtaaataattttctctttgggcattatctcagatgtccattttatgcttactatttaatgcccttatttgacattatcttgggcgtttaataaactgaatgtatattatggatgcattggtaggtagggtttttgtgtgtgtgtatttacttgtttgttttcgagacagggtctcactctatcacccagactggggtgcagtggtgtgatcatgactcactgcagcttcgacctctggggctcaagtgatattcccaactcaaccccctgagtagcggggaccacaggcttgtgccaccacaactgcttaattaatttatttttttatagaggggtctcaccaggttgcccaggcttgtctcgaactcttggactcaagtgatcctcccaaagtgctgcggttacaggtgtgagccaccatgcccagcctataataaattaggctgagtgcctgccatcttgcagtttgcactttagttaagagataagtgaaaaaaatattttgttttgtggtagaaagcgtgttccagataaaggaacagctcatatgaaggcctgaggtaggagaaagagaggattttaaagggttagaatggaagtcaggttggtgaaaagtatgtactgagtgagaaaggaaaaggactaaggacgtaaaggccaggtgatatcacccatgataagaacattattctgaccagtaccaataactttgtacttattacagataatccacactcataaactagtcttacaatgcctccaaaccagaggtgaagctgtcattataaaaggttagaaacagaaaagtgggtgctctggaaaattcagaatatttcccaagacttcatttcatcatggtctccaagattatttgaagacttctattcaaaaaaaggacccattcttaaaaattccctaattctgcactaagtctgccttttcttctattttcgtataatttttttttcctttctttgactcccattcagacttggagaaagtatagcagcaaacaatgcctatagacaacaggaaacagaacatatacccagaaaaatgccctggcaatcatcaaatcacagttttccaacatcaataaagtgtttaactcctcatttgaaagatggtgttcctggattgaatattgaagaattaatagagaaacttcagtctggaatggtggtgagtgaaaaaatagcaattataacctggtacatattagctatatgtcagtcccaattataacgtgtatctaaacactgtcaggtacagatttcactattgaaaccttaatataagaaataacaatattctggaaaatttggaaataagaaaaatcagtcaaaatttcaacattttgccgggtgcggtggcttacgcctgtaatcccagcattttgggaggccaaggagggtagattgccagagctgaggagttcaagaccagcttgggcaatatggcgaaaccccgtctctattaaaaatacaaaaaattagctggacgtgttggctcatgcctgttgtctcagctactctgaaggctgaggcaggagaatcacttgaacccaggaggcagaggttgcagtgagccaagatcataccacttcactccaacctgggtgacagtgagacccatctcaaaaaaaaaaaagaaatatttgtgacttacctgatgtagcatttgtttttattttgttactcatcattaagttttaatgatttagttttgaagtaggcatttattttgtcattgtgtcaaaatattttattaaaattttaagtttttttactcttaaaatgtaggtaaaggatcagatttgtgatgtgagaatatctgacataatggatgtatatgaaatgaaactatccacattagctgtgagtataagcttattttaacaatgtgtaataagctttaatagatgtattcctaaaatgaaaattaatgatatgttttcttgtagtccaaagaaagcaggctacaagatcttttggaaacaaaagctctagcccttgcacaggctgatagactga

SEQ ID NO: 30153 - DNA, 2300 bp, Homo sapien
gactgtactacagtttattaaagattatcatttgttatagtaaatgctaatggactggattcttttaaattcagatactatcaagttgattaaaacacaaatcccaattatatatcatttgtaagaaacagacttttaaaaagttggaaatagagagacaaggagatcttaagaaatttttttttttttagtgataagttggtagtatgtgaaatgaggtggaatttatcttaacatctaataaactggttgatgggggatgttatggtataaggcccagtttataaagtagaggaaaaatggggtacagtaggagagctaagggtcataatgccaaccgtatgcaaacagtgtggaaataaccatcctgaaggttttatattctatgctacagtatcctttatagcggttattgaattttaggattataacaagtattactaattctaattttattttttagggtttttttggtcatttataaacaaaacaggtttctgtttaaaaataatttaagtactatggaaggagtgggaggagtttaacgttggctgaagttgaccttccctctgaggttctcacagtcctgcttatcaggagtaaccaccattaataagtttattttataatcttctagaacctattcacacatttgaaaaataatattgaaagaaaaaacttaagttttgttttagaatattttctttaaaatatgtagcattttcagcttcatcatacacttgctttgtatattaaagttctgtgaaattgatgtttaatgaacactttatattgcacaggttttagaattacttcttgccttctgttcagtgactcagctgcgccatatgctcactcagatgatgtttgaacagtctccacctggcagcgccactctgggaagccatactaaatgtttagaacctactgtggctctactgcgctggttaagccaacctttggacggatcagaaaactgttctgttttagcattggagttgttcaaggaaatatttgaggtaataggatgactgacagattgacttttctacttttgtgactctcagttaacaatttgtcttcaaaaacattctttgtaaacttacagttcatacacttgaggaaaacatctcaattactaacagtcatactagactcgctaggtttttttctgccagtcatatatattagtgttttccttttttttcactgagtagtgtgtatgtatatatatatatagtgctcatttcagtgtaataagtaaagatattaaaaagatttatataatttgttgcctgactactggggatagttacattgtctctccattgcaatagatgccatctaccaagtttagtaggccattgaatggacaatagaggcatattggattcagtcagtgaaatggagtagagcatgccagataatgtgctaggcacttaagatacagacaaaactccacattctggtagatcttactatctgggcaatttaatattctctactattctccctgtttataaatccattctgtctaacccaatatctcctgaaagtatttcccttcacataactgggtcttacacacaaacaaatatgtgtatgaagtgattaaatatgttcattaagaattattcacaaaattttctattttatcttggtcttgattatttaacaatcagttttaacatttaaaaagccctttgagggtcttgagggaaattatttgtggtcataaactattaagaccaatgtctattatttaattattgttattacttttagcagattcaggatatttgttttcagtagatacttttagtttagaataatttttaaatcacaaagtctgtttaaaaaagtcttatttgtaaaaccttactgtctaatttgagaaaaaagccatagccctcaaaactggttagaagtataaattttaaataaaaatttaaatattcacaggagacttaggtcaatggcatattgaaggaaatataaaaaatttaaagagagtgttacaattcagtgatgactttttctgtattgtatattccatctttgcttttaatcatttgtgatggataattctccaggatgtcatagatgctgctaactgttcctcggctgatcgttttgtgacccttctgctgcctacaatccttgatcaacttcagttcacagaacaaaatctagatgaggctttaacaagaaaaaaatgtgaaaggattgccaaggccattgaagttttgttaaatatcctttactgtcattaacgtgaaaactgtataactaaccattct

SEQ ID NO: 30154 - DNA, 2300 bp, Homo sapien
gttgcataagtagagatcgctccactgcactccaacatgggtgacagagtgagactccgtctcaaaaacaaaacaaaaaaaaagagagacttaaacaaaatatgggatggggtctttactgtattcctaaactttcaaggggtttacataaaactcttctaccgttgttgcaaaggtatgaagagcactggcttcaggttactactaaaaaggactttttgtaattaagagataaaatacatacagagcataaagtgcattaatcttaagtgaagagtttgatagtttttaatatataggtaccatagctaccatattggtagctaacatataggtagagtagctaccacctgtatcatgatacagaacatttctagccccatagggtttcttcattgcctcttcacataaggtttgggtaagtagactcatacaatatgtactcttgtgtctggccttttccactcaataaaatctgtgaaattcatgttgcacatgtaccgctacttcattttttttattattgatgtgtagaattctattgtataagtgtaccacagtttacatacactttcctgttgataggcatttgggttgtttacatttctgggtggaattaagaataaagctgttgtagacatacattttttgtggatatatgcacacatttatatacttaggagtagaattgttagagcattggaacatatgcctatatgttccgttttagttgaaactgccaaacaattttctgaaatatgccattttatcttcccactagcaatatgtgaaatttaccatcacttatccacaccaacccttgatgttttcatatttcttaattttaaccattttggttgacagtatttgtatttttaatggtgaatgtctttgtacagacttcatgagagcgagatctgagtatgcaaagagagatgggtatcatgtgaaaggagattattcattcttctgtacttctcccacacttttatagccccatgcagagtgtaggctttgaatgtttgatgactggcaaagctgagctaatctgatttttaatgatgatgtttcataacactaattttgtgtagtgattaaaagcatgaattcaggaaccaagctgcctagatatgaattccagttgtgcttctttactatcagtgtgtacctcagtttactcatctgcaaaacaaaatagtggtacctaccttatagagttattatgaagatgaaaagagttcacatatgtaaagtgcctagatcgatgcctaggccagagtaagtgctgtataagtattagttattattaaaataaattatctttgttttaagagattcagtataagtaaagggaaaacttgtaaagcaatttttattttacctagtgcatataattattacatgttagacaatttatgttaatgagatacaggaccaatcctatagagaatcatttttaaaacagcaagtgtcttattctggagagctagatttataaataagcaacagggtaatgcccacagtatttcctaccccagaatatctgttactggcatctgcactttcatatttggacttattttttcttgtatagacttttactttagtaatgttaaaacactccttgggaacagataatgtgaaactcttatcagcaaagccttagaagaaaaactgatgtgggtgagagaataaagggaggatacagaaaggaaagattagagggatgctaaagcagcctgcttaggcttgatcttattaaaataagtattcaggacagagttagtcttattctaaggtaactaatggttttgccatctttgtagaaaagatatgctttgtaataaatacatccataaagtatgttgaaaattcatgctttgagacaactgcttttggcctttagttccagctttacctcctctcttctctctttcactctgtgtgtgtgtgtgtgtatgtatgtgtctgtgcatgcgtgtatgtggcttatagattacaagaaagtaaaaaaaacaatggaataatcagaaataaaatttttcaatgccttgcctggctacttaaaaaaagattcacttttcacttccttctttaatcccttaacttctgagctcacctattgtctttgggaagaagcagaaggaataatcccataactaccctctgggcttcatttttcattctcctccctcaaagtaagtagaatgtattagaatttatttgcatagtaaatatattggtactagagtgcagatttgtaggctatgccttcatcgcatgttcaatgtagtgtgaag

SEQ ID NO: 30155 - DNA, 2300 bp, Homo sapien
tcaaactcttcacttaagattaatgcactttatgctctgtatgtattttatctcttaattacaaaaagtcctttttagtagtaacctgaagccagtgctcttcatacctttgcaacaacggtagaagagttttatgtaaaccccttgaaagtttaggaatacagtaaagaccccatcccatattttgtttaagtctctctttttttttgttttgtttttgagacggagtctcactctgtcacccatgttggagtgcagtggagcgatctctacttatgcaacctcagcctcccgagttcaagcgattctccagcctcagcctcccgagtagctgggacaacagagagacgccacgcccaggtaatttttgtatttttagtagagacggggtttcgcatgttggtcaggctggtctcaaactcccgacctcaggtgatccgctcgcctcggcctcccaaagtgctgggattacaggtgtaagcccctgtgccttaaatctctttcagtgcacaaccttcctgtttattcaaagaaaggtaatgcttcagaatagcatacaaaatgcttaactcccgatttttaaattaaacggactgccctgcttattctgcggcttctggagcctatgctaattcagaagcaaagccttaagcatttaacagctaacaccttaattattaggtttgcaggcacttcttaaaataaagaatgaaaaagagaaaacaaatgtacttaggagatgggcacttgaagtagggaaaagaggagcaccagtgaagctcaagataagacagacacatttaatacaacagcagcttcactaacagctgctgttgctctactactggaaatcatttttttcctgtaatattttacaaatttttggcacattagtcttttatcatagggttaatataatacaatatattttaaaattatgttcaattctaccttaacagaggaaagctgtgacacagagagttaaaataagccttaattgagctttaaaaaaattaaactgaggtcaatgttagtttgaattccgtaaatgcaaaacaaatgaaagcagaagattaagatcctaaaacaaacggaatcgtctggacacatatcactagaatagaaaaaaaggcaattcagcattctaagattaaaaaactgtaagcaatgtattttggtaaagaaaaaggattacgcttactaggaaggggaagtgcttcttaatgttgaaataatgtttttcaagtttgagttcaacccgagttcaagtaagagcagtaagcaacaaattcaattatagattaccgaagggcaaaaccaagttttaatcatgactttccgtcactgagaatagttgtgtattgagggcttggtttcgtagaaaaaccaaaactagaagcaaaggaaaagataaagttccgagctttttccgttacctactcgaaacaacctgaacttcccaaccttttgccccactcccgcttttcctagagccttcagtgagcgctcttgcctctcgctgcggccagcggaaccccgacactcactagcctttaccagtacgaaaagacaacagagggatcgaaggactgtcctttctttcccaggctggggccgccactcctcggcctcactgtgaaataagaattgctaggggaagccccatctgtcctctaccccagagcctctcacctccaagtgccgcaaaagctgagtggcgttcgcctctgacttcacggctttgtactgactgacagtcaggagcaaggacttcaagcaggcagtggagtccattgcaccggccgcggcccggcttagggaccaccaccgcccagcgtgcgccggcctttagctttcgccgcgctttttttgattttcggccccaccccctcgctctcagaagcttccggatccggtcgggctccggaagtccctaggcaccctaggggaccgttctcggtgacggccggggtgggccaggggtcgaggtgatttgtgggtccaggacgggggttgggagctgcccccgctaacccaccctcgtctgagaggccgcgaggtttcggcctgagatcccgtgaaggcgagaaatctcgcgatttctcgggagaggaatcggttaggagaagggggattcctcactcagctgtgcgctctgatttcgtgcgcttcctcgtccttcatgttggatggccagtttttcgtttgtgcgtcatcctctacctgagaaatggtcgcttgcccctagtctagacacggtgaggagctctgaggagaagaatcttgggccctagattttg

SEQ ID NO: 30156 - DNA, 2300 bp, Homo sapien
ttttagtagagacggggtttcgcatgttggtcaggctggtctcaaactcccgacctcaggtgatccgctcgcctcggcctcccaaagtgctgggattacaggtgtaagcccctgtgccttaaatctctttcagtgcacaaccttcctgtttattcaaagaaaggtaatgcttcagaatagcatacaaaatgcttaactcccgatttttaaattaaacggactgccctgcttattctgcggcttctggagcctatgctaattcagaagcaaagccttaagcatttaacagctaacaccttaattattaggtttgcaggcacttcttaaaataaagaatgaaaaagagaaaacaaatgtacttaggagatgggcacttgaagtagggaaaagaggagcaccagtgaagctcaagataagacagacacatttaatacaacagcagcttcactaacagctgctgttgctctactactggaaatcatttttttcctgtaatattttacaaatttttggcacattagtcttttatcatagggttaatataatacaatatattttaaaattatgttcaattctaccttaacagaggaaagctgtgacacagagagttaaaataagccttaattgagctttaaaaaaattaaactgaggtcaatgttagtttgaattccgtaaatgcaaaacaaatgaaagcagaagattaagatcctaaaacaaacggaatcgtctggacacatatcactagaatagaaaaaaaggcaattcagcattctaagattaaaaaactgtaagcaatgtattttggtaaagaaaaaggattacgcttactaggaaggggaagtgcttcttaatgttgaaataatgtttttcaagtttgagttcaacccgagttcaagtaagagcagtaagcaacaaattcaattatagattaccgaagggcaaaaccaagttttaatcatgactttccgtcactgagaatagttgtgtattgagggcttggtttcgtagaaaaaccaaaactagaagcaaaggaaaagataaagttccgagctttttccgttacctactcgaaacaacctgaacttcccaaccttttgccccactcccgcttttcctagagccttcagtgagcgctcttgcctctcgctgcggccagcggaaccccgacactcactagcctttaccagtacgaaaagacaacagagggatcgaaggactgtcctttctttcccaggctggggccgccactcctcggcctcactgtgaaataagaattgctaggggaagccccatctgtcctctaccccagagcctctcacctccaagtgccgcaaaagctgagtggcgttcgcctctgacttcacggctttgtactgactgacagtcaggagcaaggacttcaagcaggcagtggagtccattgcaccggccgcggcccggcttagggaccaccaccgcccagcgtgcgccggcctttagctttcgccgcgctttttttgattttcggccccaccccctcgctctcagaagcttccggatccggtcgggctccggaagtccctaggcaccctaggggaccgttctcggtgacggccggggtgggccaggggtcgaggtgatttgtgggtccaggacgggggttgggagctgcccccgctaacccaccctcgtctgagaggccgcgaggtttcggcctgagatcccgtgaaggcgagaaatctcgcgatttctcgggagaggaatcggttaggagaagggggattcctcactcagctgtgcgctctgatttcgtgcgcttcctcgtccttcatgttggatggccagtttttcgtttgtgcgtcatcctctacctgagaaatggtcgcttgcccctagtctagacacggtgaggagctctgaggagaagaatcttgggccctagattttgaggcggcctgggaggggcctcgtttttaaatctctcctacacccgccccttctgcccggggatggtagtttctcagagtcaacctattggcattatgtggcaaattagtcatgccctgaccaaagtatttgtcacatttattcgagaagactacctcctgctgaccctgggccaggtattgctccggagggtgttactcgttagcgtcagtttttgtaagtgaaggtgtctgtttctctctggcatgattgattgttttataattctcgatgtctacgaaaatggcactattatttgcgttttttaaatcggagatagcttaatattattgcatgtgtatgtaatgaagcgagtcagttactggttttggagc

SEQ ID NO: 30157 - DNA, 2300 bp, Homo sapien
aaagacatttgatattaattacagaagagaatacaaaatttgtatgactgcttaagtcaaaatccaacaaagatggcactgatagcacgcagctttgcgcattaccctgggcctctgaatggggacgatgctgacacatcatcacagatgaaaagtccaacactatcaaactctgatcacttcatttgccaatgaggcactgactgtaacactgagaacttaattatgccagatgacagctgacactttacattaattcattttttaaccatctccaagaccgtataggacctcatctctactcctctcctcctcgttctttctacactagccacatggcatccttgtttctggcatacagtatcccactttagggtctttctttgccatttcctctatctaaaaaccttttcccatagaatatggctccctttctcaactccttgaagcatttccccaaatgttgctttcttaatgaggtcaccttcccatttcccttatcaattaccaacattattctagagtaataacgtctatttttctctttatatcattttccttacttatttattgtgtttattatttggttccctaccaaaatgtaagttgcatgccagtagtatttttgtttttttcactgagtctattgtgtctagaaaagtgcttagcacattgtagattctcaatgaactacttattgaatgaacagtcctatgaaccaggtatctcccttggccagattttacctaatgaagattctgcagcagtgagaacttgcctagagtcacatcgtcaaaggtggagctagaatctgtaagcaacctggctctctactctttaccactgctgcatgttactgcatggtgcctctcatttatgtggtgaatttcaaaagtactattttgtatgtttcccttactagacagttccctcgcagcaggggatactacttcatctctgttccctgactggcagtttctaacccatgttacacgctctataattgtttacggaatgaatgaaagcataaatgaacacacaagctacccaaagatttttacatgaatgtcccaactggttaaatcatttttatctttcagatttaaacttttataaaaaacaaaaccaaaacaccaaacctgtcttcaaaaatctagtaattcaaaaaaattcttttgaagtgaaaaaacatgatttctgataaacgatttaattaaatggaaatgtaccctattcttacaatttctacatcctggtttttaaagctttattcgacgttaggaaatattaagcaaaaagctccaaaaccagtaactgactcgcttcattacatacacatgcaataatattaagctatctccgatttaaaaaacgcaaataatagtgccattttcgtagacatcgagaattataaaacaatcaatcatgccagagagaaacagacaccttcacttacaaaaactgacgctaacgagtaacaccctccggagcaatacctggcccagggtcagcaggaggtagtcttctcgaataaatgtgacaaatactttggtcagggcatgactaatttgccacataatgccaataggttgactctgagaaactaccatccccgggcagaaggggcgggtgtaggagagatttaaaaacgaggcccctcccaggccgcctcaaaatctagggcccaagattcttctcctcagagctcctcaccgtgtctagactaggggcaagcgaccatttctcaggtagaggatgacgcacaaacgaaaaactggccatccaacatgaaggacgaggaagcgcacgaaatcagagcgcacagctgagtgaggaatcccccttctcctaaccgattcctctcccgagaaatcgcgagatttctcgccttcacgggatctcaggccgaaacctcgcggcctctcagacgagggtgggttagcgggggcagctcccaacccccgtcctggacccacaaatcacctcgacccctggcccaccccggccgtcaccgagaacggtcccctagggtgcctagggacttccggagcccgaccggatccggaagcttctgagagcgagggggtggggccgaaaatcaaaaaaagcgcggcgaaagctaaaggccggcgcacgctgggcggtggtggtccctaagccgggccgcggccggtgcaatggactccactgcctgcttgaagtccttgctcctgactgtcagtcagtacaaagccgtgaagtcagaggcgaacgccactcagcttttgcggcacttggaggtgagaggctctggggtagag

SEQ ID NO: 30158 - DNA, 2300 bp, Homo sapien
taagcatttaatctttacaaccctatgaaggaggtactgttgtacctcctatggatccctatgttttagataaggaatacccttacagtagtttaagagcactgtaatcactctgtaagggtatgctttgacacacactctgctttgacactcactagctagctgtgtgattttatgtgaaattaataaactttctctgtgcttcagcttccttatctaacgaagaaactcaaataattttgacattaatggatatctgcatactttatgtcattttgctttcttgtagacgtaagtttgtttgtgtctgtacatgttgtataatatcaggatggtcttatttttcttccccagaacaatctctaggtccacttaattaagcttgttaatcttaactcattcatttagctgaatgtttctcaatggagagtaattttatgccccaagggatacttggcaatatctggagatatcgttgattgccacaatggggctgaggtgtgtggatgtgtgggtgtgggtgtgtgttggtggggagctgcctctggcatctggtggatggaggctagggatgctgtgaaacatcttaaaaatgcataggaaaacttcccgtaacagggttatccaggctggaatgtcagtagttccaaaattgagagagcctgatatactgggcataggaaaagttcttaaaaactgtattcctttcctgaaaaagacaaaatatattactttgttttaagttagtagcgtggagaaaagtatgagctttatttttattgttttccacaccgatactcactttttcctcctggcattgtataatctgtaagtgctagagttgacaagggagggaaattcacgggacatccacccacactttgaaatgtaaacttgttggcatattagagtctctatcttggccaggtatttttgaaatcaacccagtagtgccatagatagttgtttttggataaacatagagattgacccttctggtgttaaagcttgaaacttgtatttatttgagtttcttcctcaggaaacgacctttaggcctctcaaaaaaaagtatccaagaactgaaaattaccagatcacttcaccagatgcctctttgcccctccctagttattatttttttgcacattattacatttcttccctgctatataaacccctagttttagtcagtcagggagatagatttgagattgagcttcatctccccagctgtagcacccaattaaagccttcttcctaggcaaaacttgtttcagtgattatctttccaggcggccagcagtaggatctagactgaacccttggtattttggtaacattttagtcaagatgaacatttgagtggatttttataaaaatgtgcctatatacagtttaggaaggtgatagtaacacaagttaaatgtttaagtggattattaaaaaattatgcataagagctgtgcctgctttgacgtgaataaacacagctttaaaaatggaaacaaaatacctttacaactaaaaaaaattgttaaaatttcagtaagtaagagggaaagtaggaactgagagttcaggtagaaggaacagtaaggaaggcatgtcactgtttattaagatatggatggtattaccttatttttcaaccagtaaaacacagcctacagataagatcatcttggttagtggataaaggtgtgctgtaaattgacattgaactttagcttgccctcagatcaaccaacaaggacctaaatagatttctggagaagagcagtctcttaatcccaggaagtcagagtaaatttagtttactgccgacagggaaagtctattgaaatgaatacgctaggggaaactagatttacctttcttttttttccttcatgttaacgctttcttaaaaggtttcctcttctagaatggtaaaaacctttgggttattttagcagctcagtggtgacatttcaggctgactgcttccttttggttgctaggcacttcgcctttctcgcaacagaggctgtaaagtgctactgctgttgctattgctggtagtgtttgccacacatacctgtttagctcctgggaaatgatgagattgatgattctttctcctggaaaacctttcatcacagagattcatctcaggttgtattttgagcaagctgaaaaagccctagcctttcttaactctgttaattcgggatccaagtatctttttgatttgttgattaattttccacccatttctttttcaagctgaacactgaacagcttagcagaggccttct

SEQ ID NO: 30159 - DNA, 2300 bp, Homo sapien
atatatacatacatatatatatatacacatacatacatatatataaatacagtatatgtatatacactgtatttatctcccccattacaaaagggcaaagagcttgtctacgttgtccaccactgagtcagcagagctagagctggtaaagagaagctctacaaattttcattgaattagcaaacaattaatcaacccatcatgtatcccaaatccaagtgtatgctctttcttattctccagtctcatttttcttctcttcaactcctgtctggtaattgaggaagcatccttgcctttttgctggcatctccaggcctcatttctcaaagttgcctgagagagatatgtataagtaatagctgttcattagagggcatctccaggaaagtgggcagaaaggctggtcacagaggtagagcccagcctttccagctctgactgcctcaaggaatagtcacctaactgcctttttctgcttctcattttattttattttattttatttatttttgaggcaaggtcttgctttgtcatccaggctggagtgcagtgaaacaatctcagctcactgcaaccttgaggctcaagtgatcctcctgcctcagtctcctaagtagccgggaccacaaatgcatggtaccactcccagtaaattttttttttttgatagagtctcactatgttgcccaggctggtcttgaactcttgtgctcaagagaccctcctgcctcagcctatcaaagtattggaattatgggcatgagccacaacacatggcccctttctctgcttcttcatctgcacttctttaaattttatttattcatggtggccacatgccccatcctagatgaggaatcatggcatcctcattcctcttggccatatgtgaatcctcaaagtcctcaatcccttatccattattctaaaatctaaaaggctctaaagatgaaaatgttctgtcctaaatttgaggctaactcatttggcagaaaaacttggcatggcctggtgtgaggctctttatggtcttttatttatcccacattaatattcatacattttgcatcaggctatttatgcattagactgcagagtgctgcccccaacctccttggtggtttaacataatatacagaatttgcaccttccataatctgaaacattctgagttctgaaacatacctgggccccaggtcttggataaggaattgtgaagcccagctctctttttcagccatagctgatagaaagggaggttgtgtgacccagaaccaaacagtggaatgtaaggggaaatcttcttgagcttctagagaaagatcttgctcttaaaataaaaaggtaaagcccctacagaaagtggccttgccccactccttccttcctgctcagggtctgggctgaggatgtggcaccttctaccttgtgaccatgaggagacaagatcgaaagattagctgagaatggtgggggaaaaagggaaactttatgagcccccaaaagaactctggaatcataaaccatgcttctagttaagtaaatactgaacttccttatttttaatccaggattaattagtctttctgtgactttcctccaaatgagattggccagggacaataaaatggtgtctgaacaggtgacaagtagggccctccctcagccaacagagataagaaagagcatacacttgggtttgggatagatgatgggtggattaatttgtttgttaactgcaaagtaacctcttcctgatgaaggatcaaacaagaagcctataataccggcagaccacagaaggcccaggtgctagccttatcgggttgccaagaagaaaggagaaggagaacaaaaaggcaggaggactcccttggcagagatccagagcaaaggcagctgttgcttctcatgaacactccaaagtttatcacagtcacctgttaccctagctggcacaggtctttgaaagtgtgctgggagtgtgtttacatgtttgtgtgtgcttgtatgttaaaggtgcccaggttaataccaggtgtattaaaacgcccttgcctggctagtccttgtagaccttctctgaatgttttggtgaataaatctgttcttcagcaaccctacctgcttctccaaactgcctaaagagatccagtactgatgacgctgttcttccatctttactccctggaaactaaccacgttgtcttctttccttcaccaccacccaggagctcagagatctaagctgctttccatcttttctcccagccccaggacactgactctgtacagga

SEQ ID NO: 30160 - DNA, 2300 bp, Homo sapien
caggtacttcaggctctttctgaagcaggacatatccttcctaatgtctcttctgctcttgccttccccagcttcctgcagctgtatgggtaaagtcatacccttgaggcagggaagcccttagacagctgctctcccaacaggtgggtttgctttgggtctctcttcctgttgggctgctctgagagatacttctgagcaaaccacagagttcctgcatttttgcctgagtcattcttgctgagttgaccttctctccattcacagccaataataattaaacaccgttttttctggaattgcactttatggatcagctgggatgaaagcatcttccttccttctttccccatcctctgcgataattttgttctaacaaaggaatgctagcaccaaaatttccagtcctgaaaccctttctctttccaatgtcctctgtaagctcgagttgtgggcatctactttgcccatattccaaggtcttgcttaggtaacctctgtagtcctttcttgagcctaggacttctacttttcttaccagttaccctctttcaggaccaaagctcaactcctcaaggccataactaggccctctcctctcaaactgatttatcaggtgcccgaatcttcctgaatgtctgggattcaacttttcagcagtcttcctccctacgttccatctaattctaagatgaaaccttctgattctttgttgtcctctgatccctacatgaacctgaggctgctgttccctgaagtcttgttctgtcagcatccaggcctgcttcataaaacctgtcactctgctaatggttagcggctgaacaaagagtcctctggccaaataagtttagaaaaactctgataaaaatattatttgggtttccttttcgcaggacttacctaagcctttaatatgcatctacggaggtaaaaataaagctatatattttttccaaagatatttgttgaagaaacatttgtcttctgcgtttcttaaaggccgagtgttctatggaacatactttaaaaatcccttttaaagaagcttagaccagagaatctccaaggtctctttcagttttacagcctctgagtcaacgattcaccaaaaaatattttgggggggagtgattgaagtggaaaaatgtgttagtgtttagccagctttgtccaaaggataagatgcactgtattttgcttactagggagttattttctataatggaagacaaagaaagcacaagacacccatggttttgtttgttcaatcactgagagtaagtctcaattattgagacttacgatgtgccggtgtgcttaattctagttatgaaattttaataatgaataatatagattctattccttatatgagtttccaaaagcattgtccagaacatctatattaaaatatcttatcatatacaatatatgtaatttaaaatgcactcagaaaatctgcttgttaaaatgcagattctagtgcttcaccctaaatagtctaatttagacgggcccaggattttaaactagcatcttatagcatacttatgtacaccaacatgtaagaactgctgctattaagattctgggatggtggttgagaacaggagcttgttgtcaggtggctctagattggacagagaaactcatactgataaggtgaggattgtcaggaaataaggcaggcatctagcctcgcattaagatgaggtatagaaggcaactgatacatactaagtgctcaaaaaatattaactccctgtcctccatcatggctcaagaaaatacaacagctgagcacacccacgggttgcttactatttactcatcagtttagtgtatcttattttgtttccatgtgaatttacttgtgaagagatgactggattctctccagagataggaagatccctcctggtttaattcctacctttatttatttatttttcaattagactcaggtattgataaaaattcaaatgtcagattacaaaggtgtgtgggatttttcttcccacgttacacaatttaagtcgactgttttcagatcaaaactcaagacaactccttcaccacatttcctgtttgtaactgaaacaaagtacacacaaaagattttaagaaacagaagagaaaagaatccgaggcacagataaagataagttttactgtcatgctgcttttaacataacagagcaacatcacctaggaaaaaagtttgtaggaggatttttaatccatatatttgtcttatggctagataaagatttctctgaaaaaaagaagcatgtcag

SEQ ID NO: 30161 - DNA, 2300 bp, Homo sapien
atcctctggcagacatttagaaacagtcttaaaggggacttccccaaagaatgctttttgaaaattctagcaggatatttctctaattcctagctgaataatcccgaggctgagtcctcactgtctcccctttgtcctttttactgtccaaaaaagagtatcattcactttaatggtttcaagtaattctttcaaatgggttcaaatgggtgagttttacattctatgaccttattttcacctttttttttttttttttttttttttttttttttttttttttagacagagtctcactgtcgcccaggctggagtgcagtggcacaatctcagttcacttgcaacctctgcctccaggattcaactgattctcttgcctcagcctcccgagtagctgggattacaggcgtgcaccactatgcccggctaatttttgtatttttagtagaaatgggatttcaccagttgcccaagctggtctcgaactcctgacctcaagggatccacccaccttggcctcccaaagtgctgagatttcaggcatgagccactgtgcccagcccttttatttaactctaattatgacatcgaaatgtcccattgagagtctacattgatatgtttgaaacaaaattaaccatattcactgtaaccaccaccacttctggtcaaggcagttcatttaggccatgatggctacttcttaggaatcaagggtttcataataaacaggtaatcagtcaggactaaggaatagggacaaagacagagaccagatatatgagctgggccaaaatgaaaataaaagaaagaattgagtgaggttagaaaagagaactgtaggccaggtgtggtgacttgtgcctgtaatcccagcactttgggaggctgaggcggatcatgaggtcaggagatcgagaccatcctggctaacacggtgaaaccccatgtctactaaaaatacaaaaaattagctgggcgtggtggcgggcgcctgtagtcccagctactctggaggctgaggcaggagaatggcgtgaacccaggaggtggagcttgcagtgagctgagatcatgccactgcactccagcctgagggacagagcgagactccatctcaaaaaaaaaaaaaaaaaaaggagaactataatttaggggtaacagaattatattctacctggggttttctggttctaagtatggttggtaccaaaatgggttgaggaccacacaaagcattcatttccactactggaccttggatacagttcttaggtccattgaccctgttcttaagttcattggcaaatggggcttggttaggacaagattagccagattagaaaactggagtgagataaagctggcaggccagtggcatgtgtagatacttgagagaccagaaaaaggtaagaacagagggtgggggagagaaaggaagaacactgccagaagacacagcccaatatgttcctttatctgactactacatctgaagttcttcttactactatttaattctctttacctatttttctctcttatacatagacttctttttaataatactcaatgtatgattttttcatgtaaaatgttatctaaatatatcttcacaatactcaggtatgaaaaggcagaaacttttattactgttttacagatgaggaaacacgagaatgtaagtaatgtttcaatatagttaataagtggtagaacaaagcatagaatctaggcttcctgattgcaactcaaagttcctgccattagacccactgtaccactcaataatgtaggcaaaatttatggctaacaatataacaaggatcaccctctctaaaatattgcgtgttcccttcacaaaaaactatgtctctgcatgactgtaagcatgttagttaccaagtgccaagtgaccttggttttaaaactgggcagataagttaatctcactggctttctattcttatttagcttgttgctgtaagaggtttagagtagctttctgagggcatatgttagccttcagttttagtgaggagtaagggactaaatccagcaaaaacttaagtgaaaacaacctgaggaaaagctgtagactgtgagtcaagatggggaatggcaaatctatagctggtgatcagaaagcagttcctacacaagagacccatgtgtggtacagaacatttatgatggaatatccatccggcctgcaaacactacatgaatttaagacacttttgggtctgcaaggtctgaatcagaaggccaataaacatattgatcaagtttataatacc

SEQ ID NO: 30162 - DNA, 2300 bp, Homo sapien
aaacatcagttttttatgcttatgaaatttgtcttgagttcaatatgtttgtgaagagcaatgaaacactggttcatataatagctgtttaaatgagagggaaagtgtagtctgaaagatttgagccattatttgtgactacaatatgaattttacaaatctgaaatgttaagttaggaagagctgatgagtcttttatcccaaacaggctttccttaatatcagtaccaatcattagatgatcaaatggcattcttattttaaatttcccctccctgccactcccccagtatttttttttttaccatgaaataatgttaaaatgaatcttgaggcagggttgagggatatggctgaaataagcaatcacaaaagtactccttgtggagaaacaaggtttgcctttatgatggcagagtggctaaacagtgttgaaatggggaggcggggaatggcttttggtggattctgtgcagtgactttcaggcctctttttaagcacaatctaatggattctctctgtccctgtcatccaggctaaccagtactgtctggtgctttggggctggccacttactgtaggaagtctctgctcagattataagaaggagtgcttctgcaataatcacacccttccctctgataaaaattagatattacagcctttactaattataggctggtggctccggtgctcttccgatagtaaattgctttgagatagcagctggaaattgggtagtaaaataaatccagaagagacttgtcaagcttttcttgctcataaaatgaaaataaaatatcgtatttgtgaagttctatagaaggaaaaattggaaagatcgctcaagttgcttagtaaagagaattttgctgtcaaaacatcaccacatcagccactgttaaaacaaaaatgcaatcaggaaaattacttgaaatgtttatgtttacttccagttttgaaattagaacatcatgttccttcgggttgccattcaaattctctcttcctctcctgattcccataaatgtagtagttgataaactcctctctttggaagtagaatgactactccaaaactattttttttttcttttctgagagcttcactgcctgtatgatgcctggaaattacaaacacatctagttcaagttctttatttaatagatgtttgtttctgactttatgactatcatgtaaaatctttgctgagtattattgaactaccttggtttccaagtcaaaagacattgaatcagcttgggttttggtgacttaagaactcagggctttgtgagtagagaaacaccatttatttatacagctgttctacacatctgcgcagtccttcctcatatttatctacccgccccaaccccgcacccctaccttctacctgcctagttctatcttttggagcaataccgaatatctaggcattgagccaggccagcaagtgcaatagtcgcatgtcagctgacaggtaaaaaaggttagtgatccattcaggtgggggcagctattctcacctagggacaagccgctatattaaagtccaaattctgttctgattgtctttagttattccttttgttttctctccggcttgtcacttttgtttttcattttttcctccaaatagaaaaaacatgatcaactcaagagacacaggaaggtaagtgctaggattacaggacagagcactcttacctctggttctatgtaacacaatggacaagcaaagagaactacccactcaccttccccgcactgtcctgccttgccgcccacgttcccccaccatcttgtgtgaatgtgtaatcatttcgaatcaaattttaataccagttttgggctccattttccagctggggagtgattgagaggagcagggtggggaacaaccgtctgaaaaagttacataaacctcaattccaggagactctaactcagatacgtcattctcaaattgtggctccaagaccaagcaacaaacctcgcgagacaactgagtcgacgacgcagtgggagcttcgcggtcccgccgcaagggggagcacgtgtttgctgaacccgccctctgcgcgtgagcgtgggcgtgggagtgggcgcgggcgcaggcgaacggctgccggtcaggtgtccttgtccccttgagttgcgcgggtcgtgttcgagggcatggacgacaggtaccctgcgcttcagcgggcccagctgcgtctggatttcatccacgccaactcgtgagtgccgaggtggggtcggggtcggggagggtctctgcgcccgccatga

SEQ ID NO: 30163 - DNA, 2300 bp, Homo sapien
catgaaggatcttgtattatatcttcaccttcccgataaaactgagttgcccaggccacattcacctctgggcccagttggggccacacttacctaatttgtctcattttactggctcatgctcttgtgtgtgaaccacatctctacttctgctgtaaagctttaccctgttatttctgaacacaccttggacaaattatgaaacttgataatactgtctccatagaattgctgtattaaatgagaaaatgtatgtaaaaatttatggaatagctgttattattttatacttgcattatctaacccatccaaaataattgactgatgacccattgagagaagtaaggtaaaagagataggaagcaaagcccctctcccattcctcctccagacaaacttcactttaggcctataagtttaagaatgataaaagtagagaaaagaaagataaatttctcttttggtgccatgatctcgtagtttgaaaaacaaaagtatttgttctcactcataagtggaagttgaacaatgaaaacacatggacatagggaggggaatacacacaccagggcctgtcagcgggtcggggggaaaaggaagggagagcattaggacaattacctaataatgcatgctgggcttaaaacctagatgatgggttgatgggtacagcaaaccaccatggcacatgtatacctatgtaacaaacctgcatgttctgcacatgtgtcccagaacttaaagcaaaattaaaaaaaaaaaaaaaaagaaaagaaaaaagaaaaaaaaagtattttcctattattttcttgatattattctagtttatcacacaactaaaaatttatacctctttacaaagtaaaaaataatggagacttacagaattgtggcaacagctattgcatctcccaaaaccttgtataggtggacacatggcttaagcttccaagattttgcagtgtgtgtttctagttagctgtcttctaaaacctttcatttatcattaaatggaggcataactcccaggtaggtttctaaacaccctttacaatttaaagatagtcatcaacaaagttgttttctaccacttttatagatccataccaattcattacagattgcataatcttaatgaaactggcacacaggcataatttgtcattaagaataaattgtatgatgatgaactcagtcgattaatcaaggcactgaaaagggcaattgcttgaaaaatgaaagtactgttctggttgtattgattatgtactgtttttggaaacaaacacattttacaatgcagtaaaacattccttgtttttaattaaacttttttttttttttgagatggagtctcgctctgtcgcccaggctgtagtgcagtggcatgatctcagctcaccgcatcctctgcctcccaggttcaagctattctccagcctcagcctcccaagtagctgggactacaggcgcatgccaccgcatctggctaattttcgtatttttagtacagaccaggtttcaccatgttggccaggacagtctcgaactcctgacctcaggtgatccaccttggcctcccaaagtgctgggattataggtgtgagccaccacacccagccaataattattatttttaatagttattattatgactgctggtagtaatccacggtatagatatatcacgctttaacattcagttgttgaatgacatctggcttgtttttagtctttgcctgttgctaataaagctgttatgaacattcttctacagattatttcttaacgttaagtttttatttctctgaaacaaaggcccagtagtgtaattgctgggttggacagtaattgcaagcttgaatttttaagaaaccaccaaactgttttacaaagtgactggaaaattttacatttccaccagcaatacgtgagtgatccagtttttctacctttttttaacattacgttaatctatgtagatggtaaaattagtaaataaataaattacccacataagaacagcctgtaaaaagccagttcaaaaagtccaaagggtaaaaaggcaagaggtgtataaaaaagccacctcagcctctctctgtgtctcagctcacagggcttccaggtatgcaacaaatgctttatacttctgaaaagtacctgatataccctaaggctttttccagctaaattaaagtaaataaatcttttttttttcccaaaataggatcatggcctataaaatgcttcaagtagtcctgtgctcaacattgcttatcggtaagagcctatttctt

SEQ ID NO: 30164 - DNA, 2300 bp, Homo sapien
tgtatacatgtgccatgttggtgtgctgcacccagtaactcgtcatttaacattaggtatatctccaaatgttaaccctcccccctccccccaccttacaacaggccccattgtgtgatgttccccttcctgtgtcacatatacactatggaatactatgcagccataaaaaatgatgggttcatgtcctttgtagggacatggatgaagctggaaaccatcattctcagcaaactatcgcaagggcaaaaaaccaaacaccatatgttctcactcgtaggtgggaactgaacaatgagaacacaagctctttttctaaagaatttgatagtaagttttatgtgcgtccgtgtgaagagaccacccaacaggctttgtgtgagcaataaagcttttaatcacctgggtgcaggcgggctgagtccgaaaagagagtcagcgaagggagataggggtggggctgttttataggatttgggtaggtaaaggaaaaaggggggttgttctctgggggggcaggaatggggggtcacaaggtgctcagtaggggagcttttgagccaggatgagccaggagaaggaatttcacaagataatgtcatcagttaaggcaggaataggccattttcacttcttttgtggcggaatgtcatcagttaaggcagaaaccggccatctggatgtttacctgcaggtcacaggggatatgatggcttagcttgggctcagaggcctgacagtaagtattctaggcttgcatgtcacataggtctctggcattttctttgttttttgttttgttttcacaacaatttaaagatgtaaaaaccattcttagcttaccggccaaagaaaagtaggccatgagctggcccctgttctagaatgtcgggccttatgctggtatctgggtagcgtgtgattaagggcttggtatgctgtccttccttcctccctgtgccacaattatgacactcagtcaaattgttgagttctttcaccaatcctgaatattcatatctgaggcctccagctgtgattaaaggataaataaatagataatcttgtgccattccaggggttacaggcagcaatgttctgtgctccatgttttggaacaagctagagttgggttaatgaagggcagtttcctcattttaggctactataggagcatggactccacacggtggctcttgagtaacaagctaaccagcccacaggaatactagggaaggaaacagggccctgggcagatattagcagtcagggcttgtggggtgagcagtagcaggagccacctgaggctctgcagatgtgccacacccgtggacaggcagcctgggaagctctggctgtgggcactgagctagaaattgaagaagaaaaggaatgtcatgacaggtgccatatgggagctggcaggactgtgtttgcaatcacctgtgagacaccacctggagacatccaggaaaaaaggcagcagggactttgtagaggatggggacagaagcaaaggaacactgtcttctattgttagtgttacccaattttatattttaatctaaaggcttaaagatggcctggagaaacacagttcccaggggtttgccagattgatcctgatgttgttttccactcacataaatggaaataacagttttctaaaagagaatagtgctgtgtgatcaggaaaccaatatgccatctccagtctggctactcaatagctgcatgactctggaaagtaccttaattctcctggcctcaggcagtttctccatatcacacagagaattaaagcaaaaatgtctaagagctctttttgttttaaatgtgttctataattatttaatgttaaagccattaattaattaaaaactgttgattgagtcacctgctatgttcccaacatggtgctaagtaatgagaccactgaaaaaaagttcctctgcaatcaagaatctctgttaaagtaaactaacaatcatgactcaggttatttcaagctagggtagcggtatgcctgtgttgctaggagattgtagaggatttctacacttgcatagaaatgagaacctggagcagagttccggtgttattgagcagcaagaatgagagcagagggggaagcaaaggtggcacattgattataacacacagctgaggtctcgatcacactagatgtctccagtcagtcgtgtggaaatcgatgtgcttcagaacagtctgtaagtagaaatctgtgtgctttcacagtctgtaaagggtggggatagggcatggggagaaaggcgtaa

SEQ ID NO: 30165 - DNA, 2300 bp, Homo sapien
ctcatgcctgtaatccgaacacttttggaggctgagacaggaggattgcttgaagccaggagttcaagaccagcctggacagtatagtgagacccagtctctacaaaaattttttttaataaaaaattaaaacattaaaaaagaagggcaaagtgccatgatatataaagtttacccttgaatggtttccagggaaaaaaatctagacagatatcacaaatgataaagcaaatggagttaaatgttaataattgatgaatctgggaaaaaggtatatgagtgttatttgtactatttttatttttgcaacttttctgtaagtttgaaattatttctacacatatatataaagcaggtactaacagtataacagtattttgtatatatatattacacatatgtatgagtctatatatgtacatattacgtgcatagagaaagctctaaaagaaaaggcactaaggtattacaaagaggatatccaggtggagggaatgtaaagttttatttttctcctgcctatattagttttctacatcacacacatactatatctgtaataataaacatatttttaaagagcaagtaaatgaaaaccaggaaaatataccatttgtattacaaggaacaccaaaattttggccataagtccttcaagaggacttacgaatcataaattgctttgactccttttgagcaatgctcttaccatcatatataaagaatctttagggatgtgcagccacatatgttgatgctgaggcctgatttataataaacactaaatatgtcagctaggtcaaccactcaccatggtgtctggttaggtctggatgagcatgaatttaagtatattgctattcattcatacctcaaatccacctcatttacgtgtccctgaaatttgtcagtaatggtttgtcttaggtgaaattaccaaggtgtgagtagtatatgaggttgcaatccaacagacaatggctggtgaataccactggcttgtttcccttctttgactggacataacagctcccagacctcaattttgacatccatacgggtaacaaaggcatagcagggttcgtgaaggccaagttaagtttccccaactgcctttcactgcctggtttcaggctttcaagcagcaatccctgaaaagttggagaggccacatggccatcagctggtgtcttgtgcccttgctggccttagtcctctcttgataaggcaatctgtgaagttgttgatggcttagcttttagagaatacccttcatactctactctgttcatcactcacctcagagaagcttttaaagttggtgtcatttgggctaacaggtatttttttccagaaacagtatttattctgcgctgtgtctttatatcatagttcatgaagctttgtcagcatttgtacttaccaagggacatcatcaaccctgcccttgctaactttaagtctttgctctggctttcccagaatcctgccaaaaatgattatgtcatctaaatagataaatgcctctaggtaattcatatcccccaattaccttctccattaaacactgaaaactggcagaggccctggaaatatgttcgggcagtttttcaaattaatattccacccctttctcacatacagggcagatgaagtcaatttttttcttgatctcctttagccgtatgtgtttaatcattcttactcctcaagtccagaagtgacttccaatgtctccttggcagtcagtccaagatggcttgaacttctgggacaggttgctagtccattttggtgcgcatattcagaatgcaatagtccatgtaatgatagtttgccagattgtttttacaccactatgatgggccatacctaaggctctagaatttgggtataatgatgctaatgactccttaatatgctctcatatgtatttcgtttttgaccttacaacctatctagaatgctcctggaaagtgtgtggatcattttagttctgttctttgttgtcaatctgaacataatgtagttttcattcaaggaaggagaaaaattgttcctatcttaaaagttgttctccgggggaggagccaagatggccgaataggaacagctccggtctacagctcccagcgtgagcgacgcagaagacggtgatttctgcatttccatctgaggtaccaggttcatctcactagggagtgccagacagtgggcgcaggccagtgtgtgtgcgcaccgtgcgcgagccgaagcagggcgaggcattgcctcacctgggaagcgcaaggggtcaggga

SEQ ID NO: 30166 - DNA, 2300 bp, Homo sapien
acaagaactggcaaaattcaaataggaaactataggaaattcacacaattatttcaacaataacaacaacagtgaattgtaagaggtaagaagtggaagctgcgtgtgatggcatgtgcctgttatcccagctactcaggaggctgaggcaggaggattgcttgagcccaggagttcaagcccagcctgtgtaacatagtgagatcctaaaataaataaataaaaacagatggagataacttataaagaaaaatttaaggcctatttcaatttatcacagaccttgattggacgctgattcaaatagattgttaaaaaaaagaaaatgagggaagagaaaaatatataagataaatggagttttttttttgttgtttttttttgagatccaccacctgggttcaagcaattctcctgcctcagcccccaccagtagctggaactacaggtgcgtgccaccatgcctggctaatttttgtatttttagtacagacagggtttctccatgttggccggctggtctcaaactcctgacatcaggtaatccacctgccttggcctcccaaagtgctgggattacaggcgtgagccacggtgcccagccagataattggagttttgaatactgctggatatttgaacataacatatatttgaatactttgataatattaaataatgattttttaaattatgtttagatgtaaaaaggatatcgtagttataataggaacgaagtattttttccccctggatttatttatttatttattgagacagcctcactgcagcctcgggctcctgggctgaagggatcctctgacctcagccccctgagtagctaggaccacaggcatgtctcaccacacccacacgcccggttattttatttttattttcatttttatttttttggtaacaatgagatctcactatcttgccgaggctggtctcatactcttgggctcaactgttcctgccacctcggcctcctgacgtgctgagattacaggtgtgagccatggcaccggccttttccctgaatttatgaacgaaatcataggcgatctggcacttgtttcaaaataacccatggaggaggaatggacggcaatttagatgtaaccagactggctgtaagtaaattactatgacaaaaagtagacacacttttgtacatgtttgaaccttcccataataaaacattctcaaaaagctggggaaaaaaccccaggaaaacaaataagatttttttttttttttttttggggggacagagtctctctctgtcgcccaggctggagtgcagtggcgtgatcttggctcactgcaatctccacctcctgggttcaagcgattctcgtgcctcagactcccgagtagctagggagtctgttccctgtttgtattgactacttccacgactggtaagctcttcctcaaaaagtgtaatcttctctaaagtttccctaagctattccaatatagattcttcccatagattttcatagattttcttactttttttttttttttgagacggagtttcgctcttgttgcccaggctggagtgcaatggcgcaatctcggctcaccgcaacctccgcctcccgggttcaagcgattgttctgcctcagtctccctagtagctcggattacaggcatgtgccaccatgcccggcgaatttttgtatttttagtagagacggggtttcgccatgttagccagactggtcttgaactcctgacctcaggtgatccgcccgcctccgcctcccaaagtgctgggattacagacgtgagccaccgcgcccggcctaaaatgattatattgtaaaaaatgcaatgaagaaaagaaaacatggtaatgaaatggtcttcccactcgaaatcctgtccctacctaaggcattaggatcaactcaggccattaggtcagctttcctctaaattgcccattcaaagcaccaggggccacacccaaccgggtaggcggagtgctttcctggctgcatcttagagggctgcattcaggttccaccctggaagggaggagccggaattccgatcattatctgccgcggactgcctgtctccaaagccctttgtttatggcctgatctagctaaggcttctagacttcaggagcttaagaatcgtccggagggctgggcgtggcggtgcaggcctgtagtcccacccactccgaaggctgcggagggaggatcaacttgagtctgggaactcagccaggaattcaagaccagcctgggcaacacagtgaggccccctacccaca

SEQ ID NO: 30167 - DNA, 2300 bp, Homo sapien
ctcggcctcccaaagtgctgggattacagtgtgagccactgcgcccagccagaaatctttactgaatgaagacaaggtatgtgaggtgcagaagcgggatgaacagaaacacagcagagctaaggaaacatacctgctatgaaaccagagtgcttccctgacctagggtgggctggcagaattaagggtattagtggttgcctgtgtagcattgtcaggtgttgattttgctctgggggtagaggacaccactgagtatgatctcaagtctaagacagcggtaattcccctgggatggaagtgcaacctccgatgccaccacctggattctgtggattaaggagctcacaaaggagcaagtgtacctcagtagtggggcaatttaggaataaaactgggttttagaagtggtaaatcctaggtttgagagggattggactattaactaaaagtgattttaggctgggcgcggtggcttaggcctgtaatctcagaactttgggaggcctaggtgggcagatcacaaggtcaggagttcgagaccagcttggccaacatggtgaaaccccatctccactaaaaatacaaaaaattagccgggcgtggtggtgggcgtctgtaatcccagctactcaggaggctgaggcaggagaatcacttgaacccacgaggcggaggttgcagggagccaagatcgcgccactgcactccagccgggcgacagagcaagattctgtctcaaaaaagaaaaaaaaagtgattttacttttgaaattcagaaaagctacacaaagataattactactcatttgattccattctgcttcagtgctctgccctaagaaaaaggcagagcacactgacaaccccagacctcagaagaagataccaatccctccattaccttctaaactgccacctgttaatctgattcaccgggacattctgcgggcctggtgccaacaattgaagctgagctccaaaggccaggtgaggtcccaggctggggacggtgctgctgggaggaagggtaggaaccttatttgccttactaactcagttttctattgtcttagaaattggatgcatataagcgcctgtgtgcctttgcctacccaaatcaaaaggtaactttttaaaggatggacgtttcaatgcttatcctaattacctattgtagcctcaaaagtgagtaaaggaactgtcttagcctcaccttgttcctccacccctagttctaagaaagaacaatatttcccatctctacttctcttttttttctttctttctttcttttttttttttttttttttttttgagacagagtcttgcactgtcacccaggctggagtgcagtggcaccatctcggctcactgcaaccttcacttcccgggttcaagcaattctcctgcctcagcctccagagtagctcggattacaggcgcctgcctcaggtgatccacccacttcggcctcccaaagtgctgggattacaggcgtgaaccactgtgcctggccagcaattttctttttttctatttttttcttttcatttcttttcttttcttttctttcttttttttttttttttttttttttgagacagagtctccctctgtcacttaggctgcagttcaggctgcaacctctgcctccctggttcaagtgatgcccctgtctcagcccctggagtagctgagattacaagcatgagccaccatgcctggataatttttgtatttttagtagagacgggatttcaccatgttggccaggctggtctcgaactcctgacctcaagtgtttcacccaccttggcctcccaaagtgctgggattacagacctgagccactgggtggccaactgagcaattttcaagaagacagtacattgttattaactatgtatagttaccaacttgtacaatagatctcttgaacctagtcctcctaagtgaaactttgtatttgatcaagagctccttaggccatttttgttagaattttaatctgtatttttatctttattatttaaccctttttgtaggattttcctagcacagcaaaagaggccaaaatccggaaatcattgcaaaaaaaattaaaggtggaaaagggggaaacgtccctgcaaagttctgagacacatcctcctgaagtggctcttcctcctgtgggggagccgcctgccctggaaaattccactgctctccttgagggagttaatacagttgtggtgacaacttctgccccagaggctttgctggcctcctgggcgagaatttcagccagggcgagg

SEQ ID NO: 30168 - DNA, 2300 bp, Homo sapien
cgagtagctggcacccctgcgccaccacgcctggtaattttttgtatttttggtagaaatggggtttcactatattgcccaggctggtcttgaactcatgagctcaagcgattctcctgcctcccaaagtgctgggattactggcatgagccaccacgccctgctcttctgatcccaacatgtgctgtgccagccactgttttctccagacactgttttctccagacatgcccacaaccctctaagtaaaggctattattttcatgactctcatttcatggatgagaaaacaaagagacctaacgttattgcccaggtcacacagctagtgaaggggaggttgggtttaaatcctgtctggctagctgctaaagccttacatttaaaaatgaatcaatctggcctggatttggtgtctgtgtttttatgttttatttttattttatgttttattttgagatggagtctcacactgtcacccaggctggagtgcaatggcacgatcttgactcactgcaacctctgcctctccagctcaagcaattctcctgcctcaacctccttggtagctgggattacaggcacgcaccatgcccggctaatttttgcatttttagtagagaaggggttctgccattgttggccaggctggtctcaaaactcctgaactcaagtgacctgcccacctcagccccccaaagtgctgagattacaggcgtgagccaccatgcccagcccagaactccagttattctgaatgttacgttcaattacactgacaaaagaaagatgattcagttatacactttatacacaaaccttaattagaaagtcctactggtggttaccaaaggctgtggtaaagaattgttaaatcaaagccctaatatctcccagatgacctcaactcacctggtttcctctttgccgccttgggggttgcccagtccacaacctgcacttccttctctattcctgggctccgtttacttactttttctgtccgtggatttctagcctgtgagcagattactaacaccatttggataaagacagtctcttatttatcattttaggacaagcaatgagatgtaggaaaaaaaaacaacaaagtaaaccaaagaacaaaagagactttggaccctgacaagggagggtttcagtcgcacagccactgcttccttcacttcacatctcttgacaatctgacagggagcactgatctgaggaaagatttttcaaattattttaaggagaaaaacttgaacttctttgggagtcagtaggttaggggttcacttactgtgctattgaaaaagttaccaataaaaatttataccaactttagtcatatataaaatggggaacaataatgactgaatttaaaactcacaatttgagatataaaaaaatactcgggcggggagtggtggctcacgcctgtaatcccaacactttgggaggacaaggctggagaattacttgagggcaggagttcgagaccagccaggtcaaaatagccagacccccccacttgccctctacaaaataaataacaaatactctatagactttaaaagctactattattagttcgttggcagatgaaaagatgctcggtattagtacagagaaacctggagttttagttggttgagtaacttacttaggaaatggaatgtatttggtacgagaaaatagctttcttcaagccgccagtctggtctctgaagtctactgttgccacaagttccattattaaatcccttcacacatcctgctcaagtctctggccactgtttttttgttttttgttttttgttttttttccccgtagaatcgttctgaaggagtgctcaatctcccaatgtctccggaaccatactttggataattacatttaaagtgaacagaaaagggccaggaatagtattagtaattcaacccagacaaaagtcaccccatgaataagaaagaatgcaattttagcatttacaaattgtgggggagggaacagaaggggagaagaaaagaagaggtgaggtggagagaaaaagggtcttcgggcggcaggaagtgggaggagactttgcaaatagcaatcttggggcaggggccattttggaagcatgttgcgaggctccgcttcttctacaagtatggagaaggcaaaaggcaaggaggtcagtacagttttagtggatttgttttctgtctgtctttgtgtttctgtcttccctgggcactcctgatttttcctttaaggagaaaagaatgtgccttcgaattttctcctcttg

SEQ ID NO: 30169 - DNA, 2300 bp, Homo sapien
ggagtacagtggcgtgatcttggctcactgcaagctccacctcccgggttcacgccattctgtctcagcctcccgagtagctgggactacaggtgcctgccaccacgcccgactaatttttttgtatttttagtagagacggggtttcacaacattagccaggatggtctcgatctcctgacctcgtgatctaactgcctcagcctcccaaagtgctgggattacaggcgtgagccactgcacccagccatggattcactgattttttgaagggtttttcatgtctctgtctccttcagttctgctctgttcttagttatttcttgtcttctgctagcttttgaatttgtttgctcttgcttctctagttcttttaattgtggtgttagggtgttgattttagatctttcctgctttctcctgtgggcttttagtgctataaatttccctctaaacactgcattagctgtgttccagagattctggtatgttgtgtctttgttctcattggtttcaaagaacttatttatttctgccttaattttgttatttattcagtagtcattcaggagtaggttgttcagtttacgtgtagttttgtagttttgaataagtttctttttttaatagtttaatatattttaatagcatacttacaggaacagcacagcagacagacaacattaaaaacatgtacttgcctgggtgcagtgactcaggcctgtaatcccagcactttgggaggctgaggtgggcagatcacgtggtcaggagatggagaccatcctggccaacacggtgaaaccccatctgtactaaaaatatgaaaaattagccagtgtggtggcacatgcctttagtcacagctactctggaggctgaggcaggagaattgcttgaacctgggaggtggaggttgcagtgagccaagatcttgccactgcactccagcctgggcgacagagcaagactccatctccaaaaaaaaaaaaaaaaaaaaaagaaaacaaacaaacacgtacttgcatgtaggacaactcagttagaaaaacatagtgaatggatggaatctactgtgtgataaaaatgctacaaacaccatttagttgctgtcaataagaaatttacttgtttttaaaaaaatgctaatgctggcattgtctagaaaaatttaacaggtttatttataattattataaagttgaactgctgaaacctgttcactgaaacattttaacttgcattaatgctttacatctccacatttatattaaaaatttacacacaaatgaaaattgaaaaaatgccattacctgatttctatcccctatttttccacttgcaatcatacacttaggtatcttttgaccccatggaaaaaaatatctaaccttcataaccaccaataacaggaagaagagaatttttttctttttctttttttttttctttttttctgagatggagtctcacctatcgcccaggctggagtgcagtggcacgatctcggctcactgcaagctccacctcctgggttcacaccattctcccgcctcagtctcccgagtagctgggactacaggtgtccgccaccacgcccggctaattttttgtatttttagtagagacggggtttcactgtgttagccaggatggtctcgatctcctgacctcgtcatccgcccgccttggcctcccaaagtgctgggattacaggcgtgagccaccgcgcccggtcgagaatttttttctttttgagaatgaaatgtttcccatcatagtggattcttaagcacgttttccttgtatgcggcgtgctagctggatttcttttggcataatagttagccgtttggcatggatagcacacaggttgctgtcttcaaaaaggccaaccaggtaggcctcacttgcctcctgcaaagctccaatagctgcactctggaagcgtagatctgttttcaagtcctgagcaatttcttgcaccagacgctgaaagcgaagtttgcgaatcagaagttcagtggccttctgataacgtctgatttcacggagtgccacagtaccaggcctgtaatgatgaggtttcttcacccctccagtagagggcgcactcttgtgagcggcttttgtacccagttgcttcctggctgctttacggtcgatttgcaggcagtccgctttgtacaagccatggtatagaggcttccttatttacctcccttatccttcagctggagctctgcgagccagaggcagcgctggcgttggagagtgatggcggcatggcggtgcggcgg

SEQ ID NO: 30170 - DNA, 2300 bp, Homo sapien
ttatttcaagggtcactgggttatggtgaagagcctgtctttctgctagccaagtctcaaactcttcacctgaaaacagtttagaaatgcctttaagcctattagctttctatggagcctaattcgtctttgttgtgccttgtcttgtgaccgtgtcaagtcaaggaccctgctttgattatgtgctatcctttttttcttaatcacttttcagttaagtaattgtctcagtttaattggttgtaatgattaaaagtttatttacattacactgaagttttctttaatcaatcacttaggttctaactatgttattatttacagctcaataaagaaattttacccaaagaaatagtctttttaattggactttttttattagactatttttattgtatatgtgctaaagctaaaatctaaattttggcaaataagagaaattatttattcttaatattacagttagacttgtaacaggcattttatattataatactgagaggtacaatgtaataagtattggcttcagagactaacagacctaggtttggattctgcatcaggacttgccagtcctgggacctttctgaacttaaactatcgtaccaaccctatgcagattgcctgaagattactgatgtgtgaataagtataatatttaatctaatggtagctattatttgtttcagctttgtcactaaccagctatgtcactttgagagagctattcaatttctctgttcagattcctctgataaataagaggaaaggactagatactttctactatttctgtcaaaattcaggtaataagtaaaccctttttattggtttatttggggggtataattttacattagccagggttttttcatgttaaaattttcccagggagtagtaaaggcattagttggaatttggacactaatatgagaataagttgacaaaaacaaaatggtcctaggaaatgtttcgatattgaatgttgggacaagaacccagagcaaaaaaatcacatttacaagacaaaaccacaaaactaatagtccaataatttggtttaaaaacttgtattataattctttatcagactaaacgagtgatcttagaaaaattgctggaaaatatttattgacctgtttaatcttagcttaatcaacctgtagcaataagtacagcaacatctgatacctacctagttctctaggttcccatggggataaaaaagagaactaaatacattaaatatgatcacctctatactgtcaattatgtctgtctataatacatgtgcaaaactgtctatctgctttgcaggggaaacaatttttttaaatgactcataaagctctatctctcatcaatagtagcaagttttatttttaaatttgtttttactttgaaacagctatactatttttctaagtatatttttcaaaagcagctttattaagtcataaatcatgtttaacaattcaaaccataaagatagcaacacaaaatttgaaacatagaaatatgcactttcccatttacaaattgcatcagaggagatacaaacaccttttctcttgtttgtgagtaaacggtcaagacacagagcagaaaaatttcaaaactaagtgcttatatagatctttccttatttgaaacctatgtaccaaatttgtagcaaataacttttatgtgaaaatcagtattgtagatggggctgaagatatggctaactaggctcccactaatagtttttctatgatagaaaaactaacctgaaacacttattatgataagtaataacaataataaagtataataccaacacgaatacctgcattctggtgagcttttaataacaggctcgatgactcaggactttcatacatgatgccttacctgggagtgtgcttcttgtattaaatggagaaaatatgtatgtaaatatagatatagtttggataatttgaaattttatgtaataaaacccatttatcacggtcaattagctcaagaaaactcaatactgtttaaaatgagaaatcaaccactttttagacaactaaaagtatcaaagcatgactgactttagaaaggtgtcctatgggaggagccaagatggccgaataggaacagctcccgtctgcagctcccagcgtgagcgacgcagaagacggtgatttctgcatttccatctgaggtaccgggttcatctctctagggagtgccagacagtgggcacaggtcagtgggtgcgcgcaccgtgcgcgggccgaagcagggcgaggcattgcctcacttgggaa

SEQ ID NO: 30171 - DNA, 2300 bp, Homo sapien
cagcatctactatgtgaaggcaaaataatgacaggtgaggagcacgttagaggtggagtaaaaatagaacagaaagttcaagatggacttcaaagttctcagaaattcccaaatttaaaaatactctcaagactttggggaacttaatctttaatactcttactacctttgttattaaagagcatcttggtttaggaagtaaagttttagcttcttcaataacctaggaatcatatctcagtttccatgtttctctgatagttgcttgaaactttgatccctggactctgcaatgtggaaccatattcacaggtcacagtaatttcgaaagatgagcaaataaagtattttccattatctatctgtaggcttttctattgcttaaaaagagactaaatagcatggttttctaggcaagtgtgatagaaaatgtggagcctaactcccctccctcacccttttgaaggccaatctatgaatttgtttgaaaattgtccagtttcagaatttagctaactagttgtgtaaatgactaagggtcatcagagagcatagaagtattatttgcccaggcatattttgacctcttctttgacagcccttcttttcactgaaaaaaattctttctcattctagtcttctgctcttctgtagaaagagaacttgctgggagttaggtgacttgacttctaatctcagttttgtggctaactagttgtaggactttaagccagaggttgtcaaactatagcctgcaggccaaatcttgaccaccatctgtttgggaaaataaagttttattggagcatagctatgactgtttgtttactcattgtttacgaatgctttcttgctacaatactgagatgaatacttctgatagtaccatatggcccacagagcctccagtatttactgcctggccctttacagaaaaagtttgccaacctcatctttaggcaagtcgctgtcttacttgagcctcatcttccccatttgtaaaatttgggagttggactaggttgttcccagggctcatgtcctctttacatggttactctagaactcttcttacagagcagtctcatctcacatcagtcattttatactgggacgtaaacctattcatatttatattcattcagtttactaagctcctaatactggcaagccagagtggaacactaagtctaagagcatccctgcctttgagaaacttataatctggttagaagatatacatacaaggtttcaaacttaaattaaaatagaatgtaataaaggataacataccaaattaagtgataatgattaaaagatttcagaggagaaatatcattatggactgacatcattagggaaatatctgtaggggaaagtgagattttatttttttaacagtcatcttcatagccctgtaaaatactggattcagtgtccctctaaagacgtagttttcaaattttaggatgcataaaaatcaactgaattagtaggaaaaaaatgcaaattccttatatccagctttcgagattctaagtaggtctggggtacagcttataaatgagtattttcacaaacaccctggataattctgatacacattctggtaagttgttaaatataattactacctaggaatttatgatgtttggtagagtttttgtgaactgtggttatgtgtgactagaaggaactccattgtccatggagcaagtacttcaatgactttctctctctttttaggaaatgtgaaatctcttaggccaagaagaacaacctgaggactctctttctggaggtaattgaactcctttagtaaatccagaggagaaatctgagatcagtacatcttttgtatctatgatagctaaggatacatcacttgaaagattcactgtactaactactttcttcagcatttgactcttggtccttgtgttgtgagctccttgttcctgcaaagctggctggggtcaccatagtgggtcaaaaaaaaattcatcaatgaaaaagatagggaatctccaatctctatcccaagacatgttctcgatgacttgagcacatcacacatcagcagatgctcaggatacagaagagagatttcatctacgggaaaaagaccctctgaaaagaagtgtgaaatcatcaaaagagccattggaggggacaccagagagtcgtgtggctgaggtttcacatgatcccgccatgcttccagtccagaggagaaagctagacccactcctcaaaaagtataggcatcataagaaggccacaaggacaaaaagaaggag

SEQ ID NO: 30172 - DNA, 2300 bp, Homo sapien
ggctaaattacttttcttggagatgtggagccatcagggaaaacctggaagaatgaaattggctagtgatattaaaattttggttgtttaacatttaactgagtctcaacaacgtgttaaagtgctatctaaacagataattagctagtggctgcgcagtgagctgtctaaatttagcagtgaaattaggtttagggaatgcgaatatagaaaaagaaattttctcaagggaaacggtggtgtcagcacagctgaggaatgtcacaatagctacattttgtcaattatgatcatcatcaggggatctcccggagcgatgcaggacaaggtttattcataagtgcatcttgagaataggtgatagaaagccttggctgcaggagacaagcttacaggggacgacagaggcagacaggcacagggagggagggaagaggaaagggctggagggaaaaaggcactagaccgagcgctgggagactggaagggaggcagaagttaagaaagaaaaaagaggtgggcagggtgtagaatggcttgtagccttggaggttagtaaagccttgtaatccagcgggcggaaggtgggaagaccctattgactgaaagccgaggacagcgtggtcttggccgcaagcatgcattagtttagctgcgacaggctaacttctgggcggctgatccttgttcagctttcctgttactggaacacatttatggctatctcgtggagatgacaggacctacataaaattaatagtgtcaggcctgaggactggtgtcctctgccttcaattcaccccctacgctggacagtccaaattgtccaccctcctactccccccgcggaaccaatgtggcagtggctccaaggtcaagctgccggtactgtgcgaggcgggaggatggagagggcagggcggagagccacctgggatgagcgagggtcatggtggaccacagacgctcttcttatacgggcaaatgtttaatacttcccgaggtcgcctctctgccatcaaacgaaaacaggcaagaaaataaaactacacatacgaacatgcaaaggaaacaaaaccaaagaaaaacaccaacgcactcgttgggggaaatccatggcctcctgttgccagtcgcccggcgcggaaagtggacagcccagcggccagtgagaagcaagagcaagaaagcaaaccttctgaagacccctctcctcgcccagctccgccgaccattctaccaagctgccctcccagaaaaaagagcaggaaaaatgcctgtgcaaacgtgccttggcgagcggggaataagtgggctgggaagaagggaaggattcggagagcacagctgtcccggggaacaggaaggaggagaaagtctctccctcccttcagtgccccgcgccccagcgaggaggaagattactagtccagcaggctgcgtccagcttcctacacaggaacctttagcatgggcaacggaagggcagccccctcctgccttcccctccccaccccaccccctcgtcccaggtccccgccacagggagagcgccgcccgggagaggagaaggccgagcgtgattgtcccgcagccctcgcctcagtcggcgccggggcccccgtggacccgcgaggggtggagtgggcgagaccattggaaaggcagggaaggggggaaaccaggcaggaacgaggggcggggccgactaacctattccagattttcctgtcccttttaaatctctgctgtgggagaaaccccgttatcaaagtggatgaaaagaatatttttttttgaaaggggaggagcatgtgtaggagggcggggtgggaggagacagggcttgcgcccggggatcagacgggaggtggagttgcgcggggagggcgggcgagtcgggcgcccgctctgagagtcggtttcttttccccctcttgcgtggggcggggtggtgcgttccgagttcccaggagttcgacgcgggcgggtgccgaggggaggggagtggcggcggcggcgggcggctcccgcttcagcctcggcagtggcgtcggcgacggcggtgtcgaggcagccgccagcgttcggccaagtgtcagccggcagcgacggcgctagagctgggagctggggacgcgcgcgccggaccttccacagcctccgcccagagcctgaggcgccggggccgggggagccggggggcgggcgggcgagcgggccggggggagggtgggggatggcgcggaccctgcggccgtccccgctgtgtcctggaggcggcaaagcacaactttcct

SEQ ID NO: 30173 - DNA, 2300 bp, Homo sapien
catacatgaaaatggaaatataagtggataatgtttaaggtactcctatttttaatattcagtcttactttttcatattgctttttgcctttctgtgctttttcatcagtgctgtgaggagttatttgatgctgtctttcataaaagatacgttaaaagattaccaagactaccctcagattcagtaattctctggggccttacaggactcagaagagtcatactcaaggctatgatttatgacatataaaggataccaagcacaatcagcagtggggcctgaggcgaagtcttggaaaaaccaggaacaggattccacagtcctttttcagagtctcacaagatggattcagttccctcaggaacaagttgtgacatttatgaaatgttaccagccacagaagctcattagagactagtgacccagtgcacagggttttcatttggggctgatcatgagagtactccctgcctagtgtatacccaaattccagactcctagaaggaaagtagttattcagcataaaccatatttgcacaaagagtgaactatcatcagttaatggtagaacccctccccaaatctaagttcaccaatgccagttaagggctaattttgcaggaagtcttttttttcaaggatagcagttatgattgctatgttaactcattagtacacaaaagataatagtcactgagatttttcttacaaggctctaagagccattctgtaagttttcattctggtgctattctcatcataccagaagaaattagtggaacatagggttctcattaacttaaaagtcataggtcatagtgttgcatactgtcagtcatgccactaggaataataaccaagtttgcgtatacacagaccacctatatctattttagagacttgagggaaaaatcttcatcttggagtcactgaaaaaaaggaacctaaatttgcttttcagaaaaggttccatgttatattgagttttatattcaagaacttaaagagattcaaaggctaatgaatatttgctgttgagatacttaatggaaattatggtggaagaaaagagtgtggttggattatagtattatagtgtgcatttctggggtctacctttgatcagcttctgttcagaaggcagaagaaagaacaaattgctaaatagtgcagaaaaagactccagacatctaatctggttatattcagcctccttcctgttcccctgccccttacttttttcaacagctttacatattaatatggtttggtggtgtcctcacccaaatctcatcttgaattcccatgtgttgtgggagggaccctatgggaggtaattgaatcatgggggcaggtctttcctgtgatctccttgtgatagtaagtctcatgagatctgatggttttacaaaggggagtttccttgcacaagccctctatgcctgtagccatccatgtaagatgtgacttgctccttgttgccttccactgtgattgtgaggcttccccagtcagctggaactgtgagttcttcattaatcctcttccctttgtaaattgctcagtctcgggtatgtctttatcagcaccatgaaaatgggctaaaatagtaaattggtgtcagtggagtggggcattactgaaaagatgcctgaacatgtggaagtgactttggaactgggtaacaggcagaggttggaacagtttggagggctcagaagaagacagaaaaatgtgggaaagtttgaaacttcctagagacttgttgaatggctttgcccaaaatgctgataatatggacagtaaaatccaggctgaggtggtctcagatggcgatgaggaacctgttggaaactggagcaaaggtgactcttgtcatgtttctgcaaagagtctggtggcattttgcccctaccctagagatatgtagaactttgaagctgagagagttgatttagagtatctggtgggagaaatttctaagcagcaaagcattcaagaggtgacttgggtgctattaaaggcattcagttttaaaaggaaaatagaccatgcaagtttggaaaatttgcagcttgacaatgtgatagaaaagaaaatcccattttctgaggagaaattcaagctggctgcagacatttgcataagtaatgaggagccaaatgttaatcatcaagacaatggggaaaacgtctccatgccatgtcagagacctctgcagcagcccctccctcccatcacaggcctggaggtttaggaggaaaaatggtttcttgggctgggcccagggtccctctgc

SEQ ID NO: 30174 - DNA, 2300 bp, Homo sapien
ctcagtggtataccattacatacctatcagattgcaaacattgagaagtctgtgataatatcagctgggtgacaatatcagctggtgagtatatggaccagcaggagctctaagattgggagtaaattggtactgtggaaaggtttttgaaattatctgataaagttgaaaataagtagtagcaattctagggatatacttgtgcacaaatatgctaagatacatgaatggaaatgtttcttgtaaaattgttcagatgaaacaggaactccattgtccattagtaaactataaagcaattaaaactaataatatatacaattgtatgtaaatccaaatgatctaaaaataaaaaagtaaaaaaatgaattccaaaaacaataagctaaagctaaatgttccaatatgaatgaatctccagaacacaaagttgagtcaaagaaaaagtacaaaaatacgtatggtccaattccattcttagaaagttcagaaacaggctaaactgtgttgtttagatttgcatgtgttggttgtagaactataatgaaaaacaaaccattgatctccaaagtcaatataatagtttcacattgaggtaggcaggtttttaagatgtagtagaggaatatgagggacttgtgaggttccagtaataatgtttgttaagatgtgtggtggttatatggatgtttgctgtaaaattgttcattgcgtgtgttgcatgtactttttcatttgttattttacagtaatgcatcttatgaaaggaactacataaggaaaataatcatatccatgagagtaaaatgtgaaataaaaataggtttcaaagtaaaatatgaaacaaaaattggttctttcaataccatcaagaacagatggtattaaaagaaccaacttgaagtcctggaaatgaaaaaaaaaatcattgaaataaaaactcaatgcacagagtaaactaaagactgaacacaaaatttatgaagtcagtactgaggaattacacagaagcacctaacaattgctggaaaatgtgaaaagatagctaagagatattgggggcagagtagattgagaggttctaacattgttactttaccctgctgaggaactttcttatattggaagaaaataggtggtatgtacattccagtaaacttaactattagtgatggtacgttaggatgagcttaaagtatattttgtaaataaaagtaattgaacacattcagcagccctaattggttcttttgggtatatgagtagttaaaggttgaaagttcaaaaggcagtgttttaaatgaaattattgagtcacttactgggccaagaaaaacatttcatctccaataggtatgctcagaagaactttttttatttcttaacattttaacagtaagtcataatcataacttatttttaaaagtatttgctttaaaatttttttactgtaaaatgaagctatatatatatatatatatatatatatatatatattatacatatataaaacttatcttccagagaagtaatacctttaatctcataaagggaattgtgatctcgttcacagaaattttttttatatattaagttggaaggaattcatcgttccctaaaggaatgtatatctttatcaggtagagccatctttgtagtggtggtatgaattcctggtctcatttgtcctagtttatgatcttttgtttttccaagaatgtaattgacgatggcattacctaaaaagtgtgtgtagatttttatatgcagttgtccttaagcttgtgaaatatgtttagatgtgacttggaaagatataaacatattcttgtttgaatgtaactaattattaaaaaaatatttaaacagttgaacccactgtgagcctgataaaagggccagattctttaattgatggaggaaatgaaacagtagcagccatttgcatcgcagccactggaaaacccgttgcacatattgactgggaaggtgatcttggtgaaatggaatccactacaacttcttttccaaatgaaacggcaacgattatcagccagtacaagctatttccaaccagatttgctagaggaaggcgaattacttgtgttgtaaaacatccagccttggaaaaggacatccgatactctttcatattagacatacagtgtaagtaaatggtaacatttactttttaaatatttgtcagcatgtttatcaaactatttttagtttgaatatttaatagcttttccttgtttttgtttttcttttaattttgtttgttttcatggaaatttcat

SEQ ID NO: 30175 - DNA, 2300 bp, Homo sapien
ctgcatgcaaacagccatggaggggctgttgcctgggtcttgcagctgcaggacacccgaagtgtaagcgttcagttaatattctgtggccatgcatctgaaattgttatactttcagaacctgtgtggatcccaaagaaaaattaatcaaatctgatggcttcaggccatagaagtttctagatataagaatcattaactaagccctgaacaatacacagaagacagatttgccgtatagccactaaatgcatggctcaggtagcccaaccccaatgagaggcaagaattctactgaaagtaagtctgtagcactggaaaataaacgaccatttccatgtttctgagtttacagacttttttggaacaactgtttcactttaatacaataaaagataggagaagtctaaataccccaaagagggtattgttcttagagaattcaataaatgtatatttgaattggtttctacttaggtaaattcctcttaatatgaaaaatggaacgagatcatagaatcccttctccaggcttgtaatgtgtcctgatttaatagggacaccaacgtgcaaatcaggatcttcatagtgcatctccaggactatttttgctgctatgcttcataaaactttgatttactagaatttccaggggcaatgggaagagatgaagctacccagagcagttatgtctcttcctgaccttctataaaggactttgagttcccaggccttccctggaaaatcactgtcagtactacctgacccaatatccccagtgacctgaaactcatgggaagttgggaaggggtgataataaaggtttggggagcactggactaggcaagcagtaactacatctaaattctgcaagaaatcattagctgaggaatactgaataagtatggcaattatcatggcaagtatttgcagtggtggtatagggggtgatctggacgtccaggaagacagtcgcccttgtttatttacatgaaaacctctcttctcccatctaaatttaatctcctgaatggcaaaagcatttccttctgtcttagcatcgtccatattcaccacgagtccttgcataggagagattggtgtatacatgatgacaacctgacgaaaattatctccacctcacctgaaaagaattcccatctcaggattacaactggccttttcatttgtctttggtcttgctaggtggtacgtatattctagtaatgagattagggtcacaggatattttaatcattcatacggttgtatgaagacacacatgtttatttgtagttattctttgtccatcaaacttacagtagtcctcagtctaatgcttgttttcttaatgttggagggtgatgacagcctattttatctcaggctgaaaaactaatacaattaaatcagagaatcatagcagggaacagtcatcgtgttctacgaatagccagacatttttaccaaggggtcactttcctgaaacctgtttgcggttctctgtaaatagaagtaactaggcagatgtaataagcctaatagctcactgaggtgggaattctctgcctttggattctgattgttactgccttgctttggcttaggcatggataaactcttctgtggtgaacaaaaatggcctccagccaacctggtgggagacttccctatctgacctccaaccttccctcgtcttcccagacgaggggtagaaaagtagccctcactcctccactcccaggaaatgtgcatttccctgcaagaggagagacaataaaatttggtttgatagctgacactattccctgttacttttcagattttattaaaattaaatgtgttaattctttgttctttcaccccagggcaattctggaaagaaaacatatcttaagattgaacagaaaaactattatgaaaaacaccaagctcacatttgttaaatgactttgtgctcttgaaaaaaatgtataaaaagcacattgccaactgctctgcgtgatatcctttgtttggattttagacgcagcttgactgacacagagatcctgaataagagactctttggatactgaaaagtctcttaaataaggtgatacacaaatttcagagaacaatttcaacattgttctgtcgaacgttatactcagtcctgaaccacattactttcctgtctacgtttcatttcctgggggcttgccaagtgataaacagacccaggcgtgtgtggtagagttcgggttttttagcacgaagtgggtggctggagtttgcttgaaaacatcaattgactttgt

SEQ ID NO: 30176 - DNA, 2300 bp, Homo sapien
aaataaaaaaatgaaagaagtaactatattatgaaagcagagaacttagatgcagggctagttatgttttattttcaatgctatgtttgttctttgggggatgatactttcttttacagtctggtgaaaatatccagtgagaattattggattcccattgttttatctgagactcttcaaaattataattccttttataattacttgttttctcatcaagagatgtatatattttacatatgaccagccctagttcttagttctcagatattttccacaattaatgaatatactagttaacatgtaaagaacaattaaatgtatgtgatgatttgtgtgccaatcctcagactagttactcccaagaagtctgggcctatagagctgagaaaccaaattcgagaatgctaactaacattttcctggtgaaatcctacagaagtttactatttctcagtacattgctacagaaatcccaatgaaacaagagaatttcagagggggttgtctagcatatccaagatgctgggtggcaaacaccgtagctcccagtattcccatccgttcaacacttgcctttccagataatggggatacatatatgggccagggatgctagtctctccactaaaaaattaaaagcaaaaccagatcctctaaaatacattcttattaagtaaaggagagtgttcagtttaattcaatagatgccaaagattgatttttatctccagttggtccaggaagagacaaaaaggtaaaggaggtaaaatgtttttttaaaaaaagaaaaagatacaaagttttgcattaatccagtgacattaaccattcttatgattcatttcctttctctttagttaacccaccaaagatgacgatatggtaatatcaggagtaagtgggggtgttattattttacgaaggcaactggctcactgaagaactctggttaacgtctaaaaattttgaaaagatttgactttcatgaattctctaggttcagattttctgaaatgatccaaatttcaaacattctagactctctctagactttgcgttccaagatttggtttagaaatgtggttcatgttctaaaactcctcccagtctcattcctattttgaatctttttcccccatcttttttttctattttaatttaactgtcaacctctacatattttctgctatgccatttctttttcttttctttctttttttatttttatttattcattttatttatttatttttttgagacagagtctccctctgtcgcccaggctggagtgcagtggcatgatcttggcttactgcaacctccacctcccgggttcaagcaattctcttgcttcagcctcccaagtagctgggattacaggcgtgcaccaccacacctggctaatttttgcatttttagtagagacagggtttcacaatgttggccaagctggccacgatctcctgacctcaagtgatccacctgcctcggcctcccaaagtgctgggactacaggcaagatccatggctcctggcctgcaatgccatttctatctttccttttataacacaaagttttttcttcttctattgataccttctttagagtcttcctatctcctcttggtaggttttccttctcaatctaaatatgtatacacacacatatatatattatgcatattatatataatgtatgtatatatataatatatatgtgtgtatacatttaatatttcagcctttcccactcttcctccttcaaatcgcttgctttacttgagaggttaggtaatctagtcatcaaaaaagagaactaagacttgtaggtgcttgacttactgttttgctgcatgacatatgccaggaacatccttttcttggtggtggagggggtggagaaaaggtttgcatctgtgtctaagtgttgcagaaaaacccaacaggcacagacacacctacctggaaacaatgcttccctagaagtgggaggaaaccagaactggaggtgccctccttctgggggtaggagtcagctaatagacatccaaggtgtgcaggagtgctttcactctgcgcaggaaagatcagagagaagtccagagccttgcctgcttgtaagtacccacttgtggctggggggaatttcctaactgttcacggttgcagagcttgattaaataaagctctcattagtttaagaaatgacccaagaaaggagagagaagtcgggctgtttttaaatgtaatatgattttccatttacttatttatctttaaaatgaggtaaagagcaa

SEQ ID NO: 30177 - DNA, 2300 bp, Homo sapien
gctgccaatttcagagaggtgcaaatcatctcattctgaagcggttctacttcctttcaagttctcacttagtaatgttgctaagtctctaaaattcgaggcttttttgcttttttttttttgagatggagtctcactctgtcaccaagctggagtgcagtggcggatctcagctcactgcaacctccacccccccgggttcaagcgattctcctgcctcagccccctgagtagctggggctacaggcatgcgccaccacacccagctaatttttgtatttttagtagtgactgggtttcaccatgtttgccaggatggtcttgatctcttgacctcatgagccacccttctcggcctcccaaagtgctgggattacagacgtgagccactgcgcccggccaaatttgatgctttctaaatatcactcattcctttcattaacagctgaaaaataaggggaaaaaaggcactaaaattaacatttcacagtagagactaaagaatacattgtgtttgccttataccgcttccataaagttttatgtttggaaattttaggctgaagggaagccctgaaagctgtcacttcaaaaataaatcttaagatattacttcacagagtgatttttctaggagagtgggtgggaggaaaaagcccaaaaacattgttgatgcaaacaggtaggtgacatattaccagtatcctgtggtgtacttaaaaacaaagaataccacgtttatactgaagtaccctttaagcattaggagatatatgaaaaatattacacactttcttaacatacaagtgataatcctccagaccaaaccaaacaaacaaaacagaaaaactgggactattatgcagcaaagcaggtttaaatgaatgttaatagcccggaaaaggaaagattgataagatgtcaaaaggggccactatgcagcaggagttatgtgtatggaaaggtggtttggggctcaggagataaggtgggaccacttggtgattaaatgttagctgacctacagatctatatatgagccttcagtcttgtcttagctcaggcaaccgccttcttttcccataaggtcctcctgagttactgaggacctgcctgacctggagccctccaggaccctaccgtcaagccctccgggtccctaccatcaagtccagggtgcttttcttgatttgtctgtttgccacggtgtccctgtgattttcatgtgcaaagtcctcagatcagcagagacctcgtagttttccgtcacggagaagtaccatttgaaggagtagggaacactgcagaaagcagggaaatgggtttgtatgcctacgagcctccataccagcgagactctttccaaaatgggatttccaatagtgccaccacattcagctccctgaatgcttccagactttcatttcatctactaaagggaattatgtcagcaaccctccctgcctggtgggggtactgtgaagagcaaatgcgacaaggaatttgaaagaaagttccaaacaacaggacaatacaaatatgtttcattattgcctcctctgtaaaatgggaataactgcacagaactgctgcgtagtgatgtgtaggtgaagcttaattatgtaatgcctgaaacacaaaccatcctagatgttgtcatccaaatatgagatacagcacctttctgggcctcttacctatcatatttctgctgcttctgtggtttacggaaattgtaaccctttccgtgtgtgtatgggtgtgtgtgcgcgcgtgtctgaaagaaggaaggaaacatttgcggtcgcggtgaacatctgagtgctgactgtgtgaggggctggaggaaagaggacctatctgaggaccgactggccgaagcctgcaagtttccacaaatgcagtcgctgccgcggcgtctgtctacacacacactggaaggcaagagtaacggagggaggagactggggagcagggaaggcgtgggagcgggacagaggggcagcccggagagcgctggccaatcggagcgcgctccgccagcggccaatcacgggccgcctagcccggcaaatctgcccggcagtgcggggaggggctgctgggagtcctggtgccgccggctgcacttctgtgtgtctttcaggaagccacagggcagggggcgtctgtgcagagaagcgggggagtgagtagcaggcaggcccagcttgtgtaccagcccagtgacatatatagaaacataaatcaggctagagccggcgcgcccgggcgcgcacctgtgtatggacccgcaggca

SEQ ID NO: 30178 - DNA, 2300 bp, Homo sapien
aatgttgaatttgttgatccagggtagagttctaaaggatgtcctgttaggatggcccctggggcagtgatgatgaagtaagaggaagatggcttttttttctcccttcctcacagggccatttagataaaattacagggctattaattgcatttttcccaaatgagactttttttaaaacttaagtccaagggaagaaagcacgcttcatgtgaccaaggtcaggacctccccagtggcttatggtggtgaatggaatttggaaataggatctctaggacccattggggtattgagtgtccccctaattggcccagctccctattgtcgtctggggtgttgtgtttgagccggtgaaaaagttgaaccagaaacacattcctggtgaaaaagactggctcattgcagctgtggaccaccatctggggtggatctaacatcaaccaggggctctgagggggaaaagagccaagcaccaggtctctctaggattgttggatgtcaccacttttctgagagagtaggactcatttatcactaagatgtttcaaacacaagctgttctttcatagcgtatactggtaactggtcacctcattcttcagataaacagtgcatactacccttagtatcagaaacatgcttcccagttttaaaacttggattcctttctatttcttttggccccttcttaaaagtgaaaagaacaatgatgggagatctttttagcgtggggcccaacaagagatagatatgcatgtttgctgcatgccagatatcttttatttaattctacagctttttccagaatggctgccaggtagagcacctgcatcattttggcaaagtcctctttggagtggggtcttcaagcctgatcttggaattgcgttttattattgtctgcctaggactcaggtctgcactgtgggacacaacgctaagtggaaggccccttatccatggcaccatggaagcaggcgcaggatgcatgggaaactgcaatggcattaaaggaggaagctccaagtggatttggagccattctataactccttgaaaacaagactacctcggggatatttaggatgactcgtgtgtcaccaagtgagaaatacctagtgttggaacatttccagtccttctcttgatggttctactttctgcaggttgttttgagcctaccaatcactactgcatgaggactttgaaactcgagagggaattttttttttatcgataagaggtgcttatctataaggagccctcttgtgttttgatttatttatttatttatttatttatttatttatagattaaatatctgccgtgcttcttacatcaagagcactcacacaggagcttactgaacttttcttacccaggatagatgctgctatggtctttctgtcctgaacaggaccacgcatctcagggctgtgagtgattcctgactctgctgttcatgtcctggctcccccagtcctcctggggacagtatacatgtgtggatgtggtctagatctgagaagtcactaccaagccatgcccatgaacgaagataaaatgggtcgtgaagaactattagttcataagtagaccctccagaagagtgttgaaaagaaaggctctagaaagaaaactaggcatggaaatgtgtgcactttgttgctcctcagcaccatctgagaatccctaaggaagtggcagcttctggattcttaagaaggaaatataaacatggagtcccgaatggatgtatgcatttataaagattgtcagactcttcttccagcagtttcctgtttctgtcttttgatgcccatagatggattttgcatgttgcttgcagagaggggtgtcctaggtgaggtactaaaagcacatccacacccccaactcttggtcttccaccctatacgttctgtaaaacaatttaagacctggcttttagcttgcacccttgaggaggtcataatagaaatgcctctgggaaaatctggttgaactttcctttttttgcatttgaacccctccccaaagggttttctgggataatgtcaaattctgtagggccttctctggataagagtaagtaagtgtgttccctcgttttctaaactttccttcaattctgatgctaaatgctaatgacaagctctgaaatccctggtctaccctcagggttttatttttgttgtcatttcattttgcttttgtttttaatttttggtcaattgctaggggctagatcatttccccactttttaccctttgttacttggcaaagagataaggag

SEQ ID NO: 30179 - DNA, 2300 bp, Homo sapien
tgttcactataggtgctctgtttcgagaggtaaggtcagatcagacaacttgaaaagaaacagactaggccaagttcaaaggatcctaaggaatagttagatgagacccagcaaaagagtgtggtcagaggagccaggagaaccaggtacactagcagacaagaaatggcaggggcactatgtgaagacttgggcaccacatttcagagggaaatggctaaattggagccttcatagagaagagcaatttggagatggaagggtccagaagtcatgtcacacggaaaactggggtagttggaacaggaaacatttggagcaaggtgacagagatatcttcaagtatttttaaattgttacatgacttgagtttagaatattatggctttagatatagaagggatcaaagaacatttgtacaaggcattaatgttacaggagagaaaactgaaagccagagagaactgactggctaaggcagaggtaggactagaatccagattcccttcccagtactgtttgccaccatttccagctgcctccccaagtgccttatgtgcggggaagagctaggaccaatgaatggccattttaagaaggtcgagcttagcttgataaagagtattcctttatagaataggaaactaagtgaaacagtgatctcaccatcataaagagtatttctgaggaaatgtgtattcattttctatagttcctataaaaaattaccacaaacttggtagattacaacagtgcaaatgtattaccttgcaggtctagagtcagaagtttaaaatggtcagtggggccatgctccttctagaggccctagagtagaatccacttccttgccttttcagcttctagaagcggcctgcattccttggtttgtggccccttcctctaccttcaaagccagcagcatatcaatcacttaccctgcttctgtcatcacatctctttctcttttttttttttttttttttttttttttgagacggagtctcgctctgttgcccaggctggagtgcagtggtgcgatctctgctcactgcaagctctgcctcttgggttcatgccattctcctgcctcagcctcccgagtagctgggactatacaggtgcccgccactacgcccagctaatttttgtatttttagtagagacagggtttcactgtgttagccaggatggtctccatctcctgaccttgtgatctgcgcccccttggcctcccgaagtgctgggattataggccatcacatctctttctcttattctgacctttcataaggacccctgtgattacactgggcccaccttgataagccaggataatctcccatctgaagatccttaacttgaccacatctgcaaagtcccttttaccatgtaagataacatactcataggttctgaagattaggatgtggacatttttggggggctataattcaacctaccacagaacgtgcggaaaggcttattaatgctggtgcaggtattagaacagatctggattcaaatcttggcttcagtacctactagttgcatgaccattacccctttgagcctttgttcccttgtgcataaaatagaaataaaatctcaacattaccatcaggatttgtggtaatatgcatgaaatgcataacatataatactctctcaatgaatggtagccatatttatttaaaaaactaccagatgcttctcaccatacaagaatttaatagaagaaactccactattaaataggacatttgataaagtgacttccagatttccctctgagattgctgaaatctaaaggaataaaaatttcgtttcctctataaactattctcggggcctcttgtccacttcccagatgcagttacaagggaatcacttttctggatagccaatggctatcagactgtgctttctgccccccacagtcctgccatctgatttttccatgcagctctggttggatttaagcaggactagcagtctgtcctggtgtgtaatgattggctagaccaggcggctgaggccagggcagactccctccttcacatctgtcaatatacctggctgcaagcaagttgctgcctgtgaccacagtctgcagaggccagagagagcaggaaaggaaatggaaaggaacctcaccttcatgcttggggaaaaggagaaacctgtgttaatgtgtcttcccaacatcccactctcttcagcaatcgctggaacagccatgggccatccctgctgagtcaggaaagaagctgagggaagagtcgggattgaaaagcagc

SEQ ID NO: 30180 - DNA, 2300 bp, Homo sapien
caccactgccctccggcctgggcaacagagcaagaccttgaaaacaaaaacaaaaaaagaaagaaagaaaagaaaagaaaagagaaagaaagaagaaagaaaagagaagagaagaggaaaagaaaagaaaatttgccccaggccacttggctagtacttggggtgtgcacacagccagtgtagctctgtgctgaattgtctctgtcacctgagtacctccaaacctctgctgagagcacgaagaagcaggaacaacatttttcagagtgcttaccccacatggtttcagattacagcctcaagccagtatcagtgactggaaaggtattaaataagaaaagactattattctctaaaggcagttgcagacagatatatgggcaaaagttggatgtgaggtttgaagcagcttaacatttgagcatctagaatcaagcactttggagttatggactgagcgagtcagtgacaattcaagaaactttcactcttccagcccttccaatgcttattccttctgttgagacacttcctactgagagaacacagaaagtcttttatttccctgacgaactcatataggttccaaatgctgagacctaatcctggaagtccaatatctaactgacaggtgtttcagaaatagcacagaaaactgaagggaagaaattatcaaaaagtagaatcttagtgctcaaaagatacaaatcttacatgaatagggttcatgtccagcataatgaattaaaaagtgaaataggccagctgggtacagtggctcacacctgtaatcccagtactttgggaggccaagtccagaggatcgcttgaagccaagggtttaagaccaacctgggcaacatagcaagacccctcccctacaaaaaacttctaaaaattagctgggtgtggtggcacatatatgtagtcctagctacttgggaggctgaggaaggaagataacttgagttcttccaggagttcaaggttacagtgaactatgatcttgccactacactccagcctgggtgacagagtgagatcctgtctctaaaaattttctttttaatttgaaaaaggaaaaacaaatatgtaggcaactttttggtattttagaattttgaagactaaaaggacatatatttcagagaggagaaaaaagtaacctacaagaagtgcaaattaactggttctcacttctcatcaccaccatatgatgctagaagatactgggaaatgccttcaaagttagggaacgtttccacctagaattctatacccagccaaactataaatcaagacttagagcagaatatagaccttttctggtagtaaagaccaaaattttaacttctgtgcaaaatattttaaacaaggatgaaattctacttcacttgataaactttcagcagaatgcaagatgatatgtaatcattttaatactatagatttattcttatgagtattaaaaatatgtagcatagcaagcttccatagctatgtatattatttagaagaaaagtattacatatatttaggtattaaaaatacataatagaatagagagtaggtgactatggcaaaattgtgaagacagcacaagaatgactgaaatttgggaaacaccttgctaaagtaaatgccttaaggtattatttattccaaatatatctacattggtaaatatatttataaatatatttacaaaaatatttgtaaaagaagggactttcatgtaaaagaagggactttaaggacactacagagccaaaagcagaaactcatcaactgcagcaataccaggacagaggagcccagagactgtgatttgttggctcacccataaagttggcccagcttccttgacttagactcatattcattgttcttcccacccccaatccccagtagcctctgactatgtttcccaggaagcctctcccgcagggaagggaacatgaggatacactgagctgtgtgtttgcctacaagttccacttctcattataaagcagtgtttagcagtctgactcatgcatcaatacctttatttttacttcctcccattttctctcttattcttttatcctgttgggttgtgtctttttgtataactaatctcaaatgttatttggagtgagaaagagtttaaacaaatatcactaatgaccctaacttcactttcttgtgaggtgtggcagcccctggaccctgattccctgtgggcaactggatgcgctggagcttctggtcctacagagctgggattaacccagctcttttgatatgttgctcagggt

SEQ ID NO: 30181 - DNA, 2300 bp, Homo sapien
gggctaagtgagtgataaaggggaagtaggaggctgggcacagtggctcacacctgtcatcccaacacttagggtggcggaggcagacagatcgcttgagcccaggagttcaagaacagtctgggcaatgtggtgaaaccccatctctgcaaaaaattcaatattagctgggcatggtggtctgcacctgtggtcccagctattcaggaggctgaagtgggaggatcacttgagcccaggaggttaaggctgcagtgagctatgactgtgccattgcactccaacctgggtgacaaagtgaggccctgtctcaaaaaaaaaaaaaagaaaagaaaagaaaaaaaaattccaaggtaatggaaataaaatgattgtatgtttatggggatgatccaaaaaagaggaggaaagagatgacgtgggtgagaaaagaacattgctggagcacttaactgtttaactgttggattgatcagtgtatgtatgcttctgcagggcaaaaactcaggacagggaaaagaattcctctaaaaaacccggcattcctaacaaacatatgaaaaaaagctcatcatcactagtcattacagaaatgcaaatcaaaaccacaacgagataccatctcacgccagttagaatggcaatcattaaaaagtcaggaaataacagacgctgcagagaatgtggagaaatgggaacgcttttacactgttggtgggagtataagttagttcaaccattgtggaagacagtgtggcgattcctcagggatctagaactagaaataccatttgacccagcaatcccattactgggtatatacccaaagaattataaatcattctactataaagacacatacaaacgtatgtttattgcagcactgttcacaataacaaagacttggaaccaacccaagtgcccatcaatgatagactggatgaagaaaatgtggcacatatacaccatggaataccatgcagccataaaaaagaatgaattcatgtcctttgcagggacgtggatgatgctggaaaccatcattctcagcaaactaacacaggaacagaaaaccaaacactgcatgttctcatcataagtgggagttgaacaatgagaacatatggacccagggaggggaacatcacaccctgaggcctgttggggggtgggggacaaggggagggagagcattaggacaaataactaatgcatgcggagcttaaaacctagatgaagggttgatgggtgctgcaaaccaccatggcacatgtatacctgtgtaacaaacctgcacgttctgcacatgtatcccagaacttaaagtataattaaaaaagaaatttaaaaaagacattccgtaggtgaggctctccctaaaagtcaaacttttacttgcacatatgaaaagtgtaatcattaaataagctatttcttcagtgacggtatactgagttctgctcatggtgccaagtactttgcatatattattcagaagcttattagctgccctgcagcaccagtatcatttattgctgcactccaggtgaagaaattgttgctgggagctacaacaacttgcccaaagccacaatgatcataagtagtttgcgcttcgttgtgctcttctttgctggtgtgagattctcgagggccaatgtccttcatctgcgtaactctagggactcgcccagaccttggaagaggttcacattcccgcgtgccgagattgattatgggccaccctcggtctcattcgttgacttccaataaagcattggctggtggacctctacatcagcattgttttcattggatatagcaactcagaaaaatattggggaaaatataaaaactttcaagagatatgattgcaagaaaatcagaatgagtttaaaaccctcctgaccccagtccttagctcaggccgttctccaaggattttgcaaacctgctttctgacgcagctggtaaacttgccccggggcgaactgtcggaaggaggtgcggtcacctggagtttcccaatagatacttcgctgtctggtgaggaaatcatcaccctaggacgtaaaccctcccgcccttctttcagctcttaaaaaaagcctgccacgaaagtccctactgcgttgctgcgaacgtagctttgagaagctggcgcccagtgatggggcaaacagccatgcccttccagcagccgtgaaagccccaacagcaaactgcctgggagcggggcaggtcaccaacttcgttgctcgaactccctgggtgcccgccgcggtggttacaaagggggt

SEQ ID NO: 30182 - DNA, 2300 bp, Homo sapien
agggaaaagaattcctctaaaaaacccggcattcctaacaaacatatgaaaaaaagctcatcatcactagtcattacagaaatgcaaatcaaaaccacaacgagataccatctcacgccagttagaatggcaatcattaaaaagtcaggaaataacagacgctgcagagaatgtggagaaatgggaacgcttttacactgttggtgggagtataagttagttcaaccattgtggaagacagtgtggcgattcctcagggatctagaactagaaataccatttgacccagcaatcccattactgggtatatacccaaagaattataaatcattctactataaagacacatacaaacgtatgtttattgcagcactgttcacaataacaaagacttggaaccaacccaagtgcccatcaatgatagactggatgaagaaaatgtggcacatatacaccatggaataccatgcagccataaaaaagaatgaattcatgtcctttgcagggacgtggatgatgctggaaaccatcattctcagcaaactaacacaggaacagaaaaccaaacactgcatgttctcatcataagtgggagttgaacaatgagaacatatggacccagggaggggaacatcacaccctgaggcctgttggggggtgggggacaaggggagggagagcattaggacaaataactaatgcatgcggagcttaaaacctagatgaagggttgatgggtgctgcaaaccaccatggcacatgtatacctgtgtaacaaacctgcacgttctgcacatgtatcccagaacttaaagtataattaaaaaagaaatttaaaaaagacattccgtaggtgaggctctccctaaaagtcaaacttttacttgcacatatgaaaagtgtaatcattaaataagctatttcttcagtgacggtatactgagttctgctcatggtgccaagtactttgcatatattattcagaagcttattagctgccctgcagcaccagtatcatttattgctgcactccaggtgaagaaattgttgctgggagctacaacaacttgcccaaagccacaatgatcataagtagtttgcgcttcgttgtgctcttctttgctggtgtgagattctcgagggccaatgtccttcatctgcgtaactctagggactcgcccagaccttggaagaggttcacattcccgcgtgccgagattgattatgggccaccctcggtctcattcgttgacttccaataaagcattggctggtggacctctacatcagcattgttttcattggatatagcaactcagaaaaatattggggaaaatataaaaactttcaagagatatgattgcaagaaaatcagaatgagtttaaaaccctcctgaccccagtccttagctcaggccgttctccaaggattttgcaaacctgctttctgacgcagctggtaaacttgccccggggcgaactgtcggaaggaggtgcggtcacctggagtttcccaatagatacttcgctgtctggtgaggaaatcatcaccctaggacgtaaaccctcccgcccttctttcagctcttaaaaaaagcctgccacgaaagtccctactgcgttgctgcgaacgtagctttgagaagctggcgcccagtgatggggcaaacagccatgcccttccagcagccgtgaaagccccaacagcaaactgcctgggagcggggcaggtcaccaacttcgttgctcgaactccctgggtgcccgccgcggtggttacaaagggggtcaagagtgccggacccagccgcgcggagcccaccattgcggcccgagggggacccgacgggggcccgacggtgtggcgtggcgcaaggagcgcgcctgccttctctcgccgccgggaacgggctgcaccaatggccaggtgaggaggcggcggtggtcgcccgggaggagggggtggtgccgactccgtgtgccaggagtgcgtcccggggacgctgcctcccccgcggccgagttggttgccgccggttgcgctgcggagggttgggggcggagaggaggcagtggctgcccgggccgaggaggggcgcgctgactgctcaccgcgagtcaggaggggccggcgggctcacggagggagacagggtgggcgggggcaaaggctaggcgctagggcggcggcgccagcgtagagcggcggtttggaggaaagatgagacggtgagtgggctccggggacacagagtttctttgcttctttacaggctgtagggacaaaagcccgggctggg

SEQ ID NO: 30183 - DNA, 2300 bp, Homo sapien
aaaaaaatgttgcatgggtaagggtacccatgtagttcaatcctgtgttgttcaagagtcaactgaataagaaaatgacactccttgtattatatacagaaatatacctgtgtgtgtataatccatgtgtatgggtgggtgttgtaaaaaagctgccctgattatatatatgttttttaaaactaacaacattttatgaatgtactttttatgctataaaatgtacttcaaaatatgattttaaatgattgtacaatattctctcatgatgtattatagcttatttaattttttccctattatttggcatttatggtattttcccattctaataaataacactgaaatgtcctcaggatccatctatttccttgttttttcacttccaaaatatttaacttgagagaattgtccaaggcttgctggaatttcagtatggcaagccaacgagaggtgatgttagttcagaatagaggagtctcagtttcagtcctctaagcgggcatggtaagatatttctcaatccaggctggtgttgcttttaaaaccagaattgatagcagtagacacatgctgagaagagtatttgtcttggaggcagaaagggcactgtcctggaggaaatgaaagccttaccaagagctagatggcaggactagatcccagctgggagccaaatataatgaagaaacttcatttttttcttgaggtacatttaaaaagataaattatgtttgtatctatctgggcagggctttgggttagaggagaaggagcccaaggcacctttatggacagttgggtacctggcccatcaccaggatttatgcagccagactgtttcttggccttctggataaagaagcagctctttactaggctgcctgaatttgctcacaaagtgtgtgaagctaagcaacagggtgaaggtccttaatccatggctgagagggagtgaggaaggctttgattaaaatggaaagcttatgttcatcaagtttttcacctataggacaacaagagctagaggggtggaagataaaaatactagacataacctcttccttaaacttgtggcctagttacagagacaaccacattatgaaaccattactaaccatatgtgatactgtttatatatagaccagagatgtcataattagtgtctgatgtgcctaagggttggaggacagttatagtggttcatgagttcagtgacaatgtttaaactgtattttccctttgctgataatctaagaaaatttttttttatcaggtagaattataagccttcccatttgcagtaatagtttgtaattcaaagacattttcattggctaaaactttagtgttttaagttaacattgtgcaaaccagggttcaaaacatattttcttaaaaattttaatggtggaagatagaatcctgatctgtccctggaagagtgactaggtcctgatagttgtttctgctagaggagagaatttgcaaggatgagcatagtgcatttggggtactagaaaatttaaaggatataacagtttcaggtttttaaatataccatcccgaccatgtgtcaataattggtggaatacccttttctttgttattacctacctctgatgactaaaggagctttaagtctttttgttgagaaggtaactcccagagtccttgtttaaagaaccatcttctaaccctcatgttattgatcagtgtctaacgtaaacttttttttctctgcccaaatgtgaattttgtttcctcaggactttatttctgaacagttaatgattctagcagagacagctataggaaagtccattgcattatgcctttgggcattagctagtcactagggaagcaggtgttcctcgaagggccagaacattaaggacaaattgtcttttttaatgtaccagcctaatcctgcacctttacttggttagggatttgtttcgctcaaatgtcattgctgtccttttatttctcttttgtacataagttatctcaggtcaatgatctttattctcctttaatttgctgtatggttttaacaggttttttagtaaaactgagtttgtgtttgttagttgcattaggtcagactgcaagattgtttgttcagatgtaggcctaacaagggattgttcttttaaaatcttctttaaggcaaaattttctgttttatttctttacagattccagcaagattatggaagagcatagctacatacaaaaggagctagatttacaaaatggtagcttagaggaagactctgtggtgcattctgttgaga

SEQ ID NO: 30184 - DNA, 2300 bp, Homo sapien
tcccttgagcccaggagatcgaggcttgcagtgagctatgagtgcaccactgtgctccagcctgggtgacattgacagactttgtctcaggaaaaaaagaaaaaaattttcatcttgccatcttttttcatttatggatccccagcacgttactagacaataagtaagttagtagacctttgttgaactgaagattatggagacattgaagtcctggggctaatagaagagagaagtcaagtcacaccagttataataggtcctcctaaaaaaaaaaaaaatcccatttcaactaaattatatctaaaaattaaaggttgaccttttgttttaagtaatacatgacccaatatactggttataacaaaaggtttttagcaaagattacacctgtgcttaagtgtcagcagttggttttctgcataatgtatgtatttatgcagtatgtgtaccgtcctgtgacctacactggttggtgttagttacaagggcccttggatgggtttaggagatggatgtaccctctcctgagggctgtgaatctgcagtgggaacaatgtcagacacagtcctctgaagatggaaaaaagctcagaggtcaaaaaacatacccctagcccatcaccattttttcccctttaacctctaagtgaaaaattgcacacaattttctttacgtatactttctaaaatcttgtgtctccttcaacacttcctttgatatatgtgggagatcaagatgaagaaaaggagaaatgggaatggcgaaaaaaataaaaaatatatgtaaaataattttattcaagatgacctactttctaaattcttagcactgatattttggagcattaaggtatgtaggctctgtacttggacttttcaagagaatgaacactagattcctagtttggaaaggtgggtaggatttggaaatctcagagggcagccagcctcttgacttattaaatagcaggttgttaggtgaagcttcaaagaaagtttggttttaagtagggggacagacatcacagtttgccaggaccaaccccagtttgcatttgaggttccagcataattattaacagtgccctctttgattcttgagaggttctggtctggaatggtcattctggatttgggtcatgcaggttgcaggctattggcatgatgaatgggaaggaagaagactccagagtgcagaaggctgaagggagaattatcttatgacagtaatttctgttcagagttttccttaaaaggcttcctgtagtgctttctgaaatgccttacagactttcttctgatgcaccttggacatcagtttatttttctttagtgcagcttttatagggccagtgtgtctcagtgcaacctggttttcttttaaactcgtgggcagcagtgctgcatgtgtcagtgattcaaacttgaacagattggctgtgaatggggtgataagaatagagagaaacacataccagtagaccaaacttcctgttcacaagcctttgaatactgcgtttcactgtctgaaatagcattcatcttaaggctgggatcatttattccctttggaattaagcaataccactgcagaaaaagaaactattttgggaaggccatgtgggaggaatttttctctgtattccaggctgaacagaaatatctttcatgcttttgaacaccacaccttagagcccaggtaattggaaatggacaactttcagataatcccaaatatttatgccaaggctaatgtatacatgttatactacaaagattaggaaagacttgagtttagatgcttcaacttaattacctaagtggcagaaaaagaactttccttcagagattcgcctctaatatagatgctattgagaagtaaaatgtaacatcttgtccctctccctctccttacatatgctcttggaggttgtttttgcatatgcccatgtagacttttccagattgttggagaagtttaaaataaggcaatgaaggctatgtcccccctgcttcctccctataaagctgaggtgggcagggcttggcagctggtggaaactgaagagataaataagtaccagggctcctggatggatagggtgcagaagagcccaagatgagagtgtgtagctatgagtgcctgccgtgggaagaggccatgaggacggagctgcagctggagtccagaagttcaggcagtgaaagggaggtgcgagcttgtaggaactagtttattagtccttttgatcaagctattgctcttttgttttttttgttgggggattactttagag

SEQ ID NO: 30185 - DNA, 2300 bp, Homo sapien
tatccctactctatgccaggttctatgctacagggatacaggcacgaaagtctgtctgtatgtcctcaagagagtctagtaaagaaggcaggtacttaaatgagtacaaaagtacacatgcattacaaatagcatatggtttccatagctgaaacagcaaagtaaataagttttgacctaggttatagtctctcttttccagaacagtcaaatagaatgtaagcggtggaaaataaaatttcctgttttgtgttaaacattttcaagttttcactttgtctgttagttaccctgactgttcttgcacctttcactccctttggtttcatctttcacttgagtgatgtcttttccatcatttcttttgaagctcttaaatctctttatacagttttctcattggtatcatgagggggtactcttcacaaaactggccactatccatccattgcacctataggagaagtcatgttttaattggcatcatgatttaataaataaagtgtccacacatataaagggacaacaaaaagtagctcataatacatattccacaactgaataaagtgactccaaacattaggtgtcatttatatagaacgttggtgatagtcttgttggtctgatatctttaagtcattaaactaatgggaaggactctcatgggtcattatttttagactttggaggaagcatttagaagtcacactttgtaagatttggttttggtttatttacctatgagtaaagcattagcattattttgcttgcctatattttgtcttctaaactgaggtaagtcagtgtcacctacaattctcagagttgaattgatttgcctcttcggtccaatgactcgtaagtaacattctttaaattatatatgcttggattttgttatgcacctcccttgaccccatgtgtgtgtgtgtgtgtgtgtctggggtgtgtgtgtgtgtgtgtgtgtatgtattagagagacttctcagtctaaaccaatattctcaaaaggctttggtgtttcattcagtgccagcacttcaaatattgctagaatagaagaaatggagagacttttgaagcaggctcatgcagaaaagacgcggctgctcgaatccagggtaagcttcatattttcatgccggaggtctgtgataccgtggtgcaggagccctgcgcttggcatcagacaatactcctccttaaggagccgtgtgttcctggaataaatcactcaacctttctcagtctcattttcttatctgaaaaataaaggtgttagatgatttctaaggctctctactgcagtggattttccataacttgaaatatatatatagtattgacatagaccgaaatgaacactttgtgtttttttgtgtgtgttttttttttgttttttgtttttgttttttgtcttttgatggctgttttgtgttcctgccaaggagcagggaggaatgtcatgtctttatgcattatttcttccttcccagcttgtgctaactgcactattttaatatttaaaatcccacgtttttatgactgtatttcaagtcagaatctgacttccttaggaatcccccaaaatgcctttgcatcctgccctgaagggcacctcctttccttttctaacttccccacgtgcttcctctgtgaccttcagccaggaaactacagagcaacaacaggaattagagggaccatggccttcagttagaagacagtagtcaaaagacaggctaaatcacgtgataagtgctaaagtacagtttgtgaggctttttatttaaaatgggagagttgctggttgatatgaaatgatgaaatgactgaatatattaacaagctggattttcactgaagaccacaatttaattgttaattaaatttagtggttgcatttctgcagatgatgattttggaagctataccaggcatggttatgagttgttttcttgtaggttatgtattataagagactagtctacaaaccaagatttgtctagtaagaattgtcttttttatattgattggaaccattcaagtataaccagtatgttttaaaataatcattgttatgcataatgtttaggaacgggaaatggaagccaaaaaacgagccctggaagaagaaaaacgacgccgggaaatcctggaaaaacgattacaggaagaaactagccagaggcagaagttaatagaaaaggaagtaaaaataagggagagacaaagggcacaggttggtcggtcaatctgaatgcatatgggcaggttgccccctggtggcagttcctaga

SEQ ID NO: 30186 - DNA, 2300 bp, Homo sapien
gaagccaaaaaacgagccctggaagaagaaaaacgacgccgggaaatcctggaaaaacgattacaggaagaaactagccagaggcagaagttaatagaaaaggaagtaaaaataagggagagacaaagggcacaggttggtcggtcaatctgaatgcatatgggcaggttgccccctggtggcagttcctagaagacagctgttctgtgtctgaggatgctttcctgggcactgagcattagcacttgacatgtaagggttaagagaagagtgtgcattcctgtgcaaaaaaaaaaaaaaaaaaaaaaaatgtgagttcatttcaaaactcttagggaaccaccaaccaaatgacacttttctttagtcatgcatggaacgttttgccaggagcagcactttttcttccacccattccttggagtacattttaaaaagagaatcttttttgagcagcttttaaaaatgcacctggatttgctgctgaaaacaaatacaacatttgaactgaaacctttgcttggggaatggaagaggtcctactaagccatcttttacaagcaaacagtctagagcagtgtaatttttcaccaagtccagtgtctttgtcatggtggtagtgttttgtcttttttctgagcactgtattgtcacatgtgttccctttgctacagtagtcctcaacacctgtgcacaagcttgttgtattcaagcaaagtttggagaaaccacacattttatttaatgtcttatcttggtcatcatagaatttgaatctctgttcttgtcactatagctgcttacataatatgttttctgagcaactaacataaagttttgttaagtactatgtaatttaaagctgaactctattttatcaagattcactagactcaaaggcaaaagataccattacttttattctttgtggttgctggccatttgatagtatagcagttagagactatctttaagactttgtatgctttgaggtatcagtaagcctgcagcatctgttacaaccaaagtaccacataatcaaacgttaagtattgaaggaaaagtagaaagtaaaatttgtttattttatttcatcatgcccaacgctctgccaaattttgacttgcagtgaaagtcatccatgcgtgtttactatctgaagccaaaccaaaaagcacaattctattttaatcctgattataagtgttgcctccaagtatataattaggtcatttccccgaggcaaagaggtggggttatttaacagcataaaataagacaccattttagaactatcacccatggtgatatatgcttcctagattggacgggctttcataccagccatcagtaacataaaagacatctaaatacatccctttggcatctggtcctggacagttcattacattaggtccagttttgattccacttctgtctttatgttagctttacttttcaaaatataaatctctgccttcaatttctatcggaatatatgtaaactgacaagtacagctttgtgggatcctgtgggggccgtacttactaaatagtgttcaatcaatcatgtcatgcttgagattacttgagaatgattgttaagctgtggcagggacaacttctggaaacttaacagtggagcagtcctcatctgcaaggagcagcccagaaaacttcatgcttcattacaagagcaaagtacatcttttaaactaagataaatgaccatttttcattttctcaactgcccatcttaaggaatagaataaattgtcctgagtttatctgcctctcccctacatattacagcatctttctgaaaatactatccactttttagactccaaatcataagtgctttgtttatcttaagctcttttaatcatataggcattttaaagcttaggttttacagttaatttctgcttctaaacatctgtgacctaaaacaaaacaaataattagctatagatgcaatgggttttgcacttttccaggctcgtcctttgacacgctacctgcctgtccggaaggaagactttgatttgcggagccatgtagagactgctggccacaatattgacacctgttaccatgtatcaatcacagagaagacctgccgaggattcctcatcaaaatgggtgggaaaattaaaacgtggaaaaaacgttggtttgtttttgatcggaacaagcgaacattctcttattatgcaggtgggtgataaaaacaatttaagccatatactcaaatcaagaaccccctgttaaagagcaaaggcaattgaaattcagtg

SEQ ID NO: 30187 - DNA, 2300 bp, Homo sapien
ggaagaaaagggagagaagtgattgagaatatttgcaattatccaaaacatgcagagagaagtgtttgttaagatataagggatgggccaggtgcggtggctcacacctgtaattccagcactttgggaagccaaggggggtggatcacctgcagtcaggagttcgagaccagcctggccaacatggtgaaaccccatctctactaaaaatacaaaaattaaccaggcatggtggtcggtgcctgtaatcccagctattcaggaggctgaagcaggagaatcgcttgaacccaggaggtggaggttgcagtgagctgagatcgccccattgcactccaggctgggtgacaagagcgagactcagtctaaaacatacacacacacacacacaaaaacccaaaaaagaaatataagggatgatgaaatgacatgcatcaggcatcaccttagtgatttagtcccttagagtctacaacaggtctaatggagaacgggcaacatagctcagcatcttttggagtatgtcctgaaatcaagttgctgtccttaactatatgtccttagtagagagaggcatcccacctctcaagaaagagatctattcagtctttatttatctaactgttccagactgttccaacagtccaggttctcacgactccaaagacatgctggattcactatatccaaactttgcctttaattctggtaccaattactgccccccaaatttataaccaggataataaaagttactttactatcttatatatactcaaagtattacacaagccaccataacttttaaataggaaactactacgtaaaactccatggttgatgcttgaggcccccaggaattagtttgaaaggtatttagagctggagtccggaaacccttgtactacaatttattcaactatttttctattgttagccattcccatttttttccttctctttgcctctaaaaacggtgtagtagataatatgcagtcttaagaactagtgttgtttttctataggataatcacaaattggtgccactgcgttaaaaggcactggaatggatgcatattttaaaattgtaatagatgtggccatattacttcacaacaaattttagtaattcaccttcctagcaatcatacataagtgctagtgtctagcatccttgccaattatttttcttttttgccaactgaatggggggaaaaaggcattatttttttaattccagtttttcatttagtgagtttgagcatcatgtttccttatatgggctgcctatttatagctgttggccaattttatttgaattatatttcttatttataggagcaggctgagtagaagtattaatgtatctatgctacaaaatccatttttctaagctcttaacttgaggtgtcttttgccattcaaaaagtttaaattcgtatacaaatatattttttatttatgatgttggggttttgaaatcttggttaagaaagtcccttctgtccccggattatataatattctcctaaaatttatttaatcctctcagttgtattcttccgttgaaatctttttttactgaaatttattttcgcatatagcacgaggagggggccaagataattcagtatttcgttaatcaggcatatagatctagagcggggaatgtccgataccattccaggttatacaggcgagattaatgtcagatcttgggagcatttccagtacaggttaaaactgtcacgcggtcggcgggattgcaggtgatgcagcaagcctggtgtcctcgacaggagacgtttcccatctaggaccgttggatagggttcctttctgagcttccagctctgtagtatctatcagcccgctgatagggcagcctcccgacgccactcaaaacatcttaaaggccccaagccaaaccccgctactagtagaaccaacagtctaaacgaaagagccacgacgctctgcgcatgtgcgctcttcgcaagctgaaaatcttgcggggagctctttagcaagttccgccttccagcctgaagcgcatgcgcagcctcggttccgttgcgtagcgtgtccctcagtgggacactgcagggtgcggggacaactacgaagatggcggttgcgcgcttggcagctgtggcggcctgggtaccttgtcggagctggggctgggcagccgtccccttcggtccccaccgtggcctcagcgtgctgcttgcacggatacctcagcgggcgccacggtggctcccaggtcagtgtccgaaaggcgggagtaggatgcg

SEQ ID NO: 30188 - DNA, 2300 bp, Homo sapien
tggtgaaaaccccgtctctactaaaaatacaaaaataagctagttgtggtggctcatgcctgtaatcctcgctacttaggaggctgaggcaggagaatcacttgaactagggagtcagaggttgcagtgagctgagatcacaccattgcgccccagcctggccacagagtgagactccgaatcaaaaaaaaagaaagaaaaagttgttgaaaacattaactataatactagtaggcacttagtaaatgtggcattgagctgatttccactgtcacccctgaggagatgaagcattttttctctgaagacttcctctggatttctggacacttccatgccctgctgtggcccctctctttgccattgtatcctctctagaagcatgggcccagtcattcacttaaagcacaccagctactctgttataatatgagggactctttgggtacaaaagatttgcaaaacacagtgtttaaaaaaagtcaagcaaatgtacatctttagaattgtttcaagctttgcatatcaaaccaacaacttccttagagccattccagccatggaaaaaattatgtggtttctgtttgggactccgttcccttagtctaaggttggaactagccttatggctcctccccaagataccaatgatgacttccataattcttctgtcaatttccctgctctaagctcttcccctaagctccaagtgtcccaacacagtgctgctgtcttttgagcttcttcaactgatgattccatgcagcatcaagacctgccttagtcagcccttcccttgtctcttcctaaacctactgctctcctgaatctcctagttttctgttttcagaggactgtctgccaggccttcaacgactgaccgctaagtctttttcaggcaaaccacccacatatctcctaagtaattaaattttcattagtccaggcatcagccggtaggagatttttctcaatacatgtattatttgaggagtcatttcctgcatagcttctaatcaatttcccacagggacaaagatcatcatcccatgtacccagaattgctttatttaatatgcttgagtcaatttatcaatctgttttcaatgcaagaattgtattttattcctcctcagtccagtagttggcataaacactcagtaaatatctgttgaatgaagaaatgaaccaaacgaaaaaaaatgtggaatttttctcatgaaaaacacccagagaattacacaacaccaatgagactcaatctttacccacaaatggcttacagtctaggaggacaaactgccaagccctttagctgttataaaaatgtggggccaacttagagctaatggtttctcctgagtgcttgtttgcccatgagaaatattcagttacttctgacaatatgtcggttgtgccttcacggtccttacttcagatgaagtctttacattctatcaaaacctttcactctaagagttcttagtcgttgagttttgtttaatttataaaacttgccgggcgtggtggctcatgcctgtaatcccagaactttgggaggccgaggcagtcagatcacctgaggtcaggagttcaagaccagcctgaccaacgtggcaaaaccccatctccactaaaaatacaaaaattagccaggcctggtggcacacacctgtaatcctagctacctgggaggctgaggcaggagaatcgcttgaacccaggaggcagaggttgcagccagccgagattgtgccactgcactccagcctgggcaacagagcgagactctgtctaaaaatatatagtaagaattataataataatttataaaacttgttcttagtgtctttcagttaagagtagcatgaaaaaaatacctcccttgaataagtcaaactgaggcacaacagtttcaggatggaagtttctgggtgaagttgggctggcagctgaacaagtaaatgatagcagctctcagtccctcccctcctgtcctgccagacagttgttacctcagggcagggggaaagtagcttggctattcccgacagatggacagttggtagaacggaccctcccacaggccctcatccccttgtgcagctgctggcctcgtagacaatcggctgtctccccagaagagggaaagaattgtgcagatgagaaagaggctctcagcgggagggaggcaggcgggcttgattgacacaggagagggctggctttttggagggctcttagcaacggccctggttgagccccctcagccatgagaaaatcaaatcaatgtgccattc

SEQ ID NO: 30189 - DNA, 2300 bp, Homo sapien
ctagtttcaccctgaccttgtgatcttgctctgaccttctgccttgtgatattttattgcctttgaagcacgtgatctctgtggcccacaccctattcatacactacctcccctttgaaaatcgctaataaaaacttgctggttttgtggctgagggggcatcatggaacctgccgacatgtgatgtcttccccggacacccagctttaaaatttctctcttttgtactctttctctttatttctcagaccggccgacacttagggaaaatagaaaagaacctacattgaaatatcgggggctggttcccccaatagaaaccatttcactagggtttgtatacagtaatgtctagtttatctgatcttaattttgtgacttggtgcaaatcaagttattatacttatgtaaataatttgatatacttacataaatatgaatgcttaaatagtcatatttaggccttttagtaccaacatctcctgactgggtagtttcatttaagatcctgtctacttctacttggtaacatatcttatttcttttttttgaagatatccaatatctcagtccaagtggtcagtgcccaaaagaagctgccagtgagacgaccaccgttgccagggagacgactaccattgccaggaagacgaccaccacaaagacccattggcaaagccaaacccaagaagcaatccaagaaaaaagttcccttttggaatgtacaaaataaaatcattctcttcacagtatttttattcatcctagcagtcatagcctggacacttctgtggctgtatatcagtaagttaaaaatctgtgtttctttggggttagggcttatggtatgagtccagcattagcaatgcagccctaatctgccataggtatttctgatgggattttcctttttccaatatggatacaccatttccaaaactggtgttgatggttttttattattttgttttgagacaaggtcttgctctgtcacccaggctggagtgtagtggcacaatcacagctcactgcaaccttgaactcctgggctcaagcaatcctgctgcctcagcctcccgagtagctgagaccacaggtctatgccagcacacctgggctaactggctaacttttaaagtttgttgtagagacagagttctcactatgatgcccaggctggtcccaaactcctgtactcaaacaatcctcccaccttggccttccaaagtgctaggattacaggcgtgaaccatggtgcccggcctggtgttgatattttaaggagacataagccagaattctctttctcatttcttttttttttttaccaacaccattttctccccataggagagcaagaggaggagattggggataggatgggaagagctgagaaggatgctcaggagattttgactggttcagaaatgtaatgcatttgtagctttaaaaaaattaatggaatgctaagctgtttcatttcctcattccacccaccacctgtttctaggcaaccttgaatttccggctccctgagctccattttgcacatgcatctttctctcctctgttattacgtgtttgttgatctgactgatccttttggacaggtgtcataactaagccctttcctatagagttctcacttatgcaacactgcaagtatagcctttgttgacttgtatcggagttgccatctatacatgttaatgtatttgatacaaaatcatgcaccatgatataatgtgaaatacatagttattctgtgccctagatttctggctcagagcttctaacattctgtaacttcctgaatgataggagtgataggagcatcttttggtttatatacatacattttgttataatatttgattgtagtccttagatcctaacacagagcttctaagaatgtctttttgtatattaacaaagtgactggtggctgaaagcccctaggtaaccagagaaaccaaccacatgcttagaggattgtaactttcaagagggggctgaagattgagcttaatcacgaatgcacaatgatttaaaactgacctctgtaaaaaccaaggagcttccaggttggtgaacatatccagttgctgggagggtggcatgctccaactccacagggacagaagctcctactctagagacccttctggacctcgctgtaggtacttcttcatctggctgctcatctgtatcctttataataaagaaggaatagtaagtaaagtgtttctctgagttctgtgagtcattttagcaaattatgaaacctgagggctttatga

SEQ ID NO: 30190 - DNA, 2300 bp, Homo sapien
cacagtcagggaatgtaatggagcatttactgagatcctttcatttttcaggcacaggaataaattctttaccttaatcttcctgactctgctaggtaggaatcattttataagaaaacaagcagacattgaacagcttgcccaagaacacacagatagtgagagtctaaatttgatcctagttctgtctgccttcagaacttatattccttccactgtaacatgagaacaagggttaggcatatggaattatagaaatgcatttaaatctaattacagagtatataaaccttgcttaacagtactcaaaaggcattagaagatgtggtttagggtgtgcttgagacaggaacagttgctttttgattctctgggggagtgagggaggctttaggtatctgtgcatggagaaatcaggcatggagatagctactatccatctgaagtgagaaaaaaatctcacatttaggatgaacttctgcaatcaaataagggaactatgagaaaagttttctggaccctgggtaaggatgggggtggggagaatcagaagtttgagaggtgtcagtgcttccagtcaggtctgcatgttttcgtgactacagatcctatcaagacctccctgcaaattcccacacccttcaatggctctagttctttatcagtctccagtcccttttaggcctaggagtgttaacagcttctcgctattgctagtccctgggtacgtcaccatgccttgttgattcccttaacccttgctccttggttaaaaaacctgttcaaaaatcccagctgagaatgcagcctgattcttgcaagatccacctgttggagcagaagtcagtgcaggtcagcagatgagtcactgcagactccccttagcaggcagatggatccaaagttcaggggatctggtagcaggcatcagactgctggagacaggatatctaggctgtgtctcaacatcaggtactgaagatgccagacttttggactcaagtcaacatatttggagtggagctgatttatatgcttcttgttaatggtctggtcttaatgtgtgtgtgtgtgtgtgtgtgtgtgtgtgtgttgcgtggagggtgagaagtaaggagcaagactattcggaacagaagcttgagagttgaggcccttggcccaacccatgctgtgcttaacaaacataattccatgctaactaaaccggaagttctgaactacagatagggtgtcaaggagattgtgtgtgcgcgtgcattgtgtgtgtgtgtgtgtgtgtgtgtgtgtaaggcccctcctctcaaagataaataataatggtcatttatgagtgcttgctgtgtcaatcactgttctgagtgctttgcttacaacaacccttgtaatcctggtaacaactacatttaggagggtacaaatattacaccaactttccagatgaggacgttggcacagagagatgaagaccgaggtctcacagtgaggaaccctctgggtggagaataacccaggtacactggttttagagtccgctgtccccagcaccacacaatactgtctctgtgcctgactctggacttgcgaggaagtgtgttggtgtatattattcaccttcatgcactcagaacctagcaccatgctggcacgaggcatggttatttgttgattgaatgaatgcacttttgctaggccgcgaggactgtggcaaaccccaacaaccaacagttcgtagggttagatcgcaaacttttctccgttggacggtgctgccgggcccaccctttccttaccacagcccggcacccaggcagcccctaaacggagatggtctgcatctgcaggcgcggggaaaggcatagcaggcagcgccctgaacaaatcagaaaaacagccttcggctctggagcccactccggcacggcctcaggtgctctaccccgcgggatccagggagtggccgccactcacagttgcccctcctgtccgctccggtccgctcccgccgcccgaggtccgcgacgccccgcccagtgggtggagtgtgaggcggggaggtcgctcgactcgccggcgctgtggcctcccgcggagccgctcagactttccctgccggcacatggacctggcccaaccctcacagccagtagacgagctggagctctcggtgctcgagcggcagccagaagagaacacgcctctcaatggtgccgacaaggtcttcccttctttggacgaggaggtccccccggccgaggtaaggtccccttggcgctggccctaacttgccggcggcggga

SEQ ID NO: 30191 - DNA, 2300 bp, Homo sapien
ttttgaagtagcattaacttgagttttgatttatggtgggctcaattcttgatccagagcttccagataacgttgattccaggctggagtggaatctcctctgccttagaagcagttttgctttgtcaggtgatgtgtaatatgatctgtcggtaatgtgtgtggtttaatttgcttctgtttgtttagctcacagatgtgtacagtacatcgccctctctgggtcgttattttacttcagttgaaatagtggacttcaggtaagagtgtggaacattacattttgctctctttctctggaaagagatccccccaccccacccttcgtcatttacctagcagggattcccagagcctcagagcatgaagggaacctgtaatagaatcacagaatgtcagtgctgggaaggtcttttacaccaacaggctcaactcccttattttacaaatgagaaaaaggaagcccagattaatggtataattcaaccagggtcacacagaagaggggaaaagccagtcccaggtaaaccatttctgtttaacaatgaatgctcaaataagctaagggtagaagtagaaatagatctcaggtcgtgctgtgatgcgagtgatacatgtataggcatttgcttttgaggagcacaagtaatacaggagtacattctccttgtttagtattaaagatgtaaagaggggccgggcgtggtagctcacgcctgtaatcccagcactttgcgaggccaaggcgggcagatcacttgaggtcaggagttcaagactagcctggccaacgtggtgaaaccctgtctcaactaaaaatacaaaaattagccaggtgtgttggtgggtgcctctaatcccagctactcaggaggctgaggcaggagaatctcttgaattcgggaggggaggttgcagtgagccgagattgcgccactgcactccagcctgagtgacagagtgagactctgtcaaaaaaataaaaataaataaaaataaaaaaaagaagacataaagaggtatgcacaggaaaagtctcccttctgcctcctttcttctccactgccaccaccaataactaatgccattcccttccatggaggtaatagctgtcaagagttgagtgtaattacttctgttcatgtatctaccataggcaccacaaatactacacacacataggatatacacacccatatgtattttttattttttaaatttcctcctcatctttaatgttcttgagatgtaggcatcagggtgtatgtgtgtagagtccatttattatccttttacatcattgggactattggagatgacttaaaatttatatcaaagcttcattatccattatgcctgagatgtctctggaatatgaccatcaaaagttgtattatattgagattcccccttcaaactataagttctccaaaccctaatattagcagacctgggaggggaggcacataaagcaggtggtaggtagcaccatggtgtggggccaaacagacctgaagtctacagatacatatggtgcaggctgcctttgatctccttctttaaagacccccaatgggctgggcatggtggcttacacctgtaatcccagtactttgggaggctgaggtaggcagatcatgaggtcaggagattgagaccatcctggccaacatggtgaaaccccatgtctactaaaaatacaaaaattagctggacgtggtggcgcgtgcctgtaaacccagctacttgggaggctgaagcgggagaattgtgtgaaccagggagtcgcaggttgcagtgagctgagatcgcaccattgcactccagcctgtgacacagagagactcaaacaagacaaaacaaaacagacccagtgtacatggtacttacggtgacatctctgcactttatttcaagaagtccaggcagaggtcctaaagtattgaattgaggaagaaaagccattgcttcccaaagggtgctgctgcacatgggtgggaggcggctaaatccctggcacatgcatttgtgtctacaggggcattgtgacctcagccctggactggcccagctagaacctggaaaaatgccctttggtttattagctgctagactcactccagtggtgggcagctgggcgaaaggccctgaaagttgctcttttctcaaaattcagcctcatgtaaatttaccctgtgacctgccatgggggattaggatgggctggccaggccaggctaggtggcctgattttcccattcagcttctgacctggtcttctgaaagtcagactctggccc

SEQ ID NO: 30192 - DNA, 2300 bp, Homo sapien
gacctttacattactcaaggacaagcaataaaatattttgcactttgttttatttctttcaaggaacttcacaagagcagtcctgtatctgcttttcttaccattgaacctacagtgcccagcacatagtaggcactcgacacatacttgttaaaggaatgaacaaacagatgagtgaccaaactggaaacaaccatcaaatacaaggataatacaaaaatccatgattcctgtcccgagatttctttcttttttaaccttttgtctgttgagattcatttatgtgcagtgaagtgcacccttattagtatacagttctgtgaattatgagaaatgcatacagtcatgtgggcactaacacaatcaagataaagaacaacaacaaaaaatttcctcctgtgctttgaaagtcaacacctcccccaccttttgctcctggcaacactaatatgttttctgttcctgtggtttcaccttatctctaatgtcacagaaggtaggctttaagtctggtctctttcacttagtgtaatgcatttgagattgatccaagttattgcatgtattaatagtccactccttttcaatgatggtcaggattctgttgtgtggatgtaatataacacagagcttatttagcaattcactcaatgaagatcagttgggctatttccagggtatttcggctattatgagtaaagcacatataaaaatttgtacacacagtcttagaggacataagtttcacttggctaaatgcctaggagtgaaattgccaggttgtacagtaaccctatgttcaattttataagaaattgccatacttctgagatgggagagttcccttgaccccttctcgggacttgcgacaggggtgtggcctacttacttggccaccaccatgctcaaactctctgtgggagcgggagcacgcaggcaagcgggtgccagggcttcgatgagcacttttgggctccagcccaacagcagcatttagggatgtgttacaattcatgctcttttagcagttgccatccgtggacagctaagtgttaacccactcaatggagagtcagggtggcagccttttacaccctgccctgttggtacccaggttcttgttcagcatccaggaagaatcaggttgcatgaatggtttgaaagttgatggatgtggacgattttattaaatggtggaagtggctctcagtggaaggggagctgcaaaggggatggtgcaggaagaaagtgacctttccctgaagtctgctgtctctggccgggctcctccctgaagtcatgccacctgaagttaagccacatctctgacactcagttgcttcttctcctcttgatgttcagccgcttgtctgtctgccagctgaggtctggggtttatatgggcacgggataggggggctggacaggctaaagagtaacatttgggcaggataacagggataactgttctcatttagggcttcggtttcaaggcttgagggtgggacctttgccagtgaaccaccctcttctacccagtaaagccctgccttctgtccttatcacttctttccaaaaaggctgtcattttgcattctcatcagcaatgcatgagacttccagttgctttgcataccttgccatacttgatattgtcagggttttatagccattgtaataagtatgtaaaagtgttccattgtggatttgatttacacttccctaataactacaatgtttagcatcttttaatgttcatctgtatagttcctttggtgaaatgtctgttcaaatattttgcccattttgttactgggtgtttgttttcagatttgagagttgttgatactatattttctacaggtctgtggcttgactgttttaacctccttctgacttttctaagaagacaacgtgatttataaacgtaaatatctgtagtggaaaaactcccatggcccatctgtaatttcagacctgggattccccagaggttcgaagctctcattgacgggtagttgctggttatggccaacagccaggttggttcaggcactgacatgttaggacattctgcacatgcgtgcctctaacactcctcccccagcctcttccttccctctgcagagacacccttctcctttctgctgtctctgcacgggtggccagagccacacagccctttctttaagtcaggagttgccctgtcagagcacaaggcaagaaggaagtggtaaagggacggaggggaagccctgagaggactgagaggatgggaaattctctgctgagagaaaaca

SEQ ID NO: 30193 - DNA, 2300 bp, Homo sapien
ctggatcttatttaaatcctgggttttaccaggcatcctctgacactgttctggcaggagaagtggggtcacctcttgtaggcaagttggaataaaagctcaagttctctactcagtcttcattgacacacagccgaagaaggggtgtcttcttactgcttaggtaggagtggggcttcaggctcttcactaggtctctgatgatagccccctggatgggaaagagaagggtgtcctattactgctccctgcatggtctccactgataccatgggaggtggcttatgcctataatcccaggactttgggaggctgaggagaggatggcttgaggccaggagtttgagaccagcctgggcaacatagcaagactccatctctacaaaaagaattaaaaaattaggtgtggtgacatgcctgtagaagtattcacccaaatacttgggaggttcaggtgtgaggactgcttgagcccagaagtttaaggtagcagggagctatggtcataccactaccttccagcctgagtgacagagtgagatcccatctcttggaaaaaaaaggtgaatgattctggattacaaggatgtccagtgtgtggtcattagagtatattgctaaagagaaatattagacaacatttacatttcctgttttatttatatatatatatatatatatatatatataaacttagcaagacatatgtatataaacaaatacataatgtggcaaatattagctttgcaacttaattaatttttaaatatatatccacacatgaaccacaacccacacacagatatgtggcatgtatttccaacaatgagaatcctttttttttttttttgaaacggtgtctcaccctgtctcccaggctggagtgcagtggcgcaatctcggctcactgcaacctccatctcccgggttcaagtgattctcctttcttagcctcccggagctaggactataggcgcctgccaccatgcccggctaatttttgtatttttagtagagacggggtttcaccttgttggtcaggctggtctcgaactcctgacctcaggtgatccacctgcctcggcctcccaaagtgctgggattacaggcatgagccactgcacctggccgagaatagattttttaaagacccaagaaaaggggcagcccagcaagacagaaaatttcaccagtaactgctctactttaaccaaacaccacagaaaagtgttcacccactccctgtacccacataccagcaaagactgagtaggaagcttaaacttcacccataccatacaagatgccagaaccctgcctgtttccccaccccaaccagagcagtatcagaaaaggccttgtgggagctggaacttccataacaaccaggccataaagatgcaccccatgcctcagttggagaccatgtagggagcctggacttctgctccaacccagccaaacaagttgcctcctgccttcttcatcagggtagtatcagaggaggccaaatgaagagttgggaattttaccaccattcacttataaacgtgtgggtcgggagaaagagatgaaacacagagaacaaaacattaaatacaattttaaataactttaagatattttatgagagtaggaatgtgaaaagttggctctatagtaataactaagtaatttcaattaaaatattttttacatattatgtttagaaaaaacaaatgagtatatcattattcctgaaaatttcctcacatataacccagagtgaaagttcaccttgtcatcttgatttcattctcttacatgcccacaatatccattcactttttccctaacccagcaacctgcgtcctcatatctctaccacactatcttatccaggaaacttccttttactagaattctgggaaagcagtgtccaacagctctttgtcagaaatccactgtcccaaagtcttaaattaacacaatggcgcaatttctgtaggttcattttcaccccttatttgtttatttttaaaaaataaaacaaagccttaagccgtcaaatgcctgagatatacaggagcaatgacgttgcatttcatcagccaatcaagtaagagatgatgggcctgaagctaaccggtgcagactaggggcgagtttggagcaagtaactgtcagtgaggttgcagttggtctgggctgtttggctgtgagcgaaatagctgccccccacttctcacttgcacaccacgggatactcctcctgaggctccggatggtgagctctccagtctctagtttccttttctgga

SEQ ID NO: 30194 - DNA, 2300 bp, Homo sapien
ttcatcttttctaatatatgcatttagtgctatatatttttcctctgaacactgcttttactgcatcttacaaattttgataagtagtatttttattttcatttagttaaaatatttttagggttttttttgagatttcctatttaacccatatgttatttagaaatatattgtttaatatccaaatatttggggactttccatttatctttttgttatttctagtttaatcccattgtggtctgagaacacattttgtatgttaaagtgttgttttaactcccagaatgagttctaggttggttaacgtcctgtgtgaatttgaaaagaataaatattctggtgtttttggataaagtgatcttaatgatattaagttgattgatagtgttttcaggtcaattacatccttcctgatctcttggcagcttgatctattaagggatgttgaagtctctggctacaatagatttgtctgtttttccttgtggttctatcagtttttgcctcacatatttttaacatctactgttaggcacatacatattaaaaattattgtcttcttagagaattaacccctttattgttacatgatgccctcttctatccctgaaaatttttcttgttttgaaatctgctttgtctaaagttaatatagctactgcaactctcttttgattagtgttaacatggtattttttttggctcctttactttaaatttatctgtgtctttatatacagtcattccttggtatccatgggagattggttgccttctccccagtactctacactactgtagagatgagggctcaagtcacttatataaaatggtgtagtatttgcatatgacctacatacattctatcatatactttgttttaaacattttttataacattaatatttattgctttatatgaatactgtattgaaagcccaagcattccatttactcacagaaactgtacaattatatattacttcataaatgcaatgaacacattacagtctacaaaatcagaaattacagaagtttaaaaattctgagtatcaaataatacagatgaagaaatagacataaatatggcagcccataattttgacaaagaaattgtagcctccctgactttaaatatgtgaatttgaaaatactgagtttggagtaatcattgtgctttgtgttggtctaaaaaatataacactggctgtcaaatcagcatgtctgaaaatatttaattcacttccaaatgtcatacaaattattgtggcttctatgtaccctaaggcttcagtcatttagctcaggtacattactaaaagtaatatatcaattcttccagtacagtgatgtttcacatcattcacatttgcatactctggaataaaatagaaagtaatgtgttatattcaaaatattcagaaaagcaagcaaaaggtcaaggaaactgctggttattctgaaataatcttgtgttgaggtgagaaattaaagaaaaataaaattaaaaagagaaaaaagttttcctgttttaggctaacttgtccaagaggcagcaacaggcacagcccagacctaggaaaagtcttgataatattatctaatgtgctctggagactctcccagcaccccctcaacacagggagaagaaaaacaaattttcctttgctttatggaatgagtttatagattcttgttgtctgtaactagtgattttaagtattctgttttatctaagaagtacaaaaaaagtcatgagaagcctgagtaggcctgaactacagctgcctgggccccacagtgaaggttataggataagcccctgcacaggcaaacctagataaggaacatctgggttgcttggcaacggtcatatgcaatcctgtctttgtcctgcctctggatccctcctttcatgccactgtaagcttgcttcaagctagcccaccccgttttgtgaagtgtgtatgaaagtcaggtgctgtctttgttctgggcccagccttttggacatgagtcagctgggcctgagtgcactcaataaagattctcctgtttcaacccaaggtctctctcgtcctcctgaatcccgcaacatttctggtgagtcagccaggaggccgtggagaggacaggttggctgtctcctttgcctgtaggtggtctggggccccagcagtgggagacctgtaacttcaggcaccactggaagaacttaagcccagagaaggaaacggctcttccactccccagcgcccctccccagatggtgcatcagaacctggagggttgcagg

SEQ ID NO: 30195 - DNA, 2300 bp, Homo sapien
ggaggccaaggtgggagaattttttttccaagtgtgcagttaatatttctctaatagaggaaggttaaaaataaagtgataggaaaatatatgggaaaaataaatgtaatagaatgatgtacatatgcttgtgaaaagacaggtataagaatgtttatagcaccactatgaaaaatgcttccaatttgaaaaacaaagaaatgttaattaatagaagaatagataaataaattgtaatagacagtatttacagaataggatactatacatcagtgagaatgaataagccacactacaggcaataacatggatggatttttaaaatctactgttgagtaaaaaacccagaaacaagtgaagacatatgctacgatgccattcatataaaattcaaaatcaggtgagcctagtctatggtgttagaagtaggagaataggggccgggcgcggtggctcacgcctgtaattcccacaactttgggaggctgagacgggcgaatcatgaagtcaggagatcgagaccatcctggctaaacggtgaaaccccgtctctactaaaaatacaaaaaaaattagccgggcgtggtggcgggcgcctgtagtcccagctacttcggaggctgaggcaggagaatggcgtgaacccaggaggcagagcttgcagtgagccgagatcgcgccactgcactccagcctggacgacagagcgagactccgcccccgtctcccaccgccccccccccaaaaaaagaagtgggagaataggtcaggtgcagtggttcatgcctgtaatcccactgctttgggaggcaaaggtagaaggagcatttgaggctaggaatttcaggccagcctgggcaacacaagaccccgtgtctggaaaaaaaaaaaaagctggacatagtggctgcacaactatcattctagctactctagaggctgaggtgagaggatcccttgagcccaggagtgagttatgatcgcaccactgcattccagcttggacaacagagcgagactttgtctgtaaaaagaagcaaaaacaaaaccccaaagctttgtcccagctccttatgagagggtggtagtagtaaaacacaaaagccttcaggaggtgaacacttgatgatttctttgtccttttttttttttttttaagagccaagaactctggaacaagaagaagaagacgaaggaggaggaggagggggagggggaggaggagaaggagaaggaggagaaggagaaggagaaggagacggagaaggaggaagaggaggaggagggccgggcgcagtggctcacgcctgtaatcccagcattttgggaggccgaggcgggcggatcacgaggtcaagagaccgagaccatcctggctaacatggtgaaaccccgtctctactaaaaatacaaaaaattagccgggcatggtggcgggcgtctgtagtcccagctactcgggaggctgaggcaggagaatggcgggaacccgggaggcggagcttgtagtgagccaagatagcgccactgcactccagcctggaccacagagcgagactccgtctcaagaagaagaagaaggagaagaaggagaaggagaagggaaaaaagaatcctcatcattaatgcaagtggaaggaaactcttcaccaaagaattgatcacatcatgaaaggtgaaatcattacggaattgcttaaatatataatttgaatctggatttaaaaataataaatgtaagttttttctttaaaaaaaaaaaaaagtccattggttaaattcagcttgaatcctttgccactacatcaagagctaacaggtcaacaactgatctccacaacctcccacctcatttcctttctcagtccaggtagcaggaaaatggaaaaaaaaaaatgattttttttttccaaacactttgtcagtttccccagcggtcacctttgaaaagggaaaaatgtctgaaaatagacaaagctgaatataaacatcatttaattccccccacacagacagcctccgctcctgtgagggcgtggggaaaacggagtgggagaagggggctagcgaggaggaagaggcgggaggtgcggcaggggcacaggtgacgctcctcccgcctgcctagcagagctccaggcgcacatccgcagtcagccacctcgcgcgcgcctccaggagcaaggatggagaggctggtgagcggggccggggcttgggaaggagggcgcagggcaggcgatgttgagccggtggccctggggcgggcggcgagtggaaggcgcggagcttcggctctt

SEQ ID NO: 30196 - DNA, 2300 bp, Homo sapien
gctattttattatttcagtggaaactcagggattatgaaagataagcatgtatggcaagtctttcatcttgaaatagaagcctattattaaatttttctaaagccagaatatttggaaaatattagtacaacagttcatgaatacaagataaatctatcagttatttcaaaagttgggcaaagtgttatgttttgaggcatctggttaacataaaatatattttaaaatttattcatttgtcatcagatacaaatatttcattaaatattgtaatatgccagctcagagaaagatttttttatcctgtttggcaagtagattgcttggttcacctgtcaaactgcgtcatcagagactccactctttctatttattttctttgctatacttagctgttctgcaggaaattaccttcatgtgatgactgccttcaagtacagtttcaagaaagctattccagaccagaaataccagaaagcctcatggaccagattaaaatgcttgaattacatggtttattaaatcaacttaaaaacacacagcaagaaacaagtggaaagagttaagttaacatacttaagttagaaaagtccaaaagagaagctaaaaaaagaaagattgcattattttcagacaatttaatgcaacagaaaataatcctaggtatgataatagagccctaggataacactgtattgtggtttaagcaaatcactaatattcataataatgaccagaaatggaaatgaaaatatatgattgtattctttaggtttgcaaaaaggcaaaacaggtttataatttattttaggaagaattccattcaatacgctttttaaaaatctaggtgactaaaagtttgactttttcatgagtacagactaggatttatttttcagctctgtcactcactgtgtgacactgcataatctaaatcatatatctgagctgtcatttcttcaactaggaaatggtaagggtaatacatttctgaaatagttatcatgacaattcaataaatttattcatgtatgatgcttaggataatattagttgctattattaatattactaaaaatgtttttcttgagttttcctaaattcattgtgtgtataattttaatggttacaaaatattttgtcatacagttttaatttaaactactaaatcaatctcaatcagatactggcaggagtttttgtttttcagaaatggataacattaatctgaaatttatatgaaaatgtaaaagtttagaaatgggcaaggcaagcctgaggaagaagaagaaaaaaaactagaggacttgtactaaacataaagatctgttaaaaaccatagttaattatactcttatatatatttagtagttaagacagtgtggctcaaatatagattaaaattaccaatggtagagaatagagagttcagaagcagattcatctgatttatgaaaaatatgatatagcggtgcagtgagaaatggatgggaccattggatattcacatggaaaaagcacatatcaacttcttcctcacaaaaataaatttcagaacaattacatatcaatgtgaaagataaacaaataaggcttttagaatcatcaatgctatatatgtgaattgtcaggcctctgagcccaagccaagccatcgcatcccctgtgacttgcacgtatatgcccagatggcctgaagtaactgaagaatcacaaaagaagtgaatatgccctgccccaccttaactgatgacattccaccacaaaagaagtgtaaatggccggtccttgccttaagtgatgacattaccttgtgaaagtcctttccctggctcatcctggctcaaaaagcacccccactgagcaccttgcgactccccactcctgcccaccagagaacaaaccctctttgactgtaattttcctttacctacccaaatcctataaaacggccccacccctatctcccttcgctgactctcttttcggactcagcccacctgcacccaggtgaaataaacagccatgttgctcacacaaagcctgtttggtggtctcttcacacagacgcgcatgaaatttggtgccgtgactcggatcgggggacctcccttgggagatcaatcccccgtcctcctgctctttgctccgtgagaaagatccacctacgacctcaggtcctgagatcgaccagcccaagaaacatctcaccaatttcaaatccggtaagcggcctctttttactctcttctccaacttccctcactatccctcaacctctttctcctttcaatcttgg

SEQ ID NO: 30197 - DNA, 2300 bp, Homo sapien
gctggttctctgatcacctgggggaaaaatattgcagaaagtatagctgcttcatcattcatgaaagcaactgagtctgcaagtgaactgaaaaatttgccctccaagtagttcctgagatgtttgtaaagagagtttgaagatactaaattctatttcctttttgtctttcaacataaaactgattagacgttcatgtttttaaaattgtttcaatatgtaatgccatcgctttcaagaatgtagtaaactctttaaatttgcaaatataaatgaaaattgtaatttttggatcaaacaatatacataattatgatgggattacaaaagttataagcttaaggcaagattgacttgttactgagctaattaatttctgagtctggcttctttcctttttttttttttttttttaactagaacgaagacaggagtgagattcagaggcagggttttatctacagtgggacactcaggactctacctgtggagggataaagtgctaggcatgctaataaaagcaagaaatatataaatcttttaaaaatacattagatgctacataagattttttccgaattttgtctaattagcatggactttttatatgaaaaatatttaaaatagtgacataacagttttaagctgagataaagttaatatgatctctctctggtttgggcttatgtaacccataagccataaggttatggcttttgacctgtgggccattttaaagggacaatgagccttgcttcagctgcctcaagaagcttttactcactgtgaacacaggaaaaggaaggagctgtgaaaatactgccttaatatttcccaggatgtttatttgattagtaacagaaattctaaaaggctatgtgtaccctctctgtattatactatattataagaccaacactaaaggtggatgtgaggaagtcgtaatactgattgaacgagttctttaaaatcagcaatagcaactcattcatcattcatctccaaccatagcacattgtctatttgactcaataaatacatgataactgttttttaattttaatttacccttggcaactcaactgggagctctgaattaagtattgcccatcagtttcccatgtcaggtcaaaatgtccagcaatctatacactttccttgctcttaaaactttccttgaacttaaaactattgaagtttggccttggaataaaatcatcagtctctgaggaaaaaacttatataatcgacttctgtcaatgatcactaatgccacaaatctagatctctcatttggagtctcaaatggcagatgaatttgattagctcctatgactataagctaagctaattattacaagtggatgtggagaaaacagtcctatggtggcctgtgctatctgatcttgaacttttccatttcttcctttactgtttctattctacttcatcgagacaacaactgcatgaagaatgtttaaaatggaaatttcctttaattgatattcaagatctcctttagattagaactttattatctagagagaacatgtagccaatattaatgatgatcttgttccattgatatgtatccacagattaaagacggctgctcttccttcttctgttgaggaagtgcttcctgtcactcattttctccataacctgagataaatcttcactggtttaatgacaataagcatcctcatcttaccgtgacatgtacaggaaaaaaaagaaacctaaaatcttttacataaaagaagtttcataatcacaagctatcacaaaggggaaaatgtatacttaccattgatagttttaccataaatttcctgaccttaatttgattaaaatctcaacttaaagactgcaacaatacagatttctttaaagtttaattgctcatttcactgaacattgagtgcaggaaaaacctcaacctggggcaaaaacgtggtagagcggaaggagaagttaaggactgagctgctttgcagatcacagtgtttgaaagtgaacagccaacctgacaagaagcaaaaaccacagaacagagtaccacatcgtctttctgttcactttttttcacaaaatcatccaggctcttcctactctcctctcttaccacctctctcttcttttttttttttttttagttatttcacagatgccactggggtaggtaaactgacccaactctgcagcactcagaagacgaagcaaagccttctacttgagcagtttttccatcactgatatgtgcaggaaatgaagacattgcctgccatgcttggaac

SEQ ID NO: 30198 - DNA, 2300 bp, Homo sapien
cagtgttcattagttatttagtagagacgtaaaataaataatccaagtccgcaggcagggaataaatttgaaagtcatcagtatttgaagtcattgagtctggatgaaatcgttacagaaataagtgtggttagaggagagacaaggtccagaaactgagcccttggttactgcagcgtttgattttatggttctttttaaagtagaggtgatgaagaggaaccagcatagaagatactgaaacagcactcagtgatgagggaggaaagccaggaaaatattttaaaagccaaggaaagaaagtatgttccaaggagaagggactaaatcatgccacatgttcctgataggtcaattaagatgaaaactgggaatttaccactggattcagcaaagaagaggtcaccgatgactacgcagttacagaagtaggcttgtgtacactgtggagccactgaggactctacagtattattatgtcaagccttaaacatgctggctttctctgggctttcgcctttggaagtatagaattagctcacttatatctatctattcaatatcttcacttaaaaacaaaggcaaaaccccagtttttgaatgatactatgaagtaatacttaaattggtttagggaattttcttgaacttgaacttgattaatcttttgttgtttttttataacagaatatgaagagagtggattgttggaaacagatgaggtttgtaaattgagttttctttagttaatttttaatggatgaacttggggatgcatgttcttactaataatatattgatctttcaaagacattctaatttgttcatattgattatagcatataaaacgtagctttgagttccaagttcatttactcttaagaaaacaaaatatagaatggaaaaaataagttttctagaatgtcacattcataccgatttaatggttgtaaatttttctcttttattattttcaggctaccctagatacaaggaaaatagtagaagcttgtaaagccaaaactgatgctggcggtgaagatgctattttgcaaaccagaacttatgacctttacatcacttatgataaatattaccagactccacgattatggttgtttggctatgatgaggtaaaaatgaaaagcattatattttaatatcaatattttaaattgttgggttttaatttcttcttcattaggtccatgagtatttattgcagtgtttcacattttggaaatcatctgttttacagttttatgattaatgttgaacttgattctttcttattttgaatgaactatgaattattcagtgtaacaataatgctaagacataaacagaaataatctattacatattccttttttgaaggcttatgccttcaaaatgtgagggaaatttaacttggtttattttattaaattttgtttgggattacatcagttggatatataggcatttacagaatgaccatgtcacatgtgaagagagtggattgttgtatgtatgtatttttccccttaagacagaaaactcatctacttaattgaattaaaggataattgacaggaaatcaacttgtttaacctgtcattcttatggctatacatgggaaacaagaaaataaagtcagtctaaaagatgagccacaaagttataaaatgttttgatagccacaaacttgtctttttgtgagattttttttctgcattgggggtagctgtcacagagcttggctgtgactccttcctgtccctcccttgatattaataaattgtaaaatttcccagaaatcattctaaacagtctagaattctaaattgcaagtgatgtgagatggagaactaaatatattataaaccttgagatttaggctgaaagtttctaaatagtaatttcttttttttttttttttttttttttttttttttttttttttttgagatggagtctcgctctgtcgcccaggctggagtgcagtggcgcaatctcagctcattgcaagctctgcctcccgggtttacgccattctcctgcctcagcctcctgagtagctgggaccacaggcgcccaccaccctgcccggctaattttttatattcttagtagagacggtgtttcaccatgttagccaggatggtctcgatctcctgaccatgtgatccgcccacctcagtctcccacagtgctgggattacaggcgtgagccactgcacccggccttaaatagtaatttcaaagcattttttatgctttcagcaacggcagcctttaacagttgagcacatgtatga

SEQ ID NO: 30199 - DNA, 2300 bp, Homo sapien
agatataggtagataggtttttttttgtttgttgttgttgttttttgtttttttgtgttttttttagaggaattgactcatctgattatatgggctggcaagtctgaattctgcagggcacactggcagactagagattcagggagtgttgatattgcagctttagtcctaaagcgttctggaggctgaattccttcttctggaggacctcagtctttttcttacaaggccttcaactaattggatgatatccccctatcttgtagagggtaatctgctttatccagtctacttacttaaatgttcatcacatctcaaaaataccttcagcaatatctagaatggtgtttgaccaaacatctgggtgccacaacctagccaagttgacataaaattaattaccataaccctttagagtattactctcattagagtcatttgagctttctttttctttgtcaactgtatcctacttctagaagtgttttaatggcgtactacttattatattttgacaaattaaagaggttgatttgctttgtttttatgttccgcagtcaattcgtatgttaaaatttgggttttactgttatgaaatagtcatacctattatatagtaatttctagaaaaactgaagtaaaagctttgtgctagacctgtggattttgacctattttatttgtgaaagtgagctatttattttgtttaggcatgttgaacagacatctcaaaattttagaagattaacaaaggagctaagcatattctgtacttaggttttttctttagtaactttagatgctattgttttactatatttcttattcttgttaaactattttgttaacattgacaggtactttgaagtagaaatgttatctagctgactggtggtgctgccaccttcttaaggctttctttgagacaagtaggttttgaggtatttgccccgtagagtgcaagagaattgaaccaaaagttagcttgtatggattttaatcccaatttcatcatttgactgggtataacactcaagcaagtcatctctccagtgacttcatttcttcataggaagacattattactgtaacgtcctcataagatagtcattgtgaggattaaataagatgtggaaatagtagaaagccacatataaatgtgatatgatattactacctttgggtatcctacatttctgaagcaaataacaaacagattgagtatccctaatccaaaaatccaaatgaaatgttccaaaagccaaaactttttgagcactgatatgatgctcaaataaaatgctcattagagcattttgaatttttgtattagggatacttgaccagtaagtatttatgcaaatattccaaaatctaaaaaaatcagaaatacttctggtcccaagcacttcagataagggataatcagcctatattaagataactaatagctttttgagaaaattttgatgcaagtttaattaaaatgtacatacgagtcctgtagtttttttaaactcttgtctttccttttttttttttccctgagacggagtttcgctcttgtcgcccaggctggagtgcaatggtgcgatttcggctcattgcaacctccaccttccgggtccaagcgattctcctgtctcagcctcccaagtagcggggactacaggcacacgccaccacgctgagctaacttttgtatttttagtagaaacggtttcaccatgttggctaggctggtcttgaacttccgacctcagatgatccacccgccccagcttcccaaagcattgggattacaggcgtgatccaccgcacctggccaaactgttctgtttctcagaaagtgttgtgatagagattcaaacaaggaaagtaattcatggtaaaatattaatgagtttttcaaaatttgaggaggtgccattgtgactattctcattagagttcatttgtaaagatactactattatttgcctccttatttcagagaaattgtgagaattttcagcatttttatattgctttaataagtaaatagggtgtttacagtttaattttagttattcttttctgccgaattttacataggtattacaggaataacggaagccgttaaagagatcacactggaaaataaggtactggttaattagttatatttttaaatttaatgagtagttatttgcctatctatctatctatacacacacatatataatcaccatatctttcttataaaaaccctggttttttattatcaagctcttttaaattccagctgttttcttccccat

SEQ ID NO: 30200 - DNA, 2300 bp, Homo sapien
caggaaactgtaaggattctctctgtaaacaacagtttgcacaggagtatcaaggagacggtcattcattctttcctttttactaaagacatataccatacatactgacatgccaacagttccttttcagtttggtgagcaagtatgatggactcctgaaaacataattctacatcatacattttatatttcatttgggcagtctcttgctcctctctcccggaaactaaaaagttgtacaatggtgtattattaaaatactgtatacctaggtagatatgatattctgaaaagttaacataattatgtaaaagcatttgattcaaatgtgaaaattattttccaatcttagtttgactgaataatcttaaaatgactttcacagtaaacaaatgtaagcaaagcaacagttgaaattctcatttataatcgctggtttatttcttacttggccaataagttattcttttaaaaggagctttacaaaaacgtattttaaaaagtatagacctagtacttccctttgtcatggaaagggagcaaagcaaaactctccactattcttagcatattaaggtatttcacccccacactgagattggtacattctaactgaaagcttaaaaacaactagaaaaaaaaaacaaaaactaagcaagaacttcccattaatttactattcttgctcacttttcagaaagcaaaaatgaagttacaacaaaacactccaaaagagttataaaagaaaagcttgaaggcagttgtagaaatttacctttaaaaaaaaaatcagtcactactgtaacagctaatgtgtcacaattttttactttaaaaatgctgtactgttgccaatatatttttaaaaattatacagccaggaaggtcaaaccgtgccttgttatcactaataaccagctacggctatctgaaaagcttgggaaaaaggttttgctcgttagatgggttcaaggttactgaatgagataatgttgccaatttcacctccttcctctgaaatctaaacgagttgggatcgcagtcacaacttccccactacagcggactttcatgaaacttaaaggaaaagtgacctcacctcaggtctcttttgacctctgtgtgtcaaacactaaattcattttttaaagagaagcaaaatccttgcttaaaaaggctaaaagacttccagtgtttggatttaacgttcttcaatctactcagcctccgaacacccttccaacccgacgtacccgaccgcgcagagttatgacgggagaaggcaggaacacgcagagcgtcgctccaagtttacccctgaggagtcagaaagccctaacgaacagccggttaagactacgggtgggggctgcacacttccctgtgtctcgagccctactgccttcctacaccttgccccgccggagaaagcggggactcctgcggcgcctggtccctgaaaagtcgagcatgtgcctgacagctcccggcaaccctggcctggcttaccttgaggaccggggtcaggtactcagccacttccagtgcctttcccttcacagtattaatcacattctgcatcctggggccggagtagcggccggccccgcgacgggatggaaagtgcagccgtgtcaggggccagggagtcagaaaatgtcctcgctgccaccgactcgcatcagcacccggctggcagcacccgaggggacgggacgcgacgcgacgggacgggcgggacgagggggcggggcggcaggcacagcgcgcgaagacggggtgcgcgatcctcgcaccccaggcagcccgcgacggaccggacccagctgtcacccagccgcgagggagggcagcggggccgaagggagacctgaggtgagaagcggacgcacacgcacccctcgccctctgcgagctgtctgtcctcgctttgcttcactcgcgccccttccggcttcccttccttctcactctcttgccgtagctgcgccgccaccggggcctcacgtgacactagactctcccggcacgtgacgtgagaaaggggccgggctggggcgggataagccgcttctcccctccttccggaagcgtaacactgaacgtgcctgcgcaatgggtgtcgggtccgctttttcccaatccggacgtaatcgtggtttttgttctgcaataggcggcttagagggaggggctttttcgcctatacctactgtagcttctccacgtatggaccctaaaggctactgctgctactacggggctagacagttactgtctcagctctaggatgtgcgttc

SEQ ID NO: 30201 - DNA, 2300 bp, Homo sapien
tacataaaaaaagatttcttaaatacatacttatcaaagcttataatttatactgttgatacaatatgaccgcacaatataatgctgacaccttaccattgatacaataattacaatagtaagtacctcacaaatgccaagtgaccaaacaaatatatccttctacttcaaaataaggcgcaattacacattttgctataggtccagaaacacctgttgattgaattaacagtcaaatgttacgactggttcttcaccaaagggtttgatttttgtatctgattgactcacatttcatccattatcaaacattttttcttgttgaggaatgcaaggttaaataatcaaatttaaatatgctttatcactcacatgaagcaaaaggcattattatttccatgttatatataacagaaccaaaggcaagagagagatgtgtgattagatggaagtgctccatgcatataccaagtcttaacttaccttcattggcagaatacttcactagtaagatgcgacttgagcttaaagcaatgaatatggcacctagcaggaatgtatacattgttgacaaggagcatattacaggatgactacagcactgtttttccattccactgttttttaattaccttaaagagaaaaacactttcatgaacgaccttgttggcagaccctaaacgcaaataccattgatcgtgaggacaaaaaaggaatttttaaaaaattttggctatgactatatcagcaccaagaaagttgaggcataaagaaactatgacaaaaggaaagtgaaaatctgataagagggagtactctggagacagaaaacgtagaaccagattagacctgctgacaaaggtagcaggtgagcaaatgacactttgcaacagcagaaaagaattcttcaaagcaattttgaattttatttttaaattttatttatttatgtattttgagacggagtctcgctctgtcacccaggctggagtgcaacggcgcggtcttggctcactgcaacccctacctaccggactcaagcgattctcctgcgtcagcctccagaatagctgggactacaagcgcccgccaccacgcccggctaatttttgtatttttagtagagacggggtttcactatgttggccaggctggtctcgaactcctgactgtgatccgcccgcctctgcctcccaaagtgctgggattacaggcgtgagccaccgcgcccggcctcgcttttactcttattagtaaataattttgctgtaagataaggctttcagaattgtattttcctcctcttttccctcggaggaaaaagcttattaggacagacttcattacaataacgaccaaaatggaaatatctgaaacactgctgtaaagttttactgaactagttagtgtttgaaatggaggagatcgtagaaatcaatgaatctaaggccctcttttgataggctgaggacactaaaccccaggttgggtaagtaacttgcccaaagcctcccagcgtactgtaggaatagcgcatagagcctgcggggagtggggagaaatgccaatactgacagccccattgggcgcacgcctacaggacgcctccccgacaggagggggccagatttcccttcacagtcagggactacccttctagtcacacatgcgcagtagggctcttcactggcgcaccctcccctcagacgcaggcgcaattccttgcccgcggggcgcggttacctccctcagaagagcttctagtggaagaacgcacatcctagagctgagacagtaactgtctagccccgtagtagcagcagtagcctttagggtccatacgtggagaagctacagtaggtataggcgaaaaagcccctccctctaagccgcctattgcagaacaaaaaccacgattacgtccggattgggaaaaagcggacccgacacccattgcgcaggcacgttcagtgttacgcttccggaaggaggggagaagcggcttatcccgccccagcccggcccctttctcacgtcacgtgccgggagagtctagtgtcacgtgaggccccggtggcggcgcagctacggcaagagagtgagaaggaagggaagccggaaggggcgcgagtgaagcaaagcgaggacagacagctcgcagagggcgaggggtgcgtgtgcgtccgcttctcacctcaggtctcccttcggccccgctgccctccctcgcggctgggtgacagctgggtccggtccgtcgcgggctgcctggggtgcgaggatcgcgcaccccgtcttcg

SEQ ID NO: 30202 - DNA, 2300 bp, Homo sapien
aaactgaagaacaaattgggcctagcagactcagttgtcatttcagattgtcagctgactttacagggtaatttattaagctttattttctttcctaaaaatctaccatttttaatttttagcttaatccttaataaattttacgttccttagagcattaccttgaatgagtaattgtttacagaaggtgttgtttagcttaaggatttctttcttttttcttaatattagtgaaaaatgtatagctctagaaaacttttaaaggaactatagattatatcattgcctcacttatatgcgatttgcaataattaattatggaattttttttgtaaaatggacacccattttttatctctgtggtcattctatttgttttctgctacttaatgtgtatcagctgcaccttcagaaatttaagtggttagttcacagtttctcacctgatggcataaggctgcgctaacgccatcagtaagttctagatcaggctatttgaaaattacatacatatgagaaagcatataatagtgtgcacaggtatgctgctatctaggctagtctgtgcatttagcagtttcagagcatgaagctttatatgcacacaacttcctatatgtgcatcctggaaacttagaattatacttaggaggtgtgatgatgcagaaggaagacatacaaaaccatggatccgatcccttctttagtgtttaagtacatgaccttagggaaatctgttaggttaactgtttcctcccttagagcggaaatgcctaagtgtatggtaggtgctcaataaatgctccaatgatataaaaattctcacttctggttcccacctattgctttacacttctgcattttttatgttcctctttttttctcggtgttccccttctttgcctaactaactgatcttcaaacatcaagattttgttcccccaagaggcctcctgacaacgccaatgaaagtgagatattcctctttgtcaacattgtacattcttgttgcctttgcatagagactcttccctctgcctggatatatcaccacctcctttttcacatgataaacttcaattaatttttcatcttctagctcaagtgtcatttcctctttgaagcaatacctgactatttacagattgtagtgttcctcagtttactccacttgtcccattaatcacttttcacacatactgaaatcatttagtttcattgttttctcactgttaaagcataaattccttgaacatggagataagtcatctttatcgccccaggttgcctggcacgtagtagctgcttattaaacatctgttgaatagaatgaatcagcaaaatggaataataatagtacatgtcctttatttctcacaagtttgttgctaaggaaaataaacaaaggattgttaggactttgtaaactgaaatactgcccaaaataacatttttctttggcttgtcagccagcagtttgctgtttaatgctctacgattaggacatggatctagagctaaccttctcctttaaatcttttttgggttatggacacctttaaagatttgacaaagctttgcaggatctcctgcatagggggaaattcatctgtacacaacatttctgaagctcatctacattctttctggttctgggaaaccaggttgagaatctctgctgtaactttatagtacaataaaagttactgtgccagaggtccaggatacctctagaggtagaaaggaggccatgttaaacttgtaggttaaaaggaaacctacacagaagggaaatgacttgagcagccttaggggataggtgttataaaaatgaattaaaacattaaatttgagagacaggcaccaacagtttttctctgaacttgagtggtaggaaatgctagcaaaaactgggtccagtttattcaaccaaatactcaagtgtctgagttttcagtagaaactattgatatggggggaaaacagtagtaaaatcttttttttcatctttgaacaggaggcgtctaaactggatccagtgggcttccctcctgactttatttttgtctattgtggccttgactgccgggactaaaactttacagcacaacttggcaggacgtggatttcatcacgatgcctttttcagcccttccaattcctgccttcttttcagaagtgagtgtcccagaaaagacaattgtacagcaaaggaatggacttttcctgaagctaaatggaacaccacagccagagttttcagtcacatccgtcttggcatgggccatgttcttattata

SEQ ID NO: 30203 - DNA, 2300 bp, Homo sapien
cccatccctctccaatcaggactgcattcagtgtgcacataggtaaacaaaccaaaatagacctcacccaaaatagctccttccaagacaccctacagctctgtgtgaggccaggaaggctagtctggtttggatgctggctagggggccagcgctggtctggcatgcctcctaaggaagcaggagaagtacctgagactgttgtgtttgtgatccgacagcagttactgttccctttcctaagaaaccttggacagtctcagaggctcctttcttgtcctttgtgccagacacattcagctccctgtcctcagtagagattttagtttttctttccctttttaaaaaaaaaaaaaaaaaaaaagcagaggaagtgaatgtaatgtcacagcaagcaatacttggcgagccttgcggcaggcatccattcagaggttgtatttcatcaaactatcattttctcttattcacccaaaccactattccctcaagaggccattttctttggggttgaaaactctcatgttcactcctgatgctagaaggggcacagggatcaaagccatgaataaaattaactggctgtcagctctgtgagtgcaccaacaccctgcggtcacctgcactgaaggcaaaaagcaaaacaccagtgaagatggaagttgagacaacgctatacagttgccccttagatgcataccttctctctttttataccctcttgcagaccctgatagcaccagccaaaatatcagtgtctgagggtagtaggtcggggaaaccgctggacctggagtcagagaagtgtctgtattttggtaatgcctcttagatttactagttgggcaagttattcacttctctaagccttgttttgttatctgcataatggggaaaataatccgcagcctcactgagctctaatgaagaaccatattgcgttggtgaaagtgagctataaaatgatacacaaacctaaggactaagaataggttatttgatggtgccgtgatggataatgtcaacgtctgttaatggataaagttctacacccagaagcctgcagattaagacataatcctctatatccatgttatcatgtggataacttgcattgatagatttgagagtctaatttttgtaacattcctgtgaacaacatactgctgtttttgattttagaaataaggaaggctgggcgcagtggctcacgcctgtaatcccagcactttgggaggccgaggagggcagatcaccaggtcaggagatcgagaccatcctggctaacacagtgaaaccccgtctctactaaatataccaaaaattagccgggtgtggtggcacgcgcctgtagtcccagctactcgggaggatgaggcaggagaatcgcttgaacctgggaggtggaggttgcagtgagccgagttcatgccactgtactccagcctggtgacagagtgagactctgtctcaaaaaaaaaaaaaaaaagaaagaaagaaaagaaaagaaataaggaaaaactgagactttggtgaattgagtgacatgctcaacgacacccaaaaagacaaaagctttttctgctactctactgtgttggaactgtaaaaacagaaactaagtttactatatattctaaaatcttatggttctaggcttaatatcattccactttatagaagtactttgtaagcattggcgcttattaataatagggtacattttagaaattgcatttgcctctggaagaaccactggctactgaggaaggtacatagggtttcgtttttccaggaatcctctttgaacctttaaaccactctcccattttcctttttcctgtcactgtaatctacttaaaatacagttatctttttctactctatctcctttccgtatattcatttcttaaccccctctaaactctagcagtaactccactaagacgagttctcttcagttgtcctctgagtttctcatttccattgctacagtttaatgtacaattttggcctgtcttcattgcatctgagagtttgtctctccccaagtgacctcattaggcattgtgaccacagactcatgcttgacacgtcatgcaaatgccaaagcagaaagactgtgaagttacaacagaaaaactacaggagtgtagcaatgcagtttaatggctttgagaagcatgggacagttctctgtttttttctttttttttttctgggcacagaaaaaaattgctagcctaagtcactctggtttcctacattggtttttattgtttgaagcagtaagcagtaat

SEQ ID NO: 30204 - DNA, 2300 bp, Homo sapien
ctgcttaatgtaactgtctctgttaaacactaacaaattataggggattgaaagtaacaggatctcatcccattttccatctcctgacctccctccttctctctaaccaaccttttcccctccccttggctgagatacagaaaaagaaaatgaccagctctgtttccagataaataattttctttcttttttccccctcccctttgttttatgacctccgtgcatcgcaaagtggattacacaatgacatggagaatgggaccccgtttcactatgctgttggccatgtggctagtgtgtggatcagaaccccacccccatgccactattagaggcagccacggaggacggaaagtgcctttggtttctccggacagcagtaggccagctcggtttctgaggcacactgggaggtctcgcggaattgagagatccactctggaggaaccaaaccttcagcctctccagagaaggaggagtgtgcccgtgttgagactagctcgcccaacagagccgccagcccgctcggacatcaatggggccgccgtgagacctgagcaaagaccagcagccaggggctctccgcgtgagatgatcagagatgaggggtcctcagctcggtcaagaatgttgcgtttcccttcggggtccagctctcccaacatccttgccagctttgcagggaagaacagagtatgggtcatctcagcccctcatgcctcggaaggctactaccgcctcatgatgagcctgctgaaggacgatgtgtactgtgagctggcggagaggcacatccaacagattgtgctcttccaccaggcaggtgaggaaggaggcaaggtgagaaggatcaccagcgagggccagatcctggagcagcccctggaccctagcctcatccctaagctgatgagcttcctgaagctggagaagggcaagtttggcatggtgctgctgaagaagacgctgcaggtggaggagcgctatccatatcccgttaggctggaagccatgtacgaggtcatcgaccaaggccccatccgtaggatcgagaagatcaggcagaagggctttgtccagaaatgtaaggcctctggtgtagagggccaggtggtggcggaggggaatgacggtggagggggagcaggaaggccaagcctgggcagcgagaagaagaaagaggacccaaggagagcacaagtcccaccaaccagagagagtcgggtgaaggtcctgagaaaactggccgccactgcaccagctttgccccaacctccctcaacccccagagccaccacccttcctcctgccccagccacaacagtgactcggtccacgtcccgggcggtaacagttgctgcaagacctatgaccaccactgcctttcccaccacgcagaggccctggaccccctcaccctcccacaggccccctacaaccactgaggtgatcactgccaggagaccctcagtttcagagaatctttaccctccatcccggaaggatcagcacagggagaggccacagacaaccaggaggcccagcaaggccaccagcttggagagcttcacaaatgcccctcccaccaccatctcagaacccagcacaagggctgctggcccaggccgtttccgggacaaccgcatggacaggcgggaacatggccaccgagacccaaatgtggtgccaggtcctcccaagccagcaaaggagaaacctcccaaaaagaaggcccaggacaaaattcttagtaatgagtatgaggagaagtatgacctcagccggcctactgcctctcagctggaggacgagctgcaggtggggaatgttccccttaaaaaagcaaaggagtctaaaaagcatgaaaagcttgagaaaccagagaaggagaagaaaaaaaagatgaagaatgagaacgcagacaagttacttaagagtgaaaagcaaatgaagaagtctgagaaaaagagcaagcaagagaaagagaagagcaagaagaaaaaaggaggtaaaacagaacaggatggctatcagaaacccaccaacaaacacttcacgcagagtcccaagaagtcagtggccgacctgctggggtcctttgaaggcaaacgaagactccttgtaagtagccttctccttggcattcttctatgggctgaggcagggcatgttaacgtctgtcttgttagttttgtaaaaatcatattgctagatgccagactgtgactgaacctgtactgtgtcaagaagctcagaagtctggcaaaagagggcagcaggccagtagctccttctggttt

SEQ ID NO: 30205 - DNA, 2300 bp, Homo sapien
catgagaagccccactttgccagtgtgtgtgtatgtatctgtgtgtgagaagagactgggggaaggagttgggtgtggggtggggactaacggcggcggtggagtgttaggtcctctctggtgtgtgtgtttagtgcgccatctggtgactgaagctcacagagggaagaaagcctgaggtcctaggaagacaggcacaacccagggttggggtggctcctcatggtcaattcggggttgctaaagtggctgtatttcagctttaccagcgcacaggtgacaaatgttgtgcacatcatggagaggtttgtgtaagtcatgacttattcaagaaaaataataaagggctttaaggacctattgagaaaagcaaaaagtacagttacacaattatcccagacagtaggactctaaaagtgtaagtactctggttgaacaaataaatgaaactcttctacgaatgtgggaaatgcaaaaaggaattgaaggaagggaaaaaactgaaggtatgagtagaaaattaaagagagaggcaggatagcatcacgctttgtaggctgttctaaacctgggttcaaatttcagagctactgcttaccttttgtgggacaataggcaatttatttaaactcaccaagcctcagtttgctcatctataaaatgaggatcattctgtttactttctaaggatactgtgagggttaaataaaagaattcacaaaaatactaagcccaaagcttcacatgtaaatgctcaataaatggtagttgttataagcagagagaagagaagaggaaatgaaaagccagaagggagaaagctcagtaaggatagtgtaggacgccttagaaaattatgagaaaggaagtaacatctaggaccctccaacttagcacaaggctaggttgatcaacccaacaggtgaataccacgaaggctgcaatctatgactccagtggacagagggtctctgcctgaagcccacttttgttattatccttacaagtgtctgagagaatgccacagcagggctggccatccttcttggtacccctgggacttcaaggtgtggccgggcaactctatagttaacctctatacaggactttctcagttccatgctcgtagcttatgtgaaaaaagtcaaatgtgaccagggcaagatggggctgatcaaggcataacaactagggatgaagtttgatccagtgagggacgctattagcatgactgagctggcaaggaggtttctgagaaccctggcttgtcactgttggtggcagttaatagtgacatggagagtcagctcgcccagcatggccggaagaaatatccacgtaacctgagaccccttccttctccattgaatccttatggcagactcaggaggtggaatcccaaagctgcctcactctctctttcagaacctgataagtctacttctatggattgcctaaagcccttcagacatctaaagtctctgcagaggaaaatattgcactacacacacacacacaaacacacacactcgggacctccaagggagcccttagtctaccatctgcagccagagctttgaagctagagatcataatgcctgttccctgatgtaacagtcaactgcaatctcgacttgcagccattgcctgcatttctaaccttttaccagcttccttccatgccgaggagaaactaggaccaagaacacagtaatatgatccccaattagcataaaataaaaacaacctagtcatgttttccatgggcttttccaacctcaaactaaaagcacaaagcagggagaaagatataagaatatacacatgggactataaatacatatatactgtctgtgtcagcacagccaagcaccctgacccaaatgagtatctgtctctaagaaaagaatgtagcctgatgcagaaatctgagaattttctccttccaaagtacagtgtaagaacagactggaagagaagttaccccgatgacttggtttggaaggggttaaggcaccagtcatcctcttctaaagtgatttatgatgatgtgtggagtttaaaaactttaccccaccccaaagaacagccttctcactcctcactgagtccactctgaacgtgctaaaatgggaaggaggcggtgttttgctgatctgttaaattcttagtgaagtttccttgatttccagtggctgctgttgtttgagtttggtttggagcaaaactgaggtagtcctaacatttctgggactgaatccaggcaagagaaagaagaaaaagaagaagaaaaagaggag

SEQ ID NO: 30206 - DNA, 2300 bp, Homo sapien
tgtgtttagcactctttaaaatttattgtaaataaaattatttccatcaaaactctatgatcagccttagatatatcgttccatatacttcttgtgaaattcccattttacaaagaaatgtatatatggactttcacaataattctttaaatgcaagagagaacaaacattttgtcatgttgtaatcattcttctggttaaaaaaaaaagcatatatttggattggttaagaaaaaaaaagaggatatagaaaatggcttatacaactgcagctgtaagccagatttaaaagtccaaaatagctactatatgtacatttgtggagaactgtatttgtgtgtttgtttcatgatagcatgatatacaggctacctttactgctagttttggagaatttaaagctattcttaaaacagagctttaaatttttatcttgggaacaatcattgaacaaactggctaaaatgtagattcctgggtgccactcaagccttactgaatcacaatcgttagcctggggctcaggaatctgcattttaagtgataatccctggagatcctactgtggatggttcttgagtcagactctgacaaacacataggctctcttgactagaactcaagtggaaatcttacattaaaatttgtcaaagttttaagagggaactctggagggacaaattttaaaatggtgctgtctatgttgaggtcaattaggaggaaattagaaacctgagtaggatcccatgtgaagctgggtcaacttttggtaaacatctcagatattaggacaaggtctgtaaacccaggccccagctagctatggaacaattatgtggtacttcgaaagtcagacaaatttgatccactggtatattatttgcttgtgtccctgttgttctctcttggcatgtaacaaagccgtcttggaagttacagcttgattgtatctatagcagactttaaaaggtaatttacactcctctgggtccaaatatggtggtggctacagtgtctaacttcggagaaccccatgtagaagtgtgagatttggagggataaaattggagctgtttaataagctccctacttctacactggattttcatttctggatagtcattgaaagttctgggttttattttaatagaaaagtaattttccctaccagcttcctgggtgtttgtaatgaacattttaagccagttttcagctacaagtagtagaaaactgcaagaaaattaatttaagcaaggaaatgaataaatccgtaggtagggtgggctgcaaaaatggctgagttcgtgactcaacaaagtcttcagacattgtgatattttccatttctctctgtctcacagcttttgaacatcttaaggttgcctcctcaattttaggggattataatatgttataaggttattggagttatatgggattataagatagctgccattaggaatcaaggagatatgctttttttttttatgtccagcaggatagagcaatcgcatctcttccaatcttgaaataaaagtcatttccttttatctaactgggccagtgccccaggtagttcacactccccagccctggaccagtagctgaaacaagagggaataccatgagataattggcttaagcctggatcctggaccaatcactgacaatggggatgggataaccatgcttggatcgataagaagccacccccaaactgggaatagggtcagcttcccctaagtaacaaggactacaaagaaaaggggtagtggacacctaaaaatatttgggatctgtttggaaaagatggaaaagggaatagatactagagaagcaatcagtggttgactatacttaacgttacagagctttccatttaaaggtctctatcccagcctacatgtaaacttctgccacccaatctttccacatacagttggagagcctcttccctatgacccgtggaagattccagggagcccctcaggcttaaggtgttttggaatgtagtggcaaggtggctcatagagtgccaccacaaagagcataacattctatggcaagaatggttgctgtgcccatcaggcagtcaatttagtgaagtcatgatacagatggagaaatagtccccctgaggtcttgcgcacagattttaagatgattctcacttacaagaacactgagtggtaagttgagaaaactatgattctcatgttcaagactattttccaattgttcaccctatatttcctgttcaatgcccctttacccactttctctgccccaacctgttttcc

SEQ ID NO: 30207 - DNA, 2300 bp, Homo sapien
ctgagtcttatttatttattttttttgtaggtacatagtagctgtatatatttatgagatacatgagatgttttgatagaattcttgcaatgtgacataatgagtcttattttcctaatgtacaaaatggggcatcatagtatcttctctctctactttctaggattgttgaaggctaacaaatttcatctttgtgtatccccaaccttcacattctgcatgctttctgtctctaaaagtaattaccattgttaagcatgtatttgtgttttctcaaattactaacttctgatggaatagatagtcttttaaaaattcagtggaagaattctagctgggctttggaattctagtcttctctaagagagcactttatatgtaaaggcaaacagcaactccacaacagtacactagtaacagtaatgattaggataattatttctctggagaaacaccactgtcttctgtgactttatgcttgcaagttcaatcagatgaaacaattccataatagtttaaatcccagaactacctttactcagaatctgagtaacagtttctgaatactctagaaatcaaatgttatagccacttggctgcattgttgggtaaatcaaaagataaggcctgtaatagcctgagttcttgaagggttcacactcagtgagttgcgtggtattctagcacatggggtatgcatggaaatttacataatgtggcttggaggaaaataattcttgttagattttagtttggctgaatgggaaatagccaactttattgtcttatctccctttaaaaaacaaacaaaaaaaatttctttaatgtttatgttatacatgaatacaatctcactaaaaaaataagttctatggataaagtttatgtctccttaatcactactccccttcttaaaggtgactactattaccagttcactgtgcatccttccagaactcttttctctgaatttcttagcacatatgtgtgctatagagctatatagtttcacaagtgtgtatttgtacataaataatacaaattattctatgactagctttttactctacagtgtgtattaagggggaattccatgccagtttgcagatagccacctcattctttgtaactgttgtataccactctgtagcatgaatgtgctacttttttttttttttttttttaagacaaggtctccctctgtcacccaggctggagtgcagtggcgcgacctaggctcactgcaacctccgcctcctgagttcaagcagttcttctgctttagcctccccagtagctaggattatagacaccatgccaccacagcctggctaatttttgtatttttagtagagatgggtttcatcatgttggtcaggctggaatgtgctaccttttgtttaaccaccttcctactgagttacaagtgagtcatttcaaatattttgctcttatagatactgttgcaatgaatatatttgttcataccttcttaggtacatgtgtagatatgaaaaaagtaattactgatcttaggatatacacattaaaagctataaccctaacaaattacctttccacatgcctgtcccagtttattccctcatcagcagtgcatcatggaacccatttccctgtactttcaccaagatttgatagcaaatatttcatttttgcttaatgagaacaaaatgttatcttattgtggcttttatttgtatttattagattagtagaaatatatattaccttttcatgagtgtattgcttatgtgtatttttcttcaataaactacctgtcaatatatacataagtcttctctagactttattctttgaatctatttgcattttcctgcatagatgccacatttgcttaattactctagctttttaatatgctttaatatcttgggaaggggacttttttccatctgtatagaccattttacttgcaaattacttacacaaggaaatatctaatctcacattacacttgtcaccaaatgatagacactaatctccatttcttagaaatgaggaaataaaaccacaaaatgtacaaagtcagatctaaaacccctacctttgggtccagacttttcttctaaagttctgcagttatacccagatgccacagaaacataggatcttagaggagaagtaacttaggtaagattatctaatctaaactcctccttttacagatgagtaaattaaggtgtgggaaagctaagtacctaaaacctagcattagaacacagatcttctggtttttggtcagttaggtttctataatg

SEQ ID NO: 30208 - DNA, 2300 bp, Homo sapien
atctggtagagtgtattactctttgagccattctaataattaatgagattattgctttccccaggaagcaactgcctcatatgggttcaccacttaaccccctggagagaggacctcccattgcccattacctcctctgacactttccattccagtttgccaccacaacatcctgccctgcacccatgacccacagctgctacctcttcctctaggttacaaacgtcattaatctttacatataccttacttaactaacttcatactctccaaaaatataattgttggacctgccaccttgaaccctggaatgtaccaagagattaccgtcacgcacacaaaaatatagctcatgttttaacatactttaagtcaatcaggatattgttagagatcttggaaatcccggatctgttttcttggctaaggccatacaatgtgaaacttggttatgaaccagcctacaaggactctttatactcctacttgttttcctcctttttaaggagaaaataataaaatttttgtgtgtgtgtgctatttagggcaatgtatgcactacttactaaaactctgctctacaacttaggccacccaaataattcaagtaatcaagcttaacactaatgtggagatcaagaagtcaattttaatatagttttcatgtaaaaaaaaaatgccttctagtcccagttttgagcccctaacagttagctccccttcttgaatatctgatttaagtccccccagcctcttcccttatctggttctcacactgtatgtcactatatacctgccctaattgcccagggctaagtaccagacaactacaaacagccccatggacagctatgtcctagagcttgtgaagttattcaaattagctaaggcacagggttctcaggaaacctaattctactccaattaccatatataaggtactctctacagctccagtgtgttgttaccctgtccctgtgtgcaaccactgtgtggccctacatggaattcttctcttgtttggagctataagtaacaaagaggtttgcctttcacctatccaagagtcttcatgttgtgtcctgtcatcaaaagaatctttaatcttataaaacagaagggtagaatctttgcttcggtcttagtttccagtggtttcctggcaacctttggttttccttggcttgtagaagaaacatcactcagatctctgccttttatcttcacatggtgttcctgtgtatgcgcccagttttcctctttttataaggacaccataaaaagctaagaagtgcaaaagaagaaaaaaagaataaaccaaagacgccagtcatattggattagggaccaatctatttcagcatggccacatcttaactaattatatctccaatgaccctatttccaaataaggtcatcttctgaggtactggggattagaatttcaacaaataaatgttgggcgggggttgcactattcaaccatgactgaaagtagttattaaagacacacatatgactatcttataacccaacaatttaattcctaggtgtatatccaagaaaatgaatgtacacatagaccaaaaattatgtacaaaacaagaatgttcttagaagctttatgttagccccaaactgggataatgtaaatctacagagaaattgatgaataaattgtgatatagttattgaaaatttactatacagcattaaaaattgaaatttgcaaagaatttcatgcatgtgaagttcaaaaactgtcagaatgaattaaagctattagaagtctgagtagtgtttactcaacttctctggaggagatgatatcagcagagaaggaacaaaggacactttggaacaaaggacactttgaataataattatcaacatcttggttttggaagtaattagataagcgcatatataggtagaaattcatcaaaccatacactcaagatttgttcattttaccatatgtaatttatactctcaaaatgctactttttaaatgagttgttatatagtttatcttgctacttcaatgttgtgggagaagcaatgagtagtaagcattggcttttttgctttattacacagcaaaactcactgacatttcccatcagtggttaatcagtcaaaaacatatagaatgacagcaaaaattaaagataagcaagataatgaagaaatatgttttgcaatcctgttgaagacagaataagcaaaagtgaccaagagaaacagattcaccaagtctgttgattgatttaaagtggatttatgtttaagtagaaaac

SEQ ID NO: 30209 - DNA, 2300 bp, Homo sapien
tggtttttgatacccatcacttgattcttaaactgctgattgcagattgtggtctgacctcaggtgagtgcattggagtgtgtctatgaaagttgttgcctgaaatttcaaagtagaggagttgagtgaaaagaacacagggctacgaaatataacacattttattcccagccgtgccaataagttgttttgaggccacaggccatttagcccttctgtggtttagttttggctatgtcattgagcagatattaaaataaatgatctccaagaatttttgatgacatgagaaaaagctaatgtcaatataatataaacagatacagacttgagtaagaaactttcccagtatcactggactagtaattgcacaacagagacttaaccctatgtctatctgtatcctaagcgagtgtgaattttaactttaacttctctctgctcactgcaacctctgcctcctgggttcaagcgattctcatgcctcagcctcccaagtagctgggactacagatgagtgccatcacacctggctaatttttttttttttttttaagtagagatggagtttggagttttgtcatgttgcccaggctggtctcgaactcctgagctcaggcaatctgcccgcctcggcctcccagtgtcctaagattacagacatgagccactactcccggccaactttcacttctatgtagtggaaaaccagaatattatctgtattttaaatgatgtattctcactaattttccgacacctggtgaaacattagacagaagagaagacatttttgttttggtcttcccattgtcacagctcatacccttaagtgttccatgccctcaaggatctggtttcactgtcttcatcaaattaattaactggaaaaaaaagcttgagaaggggaaggggggaaatatttataatgtttggcaagaaggaagatgaaactgctaactgagaaaaaaaatgcatgctgtttaatctttttcctgtttgcaatgttttcttccccttcctgtacagttttgccttggggcagaaaattctcagcacatagaagatttttccctctctcagacataacttaaaagcatagtaacatagtaactagcaacagtaaggaagaggtttttttgttgttgttgttgttttttttttttggttagggggagtctgaattccagatgtgtggcaactaagagatgggtgattatttgtaatttggttaaaatgatcagtctaattttccaaaggtgaaactgaatggcaataagtactgagttctgataaacagaatgccctcacccccaacaaggtagatacctatgtccgaattaccgaaacctgtgaatgttaccttgtgtggcaaaaaggactttgcagatgtgattaaattaagatcttgaaattagatcatgttggattatttgggtggaccaaaaataatcacaaggtctttataaaagggaggcataagggtcacagtcagagaagatgtgacagtggaccagaggtccgaatgatgtagctgcaagccaagaaatgcaggcattctcaaatcgctggaaaaggcagggagcaaattctgcccgagcctccagatggagtgcagcccttccaacaccttgattttagtcccctaagatccatttcagacttctgatcaccagaactgtaagataataaatgttgtgttgtgttaagccactgagtttgtggtaatttcttacagtagcaataggaaactaatacacatatgatgtttacagggttgtgtgttgactcccattatagacaggaatttcacacaataattttcaagaaaacatattgtattccagactcaaatactaaggccgtaaagctcttcaacctggagaaagcctctaaaagtcatcataattgggaaatttacaaggatgggccaaagtagatcaatattctgttttactttttggtgcaagtttagacaaatctgtttatcttggacacgttcaatgccttactgtaaagtttgtctgtgtacagcagaagtgagaggagaaccaatgagctgagagataattcaatcaatctgcttcctccgtctttgcttcagggcttcatacaggaaatctattgctgtgtcaagttccagagaaaagcttctgttcgtccaagttactaaccaggctaaaccacatagacgtgaaggaaggggctagaaggaagggagtgccccactgttgatggggtaagaggatcctgtactgagaagttgaccagagagggtctcaccatgcgcacagttcctt

SEQ ID NO: 30210 - DNA, 2300 bp, Homo sapien
tatttttttagggacagtctcgttttgttgcccaggctcaagcgatcctcctgccttggcctcccaaagtgctaggattacaggtgtgagcctcttttcctgggctttgataattccctgtagaccagatgatttccactgcagccctacaatggggttattataaactaattcctcccaattctagccctcacctgtctcactagtaggtctcactgctatgtatgtttcatatttgaacttctgcaaattatgagtttaatcatgttgagggaaaacatagtgtattattaactctaaatcatcctgaagttttatatgctttgtttacacagatgcttttaaaagatgaagtgaaagagaaaaaaatatataaattgtcaagtggttttactagtcatacttctttccagtagaccgtttgatccttcaagctttgcatgacaagacaatttgttgcaaaaactgtcctgtcaaataattctaaaatgatttgtcctatcaggtgaaatccaaaatgatttagaattcagaaacatgaatgattattaaatgaatactataatgtctattaatcccggaacacctctaaaacctttctaagaatcgccaaaactcttttatgctcttatttccaaacctggggttccaaggtttgaaaacaaaatggcatgtataaaagcactttcaaagtatattacatacacagcgtcaggcctctgagcccaagctaagccatcatatccccagtgacctgcacgtatacatccagaaggcctgaagatccacagaagggaaaacagcttaactgatgacattccaccattgtgatttgtttctgccctatcctaactgatcaatgttctttataatctcccccacccttaagaagtttctttgtaattctccccacccttgagaatgtactttgtgagatctaccctctgcccctaaaacattgctcttaactccaccgcctgtcccaaaacctataagaactaatgataatcccaccacctttgctgactctcttttgggactcagcccacctgcacccaggtgaaataaacagccttgttgctcacacaaagactgtttggtgatctcttcacatggatgagtgaaacacacactaatgagaatcccaaatttctgatgtatacaacagagtattatacacacttttatacatggaggagagagaatagcgaacagaaaggcaccccaaaccctaatgcaaagagcaataaaaaattagccagccagcagcacatcaggctgccgtattggctgccctcaaagtcgcaggttctgttcattaatttttgtatcatatttattcaagaattgtactgtttaattactgaacaacctggggaatagctcaagaaaccatgagttaccctttctgggctgctgatgttttagaaaacctagtttttttaacatatgaatatttttcagttattcatttcatcattatgatacctgtatctcccatttcagtactgatcgactttagggagaaacttttgaaataagatgatattacgaaacgtccacgaaacaattctgtaacatctgtgcaaaactgtttttataagaaatctctaaaatttaatgacatttcctgcacctatagtgaaggcggaaatacaaacagtcccttccacgaaaacgaggtgctattacaatcacatttctcatcagcccttttcttttttgcaaaagtgtttatcctagtgctgcggacttacgacaaacgtcaacagttaataagataaccaaaaactgtgaaaatcaaacgttcctggaatgcatcggagcttcacactttagtccttcgcttgagactcaaaggccacatggccagataggtctttcacctctgcaaaccgttaaacatccttccagtaagacataatcgttaagcccacggtgttaaagaaacccagtgagctgttccccgcaggtcaccgcctgcctccaccctcctcccgcgcactgaaggcaaaacacttagaccggaacgagcgaggccagaggagacaacaactcccagcaggcgtcgcggcagcgggaagtcacgcacgcgcaacccaggccacaggagtaaaatctctctgcccgtcttctgggaagggagaatggcggcgcccgggctgcggctgggagcgggaagactctttgaaatgcctgcggtgctagagcgactgagccgctataatagcacgtcccaagcttttgctgaggtgctgcggctgccgaagcagcagctgaggaagctgctgtacccgctg

SEQ ID NO: 30211 - DNA, 2300 bp, Homo sapien
actcttttatgctcttatttccaaacctggggttccaaggtttgaaaacaaaatggcatgtataaaagcactttcaaagtatattacatacacagcgtcaggcctctgagcccaagctaagccatcatatccccagtgacctgcacgtatacatccagaaggcctgaagatccacagaagggaaaacagcttaactgatgacattccaccattgtgatttgtttctgccctatcctaactgatcaatgttctttataatctcccccacccttaagaagtttctttgtaattctccccacccttgagaatgtactttgtgagatctaccctctgcccctaaaacattgctcttaactccaccgcctgtcccaaaacctataagaactaatgataatcccaccacctttgctgactctcttttgggactcagcccacctgcacccaggtgaaataaacagccttgttgctcacacaaagactgtttggtgatctcttcacatggatgagtgaaacacacactaatgagaatcccaaatttctgatgtatacaacagagtattatacacacttttatacatggaggagagagaatagcgaacagaaaggcaccccaaaccctaatgcaaagagcaataaaaaattagccagccagcagcacatcaggctgccgtattggctgccctcaaagtcgcaggttctgttcattaatttttgtatcatatttattcaagaattgtactgtttaattactgaacaacctggggaatagctcaagaaaccatgagttaccctttctgggctgctgatgttttagaaaacctagtttttttaacatatgaatatttttcagttattcatttcatcattatgatacctgtatctcccatttcagtactgatcgactttagggagaaacttttgaaataagatgatattacgaaacgtccacgaaacaattctgtaacatctgtgcaaaactgtttttataagaaatctctaaaatttaatgacatttcctgcacctatagtgaaggcggaaatacaaacagtcccttccacgaaaacgaggtgctattacaatcacatttctcatcagcccttttcttttttgcaaaagtgtttatcctagtgctgcggacttacgacaaacgtcaacagttaataagataaccaaaaactgtgaaaatcaaacgttcctggaatgcatcggagcttcacactttagtccttcgcttgagactcaaaggccacatggccagataggtctttcacctctgcaaaccgttaaacatccttccagtaagacataatcgttaagcccacggtgttaaagaaacccagtgagctgttccccgcaggtcaccgcctgcctccaccctcctcccgcgcactgaaggcaaaacacttagaccggaacgagcgaggccagaggagacaacaactcccagcaggcgtcgcggcagcgggaagtcacgcacgcgcaacccaggccacaggagtaaaatctctctgcccgtcttctgggaagggagaatggcggcgcccgggctgcggctgggagcgggaagactctttgaaatgcctgcggtgctagagcgactgagccgctataatagcacgtcccaagcttttgctgaggtgctgcggctgccgaagcagcagctgaggaagctgctgtacccgctgcaggaagtagagcggttcctcgccccctacgggaggcaagaccttcacctgcgtatctttgacccaagcccggaggacatagccagggcggacaacatcttcacggccactgaacggaaccgcatcgactacgtcagctccgccgtccgtatcgaccacgccccggaccttccgcggccagaggtgagaggcgattctcacggttcacctgcgcgccggcgtcacagcgctaaccgcttccctggccgtccggctcgcgggtgattttgcggttgtattttctagctttatgttggcgcatatattattttaactcaataggcatatgtcgatgctccctgtacgtggggatacccgagaaacccattgttaagtacaaaatgcagtcaatacccataaacccatggtaaagtcaaaaatcgttaagtcgacccactgtaagcagagactgcctgtatacagcttaaattattttggaatgaatatagaagacttcaaaatgctttaaaagcttttcaaacccaaattaagcattcaaaaaattaactctccttttttcttctatttaacttaagtagggaaaacatgccagacaaattagacagaatttagac

SEQ ID NO: 30212 - DNA, 2300 bp, Homo sapien
ataatctgtaaatatgttaccttgcactgagaagggattttgtagctatataaccttgagatttcagctgcttgagatttcagcaccccagcatttttgtgtgtgtgtgtgtgtgtgtgtgtgcatgaaataatgaaaattttgaacaggcccttgcttgcttgtacatgttaaccactcgctttttgcccagtattccttgttcccacaatgtaattataaactgctgatgtactgtttctttgtcaagcagaaggagataacttcagggtcataagaatagtttgcagaaggaatgaattcctggaaggacattgcaaccagctgccatgtacatacggctgcacaaggtgttacctgaaatggaagaaacacagacttttcccttggattccttgaaactccctctccattactctctagctccataaaaactccctgcttcttttttgttactgtggatctgagagatcttgctctcttgccctctaactttggtcaaatcgaataaatatttctctgtctccaagcaccagtatctcaatatttggcatcagctgcccatcgggtacatgagcctgaatttggagttctaaaacagatgtgattaagttaaagattctgagatggagtgactatcctgattatcttgatgggctcaatgtaatcacaagggtgtttttaagagggaggcaggcaggagggtgagagagacagaggaagaggaggagactgaaaaatgtcatgctgacaatgaaggtggaggatagtgaaatgagccaaggaatgaaggcagcctctagaagctggaaaaggaaaggaaatgaattcttccctagagattccggaaggaaccagccctgccaacttcagtccattgaaattaattttggacttctgacctccagaaatgtaaaataacttctacttatttcaagccattaggtttgtcgtaattggttacagcagcaatagaaaactaatacataggccaacatagggcactgtggtaacacattaaaggggcctctgtatcaagttatggagtgaggacggggtgtttaggaagaattaccccaagtgacgaccccagagctgaggaaaggagattgtgtttccgaggatgacccaggtagagtaggtagatgtgtaaaggcgcacagaaagagcatggaaagtgtttcaataaagtaagactgcttgcatgaaatagtagtaataacatcaacaatattaactatggtaaatgttcattgtttgtatgccaggagtgccttggcattttacaagtctgtgagattgatactattattatcatcttcattttacccacagggatactaaggtctggaggaggaggtaagtaaatttcctgagatcaccgagctagtaaacagcaaagctagaactagaaccttggcagtctgtttccaaaactcactgtttttctaatacgttactgtgggagtgttaagaacttaagggggcattagcatggctgaggataaatgaattattagaaagatattaatgaggtaaggatcactagagcttggaatatgatcttgtcttggagactgacaaaagtgggaatgactgacaggtgtcttccaagtttctttgatgtgatctcggttttgctgtggttcaagacataaaggagccttcctttaccactcaaagcaaatcactgcttcttcgctacaaattccacaccttgcacaaacctcttcatttcatttcttcctttttcccctaatgtctgaggcagagttgggggtaaaagcaccaactcaattctgggcctcattttccatatttgtaaaatgcctagaagtatttaacagttccaaacttggttgtgcttccgaatcccctgcgctaagtttaaacaaaacgcagattcctcatcgcattctcagagattctgttggttagtattgggatggggccttttttcccccatgattctacgcggccacgtgttggtaaccaatatacagatgactgggtccttcccagtcccacgcgtttactcgatgaaggcagcctcccgccgggctcctggccccgcccgagccccaccccctgctcccttccggcccggactgggtcccatcgccccacctccggtcgctggacgtgctctcgcgtagctccgcctttcgtaagtccccccgcctcgcatgatggctgcggtgccgccgggcctggagccgtggaaccgtgtgagaatccctaaggcggggaaccgcagcgcagtgacagtgcagaaccccggcgcggcccttggtgagtga

SEQ ID NO: 30213 - DNA, 2300 bp, Homo sapien
cccatcggagatgcaaagaaaagggcctccacggagatggtaacaccagtcacatggatggataatcctatagaagtatatgttaatgatagcgaatgggtacctggccccacagatgatcgctgccctgccaaacctgaggaagaagggatgatgataaatatttccattgggtatcgttatcctcctatttgcctagggagagcaccaggatgtttaatgcctgcagtccaaaattggttggtagaagtacctactgtcagtcccatcagtagattcacttatcacatggtaagcgggatgtcacttaggccacgggtaaattatttacaagacttttcttatcaaagatcattaaaatttagacctaaagggaaaccttgccccaaggaaattcccaaagaatcaaaaaatacagaagttttagtttgggaagaatgtgtggccaatagtgcggtgatattacaaaacaatgaattcggaactattatagattgggcacctcgaggtcaattctaccacaattgctcaggacaaactcagtcgtgtccaagtgcacaagtgagtccagctgttgatagcgacttaacagaaagtttagacaaacataagcataaaaaattgcagtctttctacccttgggaatggggagaaaaaggaatctctaccccaagaccaaaaataataagtcctgtttctggtcctgaacatccagaattatggaggcttactgtggcctcacaccacattagaatttggtctggaaatcaaactttagaaacaagagatcgtaagccattttatactgttgacctaaattccagtctaacagttcctttacaaagttgcgtaaagcccccttatatgctagttgtaggaaatatagttattaaaccagactcccagactataacctgtgaaaattggagattgcttacttgcattgattcaacttttaattggcaacaccgtattctgctggtgagagcaagagagggcgtgtggatccctgtgtccatggaccgaccgtgggaggcctcactatccgtccatattttaactgaagtattaaaaggtgttttaaatagatccaaaagattcatttttactttaattgcagtgattatgggattaattgcagtcacagctacggctgctgtagcaggagttgcattgcactcttctgttcagtcagtaaactttgttaatgattggcaaaagaattctacaagattgtggaattcacaatctagtattgatcaaaaattggcaaatcaaattaattgatcttagacaaactgtcatttggatgggagacagactcatgagcttagaacatcttttccagttacagtgtgactggaatacgtcagatttttgtattacaccccaaatttataatgagtctgagcatcactgggacatggttagacgccatctacagggaagagaagataatctcactttagacatttccaaattaaaagaacaaattttcgaagcatctaaagcccatttaaatttggtgccaggaactgaggcaattgcaggagttgctgttggcctcgcaaatcttaaccctgtcacttgggttaagaccattggaagtactacgattataaatttcatattaatccttgtgtgcctgttttgtcagttgttagtctgcaggtgtacccaacagctccgaagaggcagcgaccatcgagaacgggccatgatgacgacggtggttttgtcgaaaagaaaagggggaaatgtggggaaaagcaagagagatcagattgttactgtgtctgtgtagaaagaagtagacataggagactccattttgttatgtactaagaaaaattcttctgccttgagattctgtgaccttacccccaaccccgtgctctctgaaacatgtgctgtgtcaactcagagttaaatggattaagggcggtgcaagatgtgctttgttaaacagatgcttgaaggcagcatgctccttaagagtcatcaccactccctaatctcaagtacccagggacacaaaaactgcggaaggccgcagggacctctgcctaggaaagccaggtattgtccaaggtttctccccatgtgatagtctgaaatatggcctcgtgggaagggaaagacctgaccgtcccccagcccgacacccgtaaagggtctgtgctgaggaggattagtaaaagaggaaggaatgcctcttgcagttgagacaagaggaaggcatctgtctcctgcctgtccctgggcaatggaatgtctcggtataaaacccgattgtatgc

SEQ ID NO: 30214 - DNA, 2300 bp, Homo sapien
gggaatgcttaatagtccaactatttgtcagacttttgtaggtcgagctcttcaaccagttagagaaaagttttcagactgttatattattcattatattgatgatattttatgtgctgcagaaacgaaagataaattaattgactgttatacatttctgcaagcagaggttgccaatgctggactggcaatagcatctgataagatccaaacctctactccttttcattatttagggatgcagatagaaaatagaaaaattaagccacaaaaaatagaaataagaaaagacacattaaaaacactaaatgattttcaaaaattactaggagatattaattggatttggccaactctaggcattcctacttatgccatgtcaaatttgttctctatcttaagaggagactcagacttaaatagtaaaagaatgttaaccccagaggcaacaaaagaaattaaattagtggaagaaaaaattcagtcagcgcaaataaatagaatagatcccttagccccactccaacttttgatttttgccactgcacattctccaacaggcatcattattcaaaatactgatcttgtggagtggtcattccttcctcacagtacagttaagacttttacattgtacttggatcaaatagctacattaatcggtcagacaagattacgaataataaaattatgtggaaatgacccagacaaaatagttgtccctttaaccaaggaacaagttagacaagcctttatcaattctggtgcatggcagattggtcttgctaattttgtgggaattattgataatcattacccaaaaacaaagatcttccagttcttaaaactgactacttggattctacctaaaattaccagacgtgaacctttagaaaatgctctaacagtatttactgatggttccagcaatggaaaagcagcttacacagggccgaaagaacgagtaatcaaaactccatatcaatcagctcaaagagcagagttggttgcagtcattacagtgttacaagattttgaccaacctatcaatattatatcagattctgcatatgtagtacaggctacaagggatgttgagacagctctaattaaatatagcatggatgatcagttaaaccagctattcaatttattacaacaaactgtaagaaaaagaaatttcccattttatattactcatattcgagcacacactaatttaccagggcctttgactaaagcaaatgaagaagctgacttactggtatcatctgcactcataaaagcacaagaacttcatgctttgactcatgtaaatgcagcaggattaaaaaacaaatttgatgtcacatggaaacaggcaaaagatattgtacaacattgcacccagtgtcaagtcttacacctgcccactcaagaggcaggagttaatcccagaggtctgtgtcctaatgcattatggcaaatgcatgtcacgcatgtaccttcatttggaagattatcatatgttcatgtaacagttgatacttattcacatttcatatgggcaacttgccaaacaggagaaagtacttcccatgttaaaaaacatttattgttttgctataatgggagttccagaaaaaatcaaaactggcaatggaccaggatattgtagtaaagctttccaaaaattcttaagtcagtggaaaatttcacatacaacaggaattccttataattcccaaggacaggccatagttgaaagaactaatagaacactcaaaactcaattagttaaacaaaaagaagggggagacagtaaggagtgtaccactcctcagatgcaacttaatctagcactctatactttaaattttttaaacatttatagaaatcagactactacttctgcagaacaacatcttactggtaaaaagaacagcccacatgaaggaaaactaatttggtggaaagataataaaaataagacatgggaaatagggaaggtgataacgtgggggagaggttttgcttgtgtttcaccaggagaaaatcagcttcctgtttggatacccactagacatttgaagttctacaatgaacccatcggagatgcaaagaaaagggcctccacggagatggtaacaccagtcacatggatggataatcctatagaagtatatgttaatgatagcgaatgggtacctggccccacagatgatcgctgccctgccaaacctgaggaagaagggatgatgataaatatttccattgggtatcgttatcctcctatttgcctagggagagcaccaggatgt

SEQ ID NO: 30215 - DNA, 2300 bp, Homo sapien
ccagaaagtcagtatggatatccaggaatgcccccagcaccacagggcagggcgccataccctcagccacccactaggagacttaatcctacggcaccacctagtagacggggtagtgaattacatgaaattattgataaatcaagaaaggaaggagatactgaggcatggcaattcccagtaacgttagaaccgatgccacctggagaaggagcccaagagggagagcctcccacagttgaggccagatacaagtctttttcgataaaaatgctaaaagatatgaaagagggagtaaaacagtatggacccaactccccttatatgaggacattattagattccattgctcatggacataaactcattccttatgattgggagattctggcaaaatcgtctctctcaccctctcaatttttacaatttaagacttggtggattgatggggtacaagaacaggtccgaagaaatagggctgccaatcctccagttaacatagatgcagatcaactattaggaataggtcaaaattggagtactattagtcaacaagcattaatgcaaaatgaggccattgagcaagttagagctatctgccttagagcctgggaaaaaatccaagacccaggaagtacctgcccctcatttaatacagtaagacaaggttcaaaagagccctatcctgattttgtggcaaggctccaagatgttgctcaaaagtcaattgccgatgaaaaagcccgtaaggtcatagtggagttaatggcatatgaaaacgccaatcctgagtgtcaatcagccattaagccattaaaaggaaaggttcctgcaggatcagatgtaatctcagaatatgtaaaagcctgtgatggaatcggaggagctatgcataaagctatgcttatggctcaagcaataacaggagttgttttaggaggacaagttagaacatttggaggaaaatgttataattgtggtcaaattggtcacttaaaaaagaattgcccagtcttaaataaacagaatataactattcaagcaactacaacaggtagagagccacctgacttatgtccaagatgtaaaaaaggaaaacattgggctagtcaatgtcgttctaaatttgataaaaatgggcaaccattgtcgggaaacgagcaaaggggccagcctcaggccccacaacaaactggggcattcccaattcagccatttgttcctcagggttttcagggacaacaacccccactgtcccaagtgtttcagggaataagccagttaccacaatacaacaattgtcccccccacaagcggcagtgcagcagtagatttatgtactatacaagcagtctctctgcttccaggggagcccccacaaaaaatccccacaggggtatatggccccctgcctgaggggactgtaggactaatcttgggaagatcaagtctaaatctaaaaggagttcaaattcatactagtgtggttgattcagactataaaggcgaaattcaattggttattagctcttcagttccttggagtgccagtccaggagacaggattgctcaattattactcctgccatatattaagggtggaaatagtgaaataaaaagaataggagggcttggaagcactgatccaacaggaaaggctgcatattgggcaagtcaggtctcagagaacagacctgtgtgtaaggccattattcaaggaaaacagtttgaagggttggtagacactggagcagatgtctctatcattgctttaaatcagtggccaaaaaattggcctaaacaaaaggctgttacaggacttgtcggcataggcacagcctcagaagtgtatcaaagtatggagattttacattgcttagggccagataatcaagaaagtactgttcagccaatgattacttaaattcctcttaatctgtggggtcgagatttattacaacaagggggtgcggaaatcaccatgcccgctccattatatagccccacgagtcaaaaaatcatgaccaagatgggatatataccaggaaagggactagggaaaaatgaagatggcattaaagttccagttgaggctaaaataaatcaaaaaagagaaggaatagggtatcctttttaggggcggccactgtagagcctcctaaacccataccattaacttggaaaacagaaaaaccggtgtgggtaaatcagtgtccgctaccaaaacaaaaactggaggctttacatttattagcaaatgaacagttagaaaagggtcatattgagccttcatcctcgcc

SEQ ID NO: 30216 - DNA, 2300 bp, Homo sapien
ctataatcccaactacttggaaggcggaggcaggataatcacttgttcccagtggaggttgcagtgagccgagacagtgtcactgcactccagcctgggcgacagagtgagactccacctcaaaaaaagtaaaataaataaaataattaaataaataaataaaaataatacataattttttctcattacaacagcaatacttctttttttaaaatataaaaaaataagctcatagaagaaaaaaaaatctatcctactgccagaaaaatgaccattgttataaccttcatttagatccttctagacctcttcctcaatgtgtggctatgtatttttttcaaggaatgacatacagttttctgaactgcttaaaaaaatcttaatgtatcattaataattgctcacattaatacatatttatttacagcagcaagtttcaaactgttctaggaaatgtcttgggcaagtacctcaggaaatggcccctcaaaattgccttaatgggagggccttgcattcccccatacatacttaaccactgcaatcttgcttttatatatttgttttacatagtaggtttctatataagattttgtggggaataaaaaattccactgccaaaatattagaaagtaatcgaattattgtgaggatacaatgtcactttccttttttatgattacaacaaaggataactttgcacctagatttttcgtgcaaagccctagtgacaccagacaccatgctttttactctttgtctatttgatagaagctaaaaattattttaatttgtatttcatgaattactaatgagatggccaaggttttacatttaatggtcatttttgtctgtgacagcctttttttttttttttttttgcagtctagagatttgtttacagtagggccctaaaaccttacttctaatgtacatagcctgtgcttttcccatgtgccctgattcaaggaagctcggatttcaacatccattgctcatccagaacaccatctccctgccctcctccactcttggtaatgatctcaaatcctcctccattgagaacacagaagctgtccatcactccttccgaaatagatctatatctatactatctttatttttcttcctggctcagataataaaaggttttgatatttaagtcaactgctttacttcagcacttgattccatccctgcttgtctcttctggttcctaggatggtgtctggcaaaaaactgacgctcagaaactttgttgaatgagtaatgggtctttctccatcaattctctcctatttttttatatccagcttctttcacactttgaattcttccctttagcctatatatatgtttgatcaagtcattttccatctgtgatggtcagctttatgtgtcaacttggctaggctgtagcacccagttattcaatcaaatattagcttaggtgttgctgtgaaggtattctgtagaagtgattaatgtctacagccagttgattttatgtaaaggggattattctgggtaatgtgggtgagcctgatccaatcagttgaaaggcctaaagaatagaacttaggttttcctgaagatgtgaagaaagaagaaattccacctgcggacttcctcttcagctcctgcctgagagtttccagccttatgaatttcagactttcctatctgacctctacaatggtataagtcaatttctttctgtaaatccctttacatattctactgtttctctttggctggtgtggggaaaagcaagagagatcagattgttactgtgtctgtgtagaaagaagtagacataggagactccattttgttatgtactaagaaaaattcttctgccttgagattctgtgaccttacccccaaccccgtgctctctgaaacatgtgctgtgtcaactcagagttaaatggattaagggcggtgcaagatgtgctttgttaaacagatgcttgaaggcagcatgctccttaagagtcatcaccactccctaatctcaagtacccagggacacaaaaactgcggaaggccgcagggacctctgcctaggaaagccaggtattgtccaaggtttctccccatgtgatagtctgaaatatggcctcgtgggaagggaaagacctgaccgtcccccagcccgacacccgtaaagggtctgtgctgaggaggattagtaaaagaggaaggaatgcctcttgcagttgagacaagaggaaggcatctgtctcctgcctgtccctgggcaatggaatgtctcggtataaaacccgattgtatgc

SEQ ID NO: 30217 - DNA, 2300 bp, Homo sapien
agcaatctgctcaagaatttcctgaatatttgacaatatgttcccacaagtgagtcttagccaattacagcacaccacagacctggcataaaactagaaggaaccagaccttctagttcttctatcagtctgtggtgtcaacacaatgccctgcacatagtaagaacacaagtgaagcccagattgactgaatttcttttttttttttttgagacgaagtttcgctctttgctcttgttgcccaggctggagcacaaaggcgccatcttggctcactgcaacctccgcctgccgggttcaagcaattctcctgcctcatcctcctgagtagctgggattataggcgcccgccaccatgcccagctgatttttgtatgtttagtagtgatgggttttcagcatgttgaccaggctggtcttgaacttctgacctcaggtcatctacccacctcggcctcccaaagtgctgggattacaggtttgagccactgcgcccggcctgactgaatttctttatgtcttgactagaacgatcttcctgaccgtcataatttttcttatggaatgtgattatgataatttcccagcctagtcttagctccaggctctaatttattctatttattgtggtattattttcaggttacaagttggtctggttttttaaatttctgttcctttcttattctgatacttttatttttaatgcagaaacacatacccatgaaaacatagtaacctccatgcttccctgtttctatcttacaagagagtaagtgctcccagtgctaaactttaagcagtgtgaactccaaccacttcacatgagtatttttttttttttttttttgtgatccatgtcagtccatgatttgctcaggggttccttcttgaaatgccatgcatgatggtatctgggaactgattatcatgtcagaggaagattttggagaccaacctgctattactggcaaaccagatattgactatatcttttgtggacctttttcactttaataagttaaagagcctccatctgttgggctctgtctccttttagctcttctcttatttgacttttgccctgagtttgttgtgtaggttcactttgcagggctgtgccaattgtggctttgggacgaagtgttccttttccagacagagatgtttcatctggagccagccttgacttttctttctgctataatgtaaacatgaaaatatgaaaatgaacagcacaaataaggttttatggctttttccagtaacataaggagccaagaaaggcaataacagaattcaatcattcattctcctttcctattaacttgattttaatttatcttccagaataaatatttgacaaatttcttcattagtgtggagctgaagaaaatgcagtatctttggctcaggcgggttaatactgctcgactttggcagttctggcctgtggagtttagtgctggatttgtgattcctaccaggccatattgcaaagactagataaagaaggcagtgaggttgttgactgggggtccaaggctcaggcagccaaaagcagacatgagaggtcaaggctgaggtactggtagagacgagctcaagacaaaactgtgtgtccactggttatactccttaccaggagtgcaattctttcttcaaagtggaaaaatacaagaagacctctagaaatggagtgaagctttcaaaaaattcaaagcaggcacgttcttcatagagttcaggagtcaaaacaggttgactgcaagttagattagggagcagtgactcacatgcacattccagacagggtgcatgagataattttgagagggcacaggcagggacagcctgaagcaaaatcatgtactttcccatggcatgccctacttctgctattctaccaacggttatggactgaatgtttgtgtccttccccacattcatatgttgaaatcttaatccccaatgtgatggtatgagaaggttgggcctttgggaggtaattaggtcatgagtgtggagcctttatcaataagattagtgcccttatagaaagagacccaagagcttgctgtctctttctgttctctgtcatgtgaggatgtcatgagaagatgttcatctgcaagccaggaagcaggccctccccagacactggacctgctggcaccttgatcttggacttcccagcttctagtactatgagaaataaatgtgtattgtttgagtcacccactcttcggtaatgtgttgcagcagcctgaactgactaagacaccatcttgtttctgaag

SEQ ID NO: 30218 - DNA, 2300 bp, Homo sapien
cttcctgttacttatctcagcaacgtgcagtcacttcccattcaacaatcacgcattgagcttaggcacactgcaattcttcttccatcagaatctcttaccttctctattgctcacttgctctggactcattgtgttcatataggatagttctatacaaacattatgtatgtgtgtatgtgtgcatatcaggattgctttgaaactcacccactccacccattacacaatttcacctacgcgtgaatcaactcagagaccaaagtggtggctctcagttttcagggacaatttcagacagggccttaacagacagtatgggacatcccacatttcctgcctcgtgcctcaccctgagatcaatcagatcattgcaagtctatttcacagaatgaaatacttgagctgcattgtggtagattttcattgccaggtacttcttttgaacttcaaaagttgtctctaacaccctggaatttatgtcttatctgcttaagaagataatcaggccacagtcacacactttgcagaaatacacattgaacatgcatctggggtatttgtaaaatatgcttgggagcctgcagacagatgaagttttgtcactgtcaggtattaaagggtcacagaatcaaatcaagtgcagaagcctgaacctgccatgcctgagacttccatctgcgattcactggagagatgagggatatgagcttgtgctgtgctggtgctgaacccctcaagccctgtgaaattagaatgctggaaaggccctcacgtctctttgttttaaaagccgtgtgtttttggaaaagcacaactttctgtttttttcctgaaagcaagatttttaaatttccaaattatgctcataaagtttctcagatgtcaaacaggttttcataataattatttttgatgatttaagggtaagtaaataaaaagcatatggattaaatgtcccttaaaatatgcatgttttaatattatggggtatgggggtagtgcttgacgaaagcactttgcatttcacacagccctgatgtttgaaaaatagggcatttgatgagttctaaacaagaccaggttctcctatctttggcagaactctgtgagccagttttctgtctttccaagagaaacggtctgcccaatcctggggaacaacagcccccacccctgcaagtaaagcttggcaaacgtgagccgtcgttctcagttgagaaaacaggagtgaagtaatggccacagcccgcagttacccctctggagtggcctgatttataactgccttgggagcctcacggtattacatcgcttgattttgtacacacataatgtcttagccttcccaccccacaatgtgttaggtggtattaaaggttttccactggggcatataaaatcttggcttttatccaagccaaaatccagccaccccttgagcattataattgaagtctaaatagaacttggcatcattctagggtctctcaatcaatcaactaacattaaatgcctgctagagcaagcccttactatgatggggagtgagaggaagggagaaaaaaggacattaaaaaaagttcagaaacacagaagacaaagtcccagtttcaagcaactaatgatctgcttgaggggctaagataagacacaggggaaatgatgaaatgccaccaggcaggtatggataagggaggctggactgggaaggctctctgaaataggagtaacttttgatgggccttagggattgagctggttcattcacttgtgaaaattcacttgtgaaatatttactgaacacctactatatgcaacatactgggctagtactgaggatacaaaggagagccagacaggcctggtccttgcctttgggcagcttgcctctgagttgggaagataggcatcaaacagctaattatatcattcaaccttccttataattgtgagtgctccaaagaagaagatcagggtacttgaccaaagttaaatgtcttaaattttcctagacccttaaagtgtgcttcaccaatcagcttgatataaaggcagaatctcaggcacctctccagtcctagtcaatcagaatctgcatttttagctcaatgccaggtgattcttttgtacattaaatttttagaaacagtaccaagatagaattttgcaagacagcagaggactcccggatcacacatgtgttagaatatctggattaaatgaatcagacaccccttttcctggatgatatttatacacctgaattgtgtgttaaggagcctgtgttgcttgcgtag

SEQ ID NO: 30219 - DNA, 2300 bp, Homo sapien
gtgccttggaaggaggacaaaagaaagtggaagctaatatagtcaatgactggaaagaaaaataggtctttgagaatgttgggggagattgttagagattaaaagggaaggaaaattaggatgattaagtaggaaaaggaaatgtaggtggataatgcacagagagagttcagagtccttttcaccttcttgctgaaaatgcatcatcctccagatccattttgccagaggaacatgcctaagaatccaggcacagagctgaaagtactcgataaatcaaaaaggaaattggcttctgcctgaatgactaaataccggagaaaaaatagtgcaaaatatggaataaaatacatttatgtttcctttgtaaaggtcttttggttcagattcaattagagtcctatactcagtgtaaagtatgtatgtttactgacaagaaacaagttaataaaaaacaaaacagggccgggtgaggtggctcacgcctgtaattttagcactttgggaggccaaggtgggcagatcacttgaggctaggtgttcaagaccagcctggacaacatggtgaaactccgtctctactaaaaatacaaaaattagccgcgcatggtggcaggtgcttgtaatcccagctgcttgggaggctgacactggagaatctctcgaattcaggaggcagactttgcagtgagccgagattgcaccactacactctagcctgggcgacagagtgagactctgtcaaaaaacaaacaaacaaacaaacacacacacacacacacacacacacacacacacacacacacacacacacaaaacccccagaggcccagaaaagttaagtgactttccaaagtcacagtggcttcctgactcccagtgcagctgtccagccacacagggaaggcagcacccccattcaccctactactagcctggctgtcttatttccaggacagcttcctcaccagcttggcacaaactcccagttcactttaaacaaatggcttagccctgctgggacttggttttctcagctgcaatgaagatacggaatggatgaccgctcacaacctgtgcttcattcctaaaaaataagaagggaatccaatttgccaccaactcaacatttgccttctcactgccctggaaaggtagtttttaaaacgtggcccctgacctgcagcatcagcatcacctgggaacctatttgaaatgcaaattcccaggtccacctactgaatcagaaactctggaggtggggcccagcaaagggatttagcaagccttccagggagtcctgctgcagatcaagtttgagaaccacagctctgaaagttttctgaccaacacacacgcgcgcgtgcgcgtacacatacacacgcataggtaactaacttttccgtggccactagcacccccaacccatgcccccaaccccagccccagctctccctccccattcctccctggctccatcctgggatgatgaatggaggtcagggcgctgtcaatggacgacgcggcaaaccctccccaaccgaccgagggggtcgggggaggctgcgttaaggcttccctgagattggtttccttatcattttctccaccgccgctgtcccattttctgatgagtttgcttttaatgatttatccaacagtttgtcttgcagaagaagaagaccattgagaggtgggtgtcaggaaagtcttggaagagactaggcgaaaggagggaaggattgtacatggaagagcaagggtgcgaggtgaagctaaagagaaagtgaaggcttcaggggagccccctgggttcggggaaaagggagaagatggtgcttttggtatgggaaagcaaaagaagttggaggagagcgcgggtctgaggcacagcaaaaagtgggtgttaacgggaaaactgccctagagtttgggggactttttccagcttcctttccaagactttttctttgctccattttgctcctccccctcctcccagcctcctccactccctcctcctcctcctcctcgcacggtaatgggaggctcctaggcaggagaagcaaaagaaggaattgtttgcgagttcagtcatccaaaaagcttcttccatatggagggaccgggtgcgctgggcgcggcgtcccctgcgttgtcctcctgctgccgcccccgcggccgccgctttctgccgcggggaccctgagccccggcccgccggtgtcagccgccgcgcgcgcgcacagacacacacacagagacacacaaacacacacagaaaagacacacacgcgcac

SEQ ID NO: 30220 - DNA, 2300 bp, Homo sapien
ctcaccagcttggcacaaactcccagttcactttaaacaaatggcttagccctgctgggacttggttttctcagctgcaatgaagatacggaatggatgaccgctcacaacctgtgcttcattcctaaaaaataagaagggaatccaatttgccaccaactcaacatttgccttctcactgccctggaaaggtagtttttaaaacgtggcccctgacctgcagcatcagcatcacctgggaacctatttgaaatgcaaattcccaggtccacctactgaatcagaaactctggaggtggggcccagcaaagggatttagcaagccttccagggagtcctgctgcagatcaagtttgagaaccacagctctgaaagttttctgaccaacacacacgcgcgcgtgcgcgtacacatacacacgcataggtaactaacttttccgtggccactagcacccccaacccatgcccccaaccccagccccagctctccctccccattcctccctggctccatcctgggatgatgaatggaggtcagggcgctgtcaatggacgacgcggcaaaccctccccaaccgaccgagggggtcgggggaggctgcgttaaggcttccctgagattggtttccttatcattttctccaccgccgctgtcccattttctgatgagtttgcttttaatgatttatccaacagtttgtcttgcagaagaagaagaccattgagaggtgggtgtcaggaaagtcttggaagagactaggcgaaaggagggaaggattgtacatggaagagcaagggtgcgaggtgaagctaaagagaaagtgaaggcttcaggggagccccctgggttcggggaaaagggagaagatggtgcttttggtatgggaaagcaaaagaagttggaggagagcgcgggtctgaggcacagcaaaaagtgggtgttaacgggaaaactgccctagagtttgggggactttttccagcttcctttccaagactttttctttgctccattttgctcctccccctcctcccagcctcctccactccctcctcctcctcctcctcgcacggtaatgggaggctcctaggcaggagaagcaaaagaaggaattgtttgcgagttcagtcatccaaaaagcttcttccatatggagggaccgggtgcgctgggcgcggcgtcccctgcgttgtcctcctgctgccgcccccgcggccgccgctttctgccgcggggaccctgagccccggcccgccggtgtcagccgccgcgcgcgcgcacagacacacacacagagacacacaaacacacacagaaaagacacacacgcgcacacacggcgcgcacaccctcacgcccgccacagccacaacacgcccgcacgcgccctccctctccggcccgcaacttctcggtcctcggctcctttgttgctccagccgcggccgctcgcccgtgttgtgtgtccccggtgtcaccgagcgtgttgtgtgtccgtgcggcgcggcgctgtgtggctccctcgcgcccaccacgctggcccccgggccccggctcgcccttcccaggcgccggctgcagcagaggtgagtcacgtcgctgaagtttgttttcttttcataaaaagttgtgtttactgttggttcggggagaggagggggcgggaggcggccgcaggccgaggcagcgccagcgagtggctgccgggggacgtgccggcggcgggagccgggtcccagcgctcggccgggcgcccggggctgggagctgcggccgaggctgggcgcgccgggcgccgggcgaagaagttggggcgaggcgggcagcgggggtcccgggggctgcagccgctacggggcccaggggcgccgcatctcgttccctgccgcagcggtctggccgggcgatggtggtttcgcctcagcggttcccagaagcttctcgggtggaagaaggatccagccagcctcccaaacttccaccgaaggttgacaccagcgccccggccccatgctccaggccgtggggggaacccgaggcgtggcggcaaatgcgtagagtcactcaacacgcactcggcctctttggagggtgagggtttctcatagttggcgtcttctaaaggaaaaacactaaaatgaggaactcagcggaccgggagcgacgcagcttgagggaagcatccctagctgttggcgcagaggggcgaggctgaagccgagtggcccgaggtgtctgaggggctggggcaaaggtgaaagaggtgtgtgtgtgtgtgagagagagagttcgtgtgt

SEQ ID NO: 30221 - DNA, 2300 bp, Homo sapien
ttttccctttttttgaagtgctttttcaagtgtttgggatcccggctctcttcaacaacatggtttccatgccctaagaatgaataagagattttacccatgaaataattcagttgactttcacatggaccccccacggtttgaaaaaggagagcaagaagtgagcctgatgtgtcatagtgttccgtgtcccctagggggtctgggttcaaatttcggcaaagccactgatgtgggtaatgaattagggtttatctctgtgtctttcaaactacaacagaaaactcaggtgcaccaaataattgctatccaataccttgtggcctctgaataagaaaatattaacttggcaccaaaagatattatatatttggaagttgctttctttcctccaaactctaagccctcttgctgtctgggaaaatatgggacaggagaaaagaatcgaaatttgagagggagaggaaagaaaataatatgttccatttagaaaaatctatttactctaacatatgtaacttcttgtcatctccatacttcaattcagcaaacatttttagtgcatcaggcaccaggctgaaagcttccttgtcccaggaaagtaagctttattagtcaaatgatggttcctcctcagtttttatttattgtacaagcatctacttgtaattaagaaaatgttttttaaattatccacaatcctatggacttgtgttgctcatcatgtgcatgcatacttttgacatagttgtgataagagtatgaacttttgtcatcagacagccctgaagtgtctctacatttttgactaaagactcagagaacagatgtagccaactactttgctgttggttggaaagacccaaatcctaagtgtgctcccacatggagccttaacatgtaacattttcataatttatgaggttgactcaaatatttggggttagggggtgggatgggagagggtgtttgtttttaatctataaacccgtgtttatgaaaagcttgcctaaagaaggttttgcttctttggagccctcagggttggtaacggatagagaagaggaggtggaatgcaggaaggaaggtttagaggatccatctcaaatggcactgcctttaggagggttaggaaactggggttggaatctaagctctgcctgtgaactccattcacactgactcaaaccactgaactaatctattcctacatctctactgccacccagttagacaccttccccaagtttgcctgctctttcctgcccttccttttattactccaccatctttttcattcctgccaccaccagacttgttgatgcccttgacaattgttgctggcacgtggctgggcccccagtgccaacctgtgaccatcccacccattctccatgagtcctataatcaagtcaccacccagctttaaaacaacctaggtttaaaaccctaatttcttaaagctctgctgtgtagctctgtcctacctcatgatagtattacttcagtaggagccaccttctccaatctagcagctgacccttggtttttgctgagttcattccttgccctctgtattatcaccccaaatcccttccatgtaagcctgactgattttatatgaggcctgtttataatgtgttcttaagaaatagttgatgactattgatgaaaatggactgctgaacataaaggtaatggttttgtaaagtacaatcattgttcttaatccgttgttcatttcagcagggagccaggaaactggacatttcgggaggcctatggtcttagaaaaatcgcttttctactgttttcttatttataaaatgtattgataaggacttactatggtttatatcaatgcaccttgtaaaaagcaaatacttcagaactgtttattttgttcaaaagatgagataattctctttttcctcagtttcagaacaagcttcctggaacccatgacccatgaagtcttgtcgacatttataccgtctgagggtagcagctcgaaagtagaagaagtgggtgaggttttctcttcagtctgatagctctggcctattaggtcagccatttgttcatgttttgtgttaccacttagagatagtttttctcatcctcaagtattgggagtccaactttgagtggaatctggactaaacttcaggttagttctagctcggttcatatgctcttttagtcaaagcctgtgatggctatgtgaacccccttgctctgtggcaagctctgtcagacatgttagatacaaaccgtttactatgggatttggagtccaa

SEQ ID NO: 30222 - DNA, 2300 bp, Homo sapien
gttttactcagcaacatgagtgatttgtctcatacaaagagagatttgttgtttggactcttgcattgtttgggaaacattctgcttttattctagatgaatctccatgctctcccagtttagatcccatggtgccaagccaggagagatggctatggggctgccagagaccacagtctcatgttaggaccctggctcctccatagtccactgccattaagccaccctagggtgctgcctgttgtcctggcagattcctctttgtcttagaaaacccttagggtatccagagtcctgcccccagccccaaggaaggatcctccgtgaagtggggtgtggctcctgagcagcaagaatcagccttctggttataaccatggccggcaaccaagtggaatctcaggcctgttacttgtcatcgtggatgcctaaggagaacctgggaaggctgttctttttttttgagacatagtctcgctcttttcgcccaggccagcgtgcagtggcgcgatctcggctcactgcaagctctgcctcctgggttcatgccattctcctgcctcagcctccgaaggctgttctcaatcaacttggagaaaagacatgagcattctcttgtatcgttcccttccatctccattagttgagcctgctgacagctctgctaggacatttgtactttgacccccccccatttctggggtgtaagcagagccaacttgcccccacatctcagtgtaacagatggtctgagccagaggcaccccttgatgggattctctctgcacctttccccagcttgtatatacaaagtgaaccccatcagtgatgagggccccacattcttacaaactcctgtagacaacaaggggctggaggaagaactcggaggatcccctgatatccccctaggtgtgagctttgtcatgactgacaacaccaaggcacaagcccaccctgaaatgtcacacttttgctctgctgtcctccaaccagcaccttcccttctcttcacagatctccaggacttcaagttagatgtgcagcacgtgattgaagtggatgagggaaacacagcagtcattgcctgccacctgcctgagagccaccccaaagcccaggtccggtacagcgtcaaacaagagtggctggaggcctccagaggtgagtgggcaggagcccagaggccaaggctgaggccagaagggaagctggcctcctccaaccgctcgctgctcaacaaagctagggcagctgctgctgtctcccaaacccccctcaacatgccagcagccctgtcctcatgctagccagctgtcctcctcccctttttttccttttaagagacaggatcttgttctgtcacccaagctggagtgcagtggcacaatcagagctcactgcagcctccatcaccaaggctcaagagatcctccttcctcaaccatctgagtagctaggactacaggcacacgccaccatgcttggctaactttaattttatttgttacagagacagtcttgctatgttgcccaggctggtctagaactcctgagctcaagcaatcttcccgctttggctgaaattacaggcttgagccaccatgcttggtcatgtgttctttcttgatatttggtcctgtagggtcccaaagcaggtggcttccattatggaagtcctctgtcttagcatgaggaatttctttatcctttcaggctccagaagatattactgagatgctgctgttccatccaggctctcagcacatggttctgcatgctgcctggggaagctctgtgcctccaggcacacacaggaaggctgcctaataagcccattcatggagccccagggttccttggcaggaggtggagctcttccccatgcagcagagcaatctttatagtggacttcatttttccctctccccgtttgcatagtaaatgcagttatctcagctgtcacagctccatgctcaagccacagtggacagacacggcagcaggtctagggaagccaagacttggtccacagaatgccagaggggaaggggttgtccccgaagtcaaagacagcttcttttcacaactgaccccatactcaaggccaagtagaccttacttgacctgactccacagctcaaaatgtacaccttttaactgcttgagtccaggaggctaaggttgtagtgagccaagatcatgccactgcactctagcctgagtgacagagtgagactctgtctcaagaaaaaaaatatatatatatacctttaaaaatattctatagattttaagag

SEQ ID NO: 30223 - DNA, 2300 bp, Homo sapien
ttttctctctggcactctgtcctgcttgttgcaaggttttatggggagaacggcatcttaggctttgtcttgtggggactcaggtggacatcagctcctagtgcctgcccagcctgttcctctccctccgtgcacctctcctttgtggaagctgcagagtgaagtattctggacccatcccatcttcccctggccctgccctttccacaggtaactacctgatcatgccctcagggaacctccagattgtgaatgccagccaggaggacgagggcatgtacaagtgtgcagcctacaacccagtgacccaggaagtgaaaacctccggctccagcgacaggctacgtgtgcgccgtaaggcccgggcccacctgctgggggatgggggatcactgatggaagggctcacaaagatggaaagggaggtagatacctggaggtgccacatccaagctccagttctgtgtgcactggctttggccagggggacagccaggggttctcagccagggattctctcccctctggccggcctcagggccagcatctcacagcacacagcaccaggcgactgcctgctgccacacctgcctgatgggaggtttccttcacggttactttgcgattgggatgggtcagaatgtgtgtgctgggacaggacggtgggtcttgtctcaagctcagcagcggacacagcatgtgcctagaacagatggccacgtgggaggcctccaggctgctgttctgccctatatgaggtccctgggcctgcactctctgcactgatgaggtgtgccctgcaccaccctctggtgagcttccgggaggcccacatgctctcaatgcacaggaaaacagcagctacctttctgtgcgcttgcctggatccctgccaattcaaaggagtgacatcttacacggagttaggcttagagttggcaccagagatggaatcactgtgaagctaatgaagttaaacttccatcgtctttcactcactgacagaagcctcacaaggccctaactttgtatgtatcattttccattctttttggggcctccgaaactgtataaatttcaggttttagaaaacctgggtgtgtccctggttggcatataaagcggaatcacacatagtccccttgctccttgaaggttgctgaggaacggcacacattagagagtaaacaggcctttcagtgagttctctgcagtttgtccacagtgttgaaaaaagattacagctttcccagctgtgcacctgaggaagtacataggtgatttgcatttggggaccttgcaatatgagaaatgcatgtgtttaaacagtggattccattcagctcagccggaggccggctctgagatgctcactgagagacagttgggcctgagaaccatagggtggggttgagagcatggcagattcttgtttcccatctcatcttcagcctcacagcgcacatactgagtgcaagcagaaagaaatatctgtaccatttaaactgcctctacactccctcacctttctctctttgccagcacacagttaactgtgcatatgttatgttgatgctgctgttcttctgtgttatctcatttcttactcataacagctccctgcagaagcagtccttgtttctgataaggacaccaagccccaagggaattctgtagcacgccccactctacataggttgaaagacccggaatggctgtttgatcccatctccatgctctctgggactgcctcctgggcatgctctacaggacatcctggtccacacgccttctgtccttgccctccttgcccctccaggctccaccgctgaggctgcccgcatcatctaccccccagaggcccaaaccatcatcgtcaccaaaggccagagtctcattctggagtgtgtggccagtggaatcccacccccacgggtcacctgggccaaggatgggtccagtgtcaccggctacaacaagacgcgcttcctgctgagcaacctcctcatcgacaccaccagcgaggaggactcaggcacctaccgctgcatggccgacaatggggttgggcagcccggggcagcggtcatcctctacaatgtccaggtgtttggtgagtgtctgctgtggactgtcttctgcttggccttctctctggtctgtgcagcctttctagaaatgtaacccaggctcacaaagggttagcatcttgtgaaaggccacatgctgagtgaggaacaggcatgctgaagagtcagggctcttcggatcccagagtaagagcacgcagtcctggagcc

SEQ ID NO: 30224 - DNA, 2300 bp, Homo sapien
agggagcctgacttgaatgtcccagtgaggttggtgtcccatagccaggggggccagtccgaggctgtgccaccctaaccccaacctggcttatcgtccttccccttctcctgccctcttgggctcagcgctgctttctttgtaaaccatagcccactcgtagcccgaggctgagatgccggtctttataccagctaccttctccagcaggtcacaaattcctctgacgattggaccatctctggcattccagccaaccagcaccgcctgaccctcaccagacttgaccccgggagcttgtatgaagtggagatggcagcttacaactgtgcgggagagggccagacagccatggtcaccttccgaactggtgagagtcaaacattgccccttgcttagggtttccgtgggtctaagcaagttccactggcccaggtgagaattcctgctcaccttgccccagctgttcaccttgaacttcatctttccttccagctactgcctccttgtggtttgtgtgctaggctgaggtcccagctctcatcaggagagtagccagccggcctctctggcaccccttcatccctctctcacacaggggccagcaatagtaccacaacagaaccagtctcggccgaggctgagcccacaccctcagtgccccggatgcttatttgcatcactttgtcatgccgcttagcagagtctcaggcaaaaaggactctgtgggagggagatctcatgcctgcttcctcccttgctgactacaacccatttccacccaggacggcggcccaaacccgagatcatggccagcaaagagcagcagatccagagagacgaccctggagccagtccccagagcagcagccagccagaccacggccgcctctcccgtaagccgctagcagcagggacggacgcgcagtcaggactggaactgcctcagaggcctgttcccatggctgaatggggtcttgcttctgtaggtccagggtttttatgacatctcccagttaaccacaatgaggaaatgtagtttggagctttttaaataaaaggctggcattgatgctgggattgctcactgggtgcatccagagagcagcagaggccagagctgtggtccttgggcctccacactctggctttgcagaaggatagcataaggggtcttagctcaaagcccaggcagccgtggggaggtctgatgtgaacaccagtgggtggagggctgtggggaggagcgggcccgtcaggagcaggccaggcccagtgggcatacagcgtcatctcaccctgcttccttcctcacgtcatctcaccctgcttccttcctcactggatacggtctttcccagccccagaagctcccgacaggcccaccatctccacggcctccgagacctcagtgtacgtgacctggattccccgtgggaatggtgggttcccaatccagtccttccgtgtggagtacaagaagctaaagaaagtgggagactggattctggccaccagcgccatccccccatcgcggctgtccgtggagatcacgggcctagagaaaggtaggggcctggccacaccgtggccttggcctgatcccccagctgcccctttccgcctggaggaggatgacgagcctgggatccccttctctcggcccaggcccccacccaccagcatgcctccatgttgctgtctgtggtgtttaccacagtcctaaagccttctgcctccctccagaagagcatccagagccatctcccctgcagctcagctctgacagtggcgggtgttcttgtgaggcctttgagaacttgctttggggaagggctgcccagaagacccctccaggtcctgggccttgaaaggccatgggagaatcagaaggtatttcccagctcctgagttcagtgagtgtccctctcaccaggcacctcctacaagtttcgagtccgggctctgaacatgctgggggagagcgagcccagcgccccctctcggccctacgtggtgtcgggctacagcggtcgcgtgtacgagaggcccgtggcaggtccttatatcaccttcacggatgcggtcaatgagaccaccatcatgctcaagtggatggtaagcgggcctggccgtggactgcagtggaagacggcctcccctaaatgcccttccctgtgagcctggggattagactcccccgaacagggcacctgaaagcttcatcagtggaatttgggaggctcttagtggctggagctgctctagtggtctcctgttgattctggtgccttgacctg

SEQ ID NO: 30225 - DNA, 2300 bp, Homo sapien
cttggcatctaactgaagtcatcgtaaaggggaagtggaggagcagcttttagatgatggatggaacatagataatggatggaacatagctaagaattttccagagaaacagggcaccctctgcttttcacaccatcctttttctctaatatgtggtttgttccattagtagaagtgtttatggtgattactgggtttgagattgttctggagctggaatggcgactattcttatttctaggaaattcaggaccagactagggcctgttgggcaggatgttctttgaatatgaaagaataacctttcttggatagataactctctgctgtcagccatgtagattccctttcctcagtgtgtctttccagcttcaccctgtggtgatgccctcagtagcttcccagccttattcttcaccattatctcttctttgtccagccctgttttctcactgttcttgcctctctccactccaccttttcctcccacaccattctgagttttgcatctgtgctttttcctttgctgtttccttctaccagtaatgacttccttccaccagtaatgacttccttccagagttgagttatcattcaaagcatggctcagttccaaaccctctccagcattttccgcccacattacttatgctgtccttgtttctaaactccagttgcacctgtaataagcatctcatgttttacactaattttccttgctgtttcatgggtattagtattgtcttgaaaattaaattacacaattcttgagcaaagggccacatatacttctgattcctccacatagtctaggacaatgtcaaacatataatagatattcagtcaaaagttttgattgatttaattgtaactaatttattaatttagcaaatatttattggatgttctgtatgcagggacactgatagataggattagggatacaacaattcttaagaaagacatgttctctatcttcacaaagcttataggctattgggattggagagaataaaacaagtgtaatccttacagacttggagacctatgtggtcctccaaataaatgcaggaataattcaagtttgttaaacaagctttaaaggggagcccaaacatatagtctatagagatggttacttaaaagtttaattttttcttctctctctgttttttttttttttttttttttttttttttttaagctctctaaatttctctggtagtttcactgctccaaacccacagatctctttctctcctcagccccagtctgggtcctcacttactataggcttttgacagttgaggccacctatcatgtacaaactaattaaaaacatagaatggtttgtctcttcctattgttccagtttcctcaggagaatcagcccttggggctctctcttgacctcttcatctcctttgtgatactgggggggaaagctgggggaaagctgtaccaaaatcagaacaaaactgaggacttaaaattagtaggaccataatggattaaagtctggaccaggacttgggatacttcggctcttatcaggaaaagtaactttgaccttaatttcttcaatcttagaaagagattgaacaggttttttgtggctccatgattattttatctatttaaaaatatttaccattctgtggttttgaaaattttcaacataagaagttgggaaacgtatttatttgtgcttactatataaaagggattgtagagatactatggagaataaagaggagacagatagaaacactacccactcagagagctcataagctacacagtaaagcaagaagggcattcttgattgatggcttagttaatggtgaagaaataggtggaaggacttctagttacacaattcctaccacttaataaattaatttatgtaaacttaatgccattaatgaatttatttttgtgactatacacacacacacaattctccatccataagggcataataaaaaatgacttcatacaaattagtactgttagatagtttaaaaatgcatttatctagtcttctaacgtatccgcaaatattttttccatctcagatcaaagaactggttgtcactttcgatgcagaactccgtctccttagacatcagaaactaaaactagatactcagatgaaattatctgacctgcaccatgtcaccttatttcaagaaatacttctcctgaagaattttgaaaaacaggagaacatacttcaagaacgtgttaattccttagacaaagaggaacagtacatgcaagtatgagtgggcagaaga

SEQ ID NO: 30226 - DNA, 2300 bp, Homo sapien
gccattactgtggcagacaccgtactataagctgtggtatcaccattatctcatttgaatctcatagtagacctatcagttagaggtatgtaaatgcttcctcctctcccagcacctttacagatgaggatgctgagccctagaggtgaagaaagttgtctaatgacagagtgcttgtaagaggtaaagccaagacttgaagctctttcttgcagttactggatttctcctaatttacgggaactaatacagtacagtagctaaggatgcaagtactgaaaccagaaatcttgcctcaaatgccatttctgccacttgagctgtgtactttggacaaattaatctaatctttcccatttgaaagtcagacataatgtcttccctagaggcttgtgaggattaagtgaggcaagtgtatgtaaatgggctgagatcagagcttggctcacaacactcagtaatgatcactgccaattttttttggtatataaataaataaatacactatttcccccatgtttccaatttttaagacattgtatagtgaatttattgtatctttctcagattaacaattgcacacagtgcttgaaatttagaggtatttcacctgaaaagatgtctagagattgaaagaaaacatgctgggcatatgatttgaaaatataaataacatgctatttaaaaataagtttaccctatgttttctatcttttctggcacctagatataccatttaataagtaatagcaaggataatcatttttttaagccctggaaaatcttgattaaagaggacatttcagtattgcaaataaatgcatggtatttgtgtaacattgtggaaactaataaacacaaattgtattatagcaattttttcttgccaattttattgacaaataatttatatacaataaatgacatccatttaaagagaacagtttattggcttttggcagttgtatatacccatgaaattaccaccacaatgaagacacagcatttctatcatttctaagattccttgtgtctctttccagtgcatctcactaagtcctaggcaaccactttgcccaagtctctagactatcttggatgtggaatgactttgtgtatgtttaacttttgaagaaacctctcaaatagttttccaaagtggttatgccattttacattcccaacagcagtgtatgcgagttccagttgctccatatccttctgcatttggtgttagcaatctttgaagttttaccccttcacgtggatgtggagttatgtgtattgtggtttctatttcccttatgactacttttaagcatctatccatgtgcttattggccatacatatatctgatttggtgaagtattcaaatcctttgcccatttaagaaattgggtggttttttcttattgaattataagagttctttatacattctgtatacaaagtcctttgtcacatattggaatgaccattttaaaacaagtatttggtaactaataacgttaggctaggtactttaaaaaacaatatgaccacagtactacagagaggttgaacaaactgctaaacctagaaatctgtcaagggaggcctatacttttgtgcccagagcgctgcgaccaagaaacccacaacataaaacctgatttactcttaaaagccaacagagataatatagttttaaaaataacaaaaatcccacgatgtatctttgttgttgatgttgccggcaagctgcctactatctcccaggacccctcttaaaatcgaagttaaaacctcaacataggaacgccgcgatcagggctccgttgggccattttggaatatcaggcaggtatcttcgacggtattcatgtcatttaattatctacatgacgtcctttaggggataataaactcgtcgggcttttctgtttggctttgaaccagtgtcatgaggcggagaaggcccgaccaaagggcggataggtaccgggttcccggagagctggacgccggccgcgcatgcgccccacggcccgccctggttccgcctccctggaagaggggtggcgttgtctcggtaaccggagtaaacggaggcctccggcagacgctgtgaagagaggagccgcggcggtcagtaccttcggtgagtttggacctcagcagccggcagtttccacaccctcccccttaaatctgtggctcagagggcagtgaaccccacttgggcttctctcaggctggaccagtgttatagccttcgtcctccctgcggtagctcagcaaacttttgaagccacgagta

SEQ ID NO: 30227 - DNA, 2300 bp, Homo sapien
ctggtgaatttttgtattttttgtagaggcggggtttcgccatgttggccaggctggtctcgaactcctgaccacaagtgatctgtttgcctcggcctcccaaagtgctggaattacaggcatgagccactgcatctggccagaaataatgttttaaaggattattaaagccagactttaatatacatattaatcatctggggatcttgctgaaatgtggtttctgattgagtaggtctagggtaggacctgtgcatttctaataagttcccaagtgatgccagtgctgctagtctgaggaccacgctttgagtagcaaaggtctgcattttatagtgcaggagttttgtaagttaaataaactttgtgggctaacctggtaacttaaaccttcatttcgttgtttctgggggagatagggagtctaaattccagctagggagggtttataaaagagctccaaatgctggttccagtgatggtagacactttcttttaccccttctagagccaaggccgctcctgtcaagtttctgataggaggagctgggcactgtcactggggattagaagctcgtgaggtggctgtgttcataagggctttaacaacagtgggttggagggctttggtgaggaaggttagggtgaggtgagtcatagggtaagggccatctctgtcagcactgggtcatggggaataaggacaatatgggtattgaatcatagaagtagacagaaggaactggcagaagaggagccagaaaggaatattgctagtagggagcagccagccattggtagtggtgtatataagtaaatatcaactgcctcaattttgagtcactgggaggcatttatatatttgtagttttgaagattattcataacaggcaactcttggtttaaaaaagacagcagagtctaatgttttgcttgcctccttttctaattagtatgtagatcaagctggaagggactatctaatatttctgtcttcactaccctcttttgttttaattggaaatacaaaatgatctttaattcatactgattttcctatttatttatttatttattactaatagacataagctaaaaatcagtgatttttattagggattatttttttccaaagagaaatgaaataactaggactgaaataatgacataattaggaataatgaaataattaggaatgacataagcacatttggggggggaattttcaaattaaatttatgctatattttttgggcggctattttttaccctacctctcatatttctttccaatcaccaactattcttgaatcagataccttaggccaaaagtggcttggggaggctgacatatggttagaaggagtgacaagattcccagaatctttgccaaatggtgcatatttgaagcctgtaattatagaaacttctgtttccaagatagcagatcctcttttgtaatctgtcaaactgcagatctgtcttcaaagatgtgtggcatttacttagagaccagctcacttggagcagtctctttgctcatgtgatcttttgtgcagctctgcagatactaagagatacagaaaagcttttcccagaatatatgcttaaagggactgtaaattctattgtgtgctcactattcacatttatatataataagggctatgaatactaacttgctggccattagtaagtcaaaattgtgtgagatcgaggtgggtggatcacgaggtcaggagatggagaccatcctggctaacacggtgaaaccccgtctctgctaaaaatacaaaaaattagctgggcgtggtggcaggtgcctgtagtcccagctactcgggagactgaggcaggagaatggcgtgaacccgggaggcagatgttgcagtgagccgagatagcgccactgcactccagcctgggcaacagagtgagactctgcctaaaaaaaaaaaaaaaatcgtgggagagatttttcagtattcagtattcaatttgtactttttttttttttctcccaaagacttttccagtagcacagtctctaacaccaggtagtatggaggaacggattgcagaattgaatcgacaaagtatggaggctcgtggaaaactactgcagttgatagagcagcagaaacttgttggtttgaatctttctccaccaatgtcacctgttcagttacctctcagagcatggactggttggtcacaaattcatgatttaaaaactagaaatatgaaggttttcagttttcttgattttgcaagtttatattaagccaaaagaagtatca

SEQ ID NO: 30228 - DNA, 2300 bp, Homo sapien
gggccttgcctccttccgcagtgtttgtgtccctgggtacttgagattagggagtggtgatgactcttaacgagtatgctgctttcaagcatctgtttaacaaagcacatcttgcactgcccttaatccgtttaacccttagtggacacagcacgtatttcagagagcagggggttgggggtaaggttatagattaacagcatcccaaggcagaagaatttttcttagtacagaacaaaatggagtctcctatgtctacttctttctacacagacacagtaacaatctgatctctctttcttttccccacatttcccccttttctattcgacaaaaccgccatcgtcatcatggcccgttctcaatgagctgttgggtacacctcccagacggggtggcggccgggcagaggggctcctcacttcccagacggggcggccgggcagaggcgctcttcacctctcagacggggcagcggggcagagacgctccccacatcccagacgatgggcggccaggcagagatgctcctcacttcctagacgggatgatggccgggaagaggtgctcctcacttcccagactgggcggccgggcagaggggctccttacatcccagacgacgggcggccaggcagagacgctcctcacttcctagacggggtggcggccgggcagaggctgcaatctcggcactttgggaggccaaggcaggtggctgggaggtggaggttgtagcgagccgaaatcacgccactgcactccagcctgggcaacattgagcactgagtgagcgagactccgtctgcaatcccggcacctcgggaggccaaggctggcagatcactcgcggtcaggagctggagaccagcccggccaacacggcgaaaccccgtctccaccaaaaaatacgaaaaccagtcaggtgtggtggcgcgtgcctgcaatcccaggcacttggcaggctgaggcaggagaatcaggcagggaggttgcagtgagtcgagatggcggcagtacagtccagcctcggctgggcatcagagggagacgtgcaaagaggagagggagacgggagagggagacgggagagggagacgggagagggagacgggagagggagacgggagagggagccagaattattgttaattcttgttattgcctgtggaaaaagtcagaaagatttatgttggtgagaccaaagatttatgtaatatcttcctgagtctcagctcttgtaactcttttaaaatactatggaatgtgactatgttgtgataatgcatgacctgtgaagttccttgttttgtaatgagccttatatatggaggtcagtgcattaatatgacccattttagccattttgttacttgtgatgaccattaaaaagctatccataacaaataatgaaaaattctaccagcctaggcagcatggtgaaccccgtctttacaacgaatacaaaaaattagctgggtgtgatggtgcatgcctatagtcccagctactcgggaggctgaggtgggaagatcactggagcctgggaggtcgaggcttcagtgagccaagatcgctccactgcacttcagcctgggtgacagagtgagactctgtgtgaaaaaaaggaaaaatggaaaagacaaactctggaatgccacataggattttttaggagtccctaactggctcgcttttcatggctttgaggccttagtgattttctcaaaaatagtaacttctcagtactagccccccaggagcctgcccatgaatgattggcagaggaggatacagcctagaaagtgaaggctccaggagctatgttgattcatgtggattttgcactctactgagatgcatttaagaataaatacctgaaatgtgctcatagtttctttttgttcctattgtactaatatcctctcatcttcttcagagcgtccagttgtaaatgccaatgtctcagtgccattgatgttcagagaggaagtggctgaattcccacaggaagagttgcccgttaaactgtctcaggtgccagaccctccagataacatgaatctggccaagaattttccagcacatatttttgagccagctgtgttgttaacaccacccaggcagaagagcaacttaaaattctctcctcttcaggacggtaagtcttcttctaaagttacatgaaagttgttttttaatgtttcatttgtgcaatgtattactttcaccattacatgaaaaacagaattgaaaaagacactgattaccacacatagcctttaagctgaaggaagaat

SEQ ID NO: 30229 - DNA, 2300 bp, Homo sapien
taatattaaatattactgtttgacagttgtagattaaatagaactgttaactgtgtctgcattctattgctattctctgcttcctactcccacattcagtttggagagtggcattgcctataatcggtagacttgatatgtgggagaattcttcatgttccctgtatgtctggtaactcacatatggcttcaatgtctaagtgggagatgttttattgttgtaaaaataatttataaaataagcaagaattctttgtttggctgggtgtggtggctcacgcctataacctataatcccagccctttggaaggccgaggcgggcagattgcctgaggtcaggagtttaagaccagcctggcctcaacgtggtaaaaccttgtctctactaaaaatacaaaaattagtcgggcatggtggcgggcgcctgtaatcccagcttctggggaggctgaggcaggagaattactttcaccagggagttggaggttgcagtgagccgagatcgcgccactgcactccagcctgggcggcagagcaagacactgtctcaaaaaataaaaataaaaaaagaattgtttgtttaatttgatttcaaataatcatccacagaatgccacagaattagagttagctatgtgtttcatctttgaaaatctatttaaactgttatgtacttaagcctgttatacaaatatgacaaaaatgtttaaggaaactttattatttaataagatagatttaccaccttaatacagatgttttagtttctctagagccgtcttcctaaaattgaattgctttttttttgagacagggtctcattctgttgcccaggctagggtgcagtagtggcatgatctcggctcactgcaacctccacctcccgggtttaagtggttttccagcctcagcctcccaagtagctgggaccacaggtgcatgccaccacacccagctaatttttgtattttttttgtagagacagagtctcactatgttgcccaggctggtctcgaaatcctgagttcaaagcgatctgcccaccttggcttcccaaggtgttggtattataggcgtgagcctctgcacctgaccctaaaattaactttttaatgacagattcattgtattgtcagacctattaaaaccttaacattctttcacccttaactcaggaatcttcaggagtatacttttggctcttggagagtattgcaggcttagaagcatgtacttttttttttttttttgagacagagtctcgctctgttgctaggctggagtgcagtggcatgatcttggctcactgcaacctctgcctcctgggttcaagagattcttctgcctcagcctcttgagtatctgggactacaggcgtgcaccaccacgcccagttaattttcgtatttttagtagagacggggtttcattcaccatgttggccaggatggtctcgatctcttgaccttgtaatctgcctgccttggcctcccaatgtgctgggattacaggtgtgagccaccacgcccgaccagaagcgtgtacttttaagctaatcacttgttttacaaagttaaaccatttaaagttgtagtcatttactttaaattatattttaacaagcttaatttttgaattggcaatatagtcacatattatgaaattcaaagataacagcagattgtactaactctcatgactaacttccagctagcctgtttgcttatttatagccaactatcattccagataccagtgtatctttctagagatggtcagtgtatattcaaataatatgtatatgtatatccctctactttctttttacaaaaaatgtagttacttaattttatatagcatttagttcattttattctatttaaagaagggaagaggataaagaagcacattttctttaattaaatataataaaccttttaataaaactcttcatcattactgtcacataatatatgcttctttgtaaatatcttctttgccagctttgagtgcaaacttttagttttcaacatgtgatgctattggtggaagtttatttgatatttttttgtagagtgagatccagctacgtaaagaagtagagacaaggcaacaactggaacaagtattaggtgatcatcgagagctcattgatgctctgacagctgaaattcttcgtcttagagaagaaaacgctgctacacaggtactcagatgagatcccaatttttatgtgttcagtggtataaaacatctttaaacatgtactggattctcttagagttgcttttggtttaac

SEQ ID NO: 30230 - DNA, 2300 bp, Homo sapien
atctttgatcactcaaaccatttttcccaagggcagggactaaacaggggtttccagtcttttggcttccctggggcacattggaagaagaagaattgtcttgggccacacataaaataaactaacattaatgatagctgatgagctaaaaaaaaaaaaaaaaaaaaaaaagttgtaaaaaaaaaatctcataatgttttaagaaagtttacaaatttgtgttaggccacattcaaagccatcctgagccacaggttggacaagcttggactagcagaaggtgacagataatggtttttacatgagacctcattataatcaatatcaggtctcaatatggttataagattataatcttcatgtgtcaattccatctctttattttgataggtcaatgcttttaaaaaatagtaaactcttaaaattattattaggaaataagctttgtgtaatttttctggtatagtgaaagattatactcattcattcacattctttcctaagctcataattccttgtacttgcaagacggctaagtaagaatagaaatttggtttgtgggataatataatttaagttatagcaaaattctgaaacatctctagagtggtatataggttttcagtgtttccatatccatctaccacccctgtggggctggggaagggttgttgactgggactggactctcagtcttctgggtctgatgtgctcttgacctgataccattccaaagcttactctttgtagaaggaataaattcagggctttcttctcactgagtcagccaacctgcttggctatagccggggaagaaggggaaaaattaagaatgtgactcttgctatttttctttctgtgtcttaaaacaataactgaggtcacattgtgtatgtatttgattctgtagtatagagaaattctggtaagagtatttgttatcagatattttatcaatttgagtcaagtgttggaaactgagcagtttccaggtactttttaacttgagaatgccatctggtggtggtgccgagagaattatctggcttttactctagcctgtggccttacttttaattatgaaagttcctaagttgaaagtgcataatccagaggcactactgtaatgttactttttgtgttcttacctctccagggtaaaaaactgatttgtttttaaacacagaggcctcacattttttgtttaatgctaaaactcatatcttatgtcatgtttttaaagttgtaggtcatgacttgacacattagtggattacattagtggattctgaattcactctagtggttgaaacacctctaagtttatggctcaaagattcatatctttcatctgtgtttttcaaactatggattataatttgttaatgaattgtgaagtgagttgctgccaacatttaaaaaatagaatagaaattaacaagaaaatatcagtggttctcatggagcaaggttaattaaaacttttattttaattaactttttatttaattaaaacttttattttgtatatgtgtatgtaaatgtggtgggtcacaattgtgaatatttcttttttttttttttgagacggagtctcgctctgtcgcccaggctggagtgcagtggcgggatctcggctcactgcaagctccgcctcccgggttcacgccattctcctgcctcagcctcccaagtagctgggactacaggcgcccgctaccacgcccggctaattttttgtatttttagtagagacggggtttcaccgttttagccgggatggtctcgatctcctgacctcgtgatccgcccgcctcggcctcccaaagtgctgggattacaggcgtgagccaccgcgcccggccaattgtgaatatttcttactttggatttcagtcaggtattggaaagccactaattattgtcttagccccatctactggttcttaaggatattgctactgaaggtttttaggaaggtagcctatggttattttcatgctccaggcctttttatggtcttttcctttgcgatttgaaaagtaaatataatctgaataataatatttgtcattaacacatgtctagattctttctgatcaataccagatgcaagatgtgttggagaaatctgatcatctaatagctgcagcaaaagagctgtttcctcgtaggcgcacaggtattcaattcaaacaaaagcttctctattttattaactgtagcccacagttgactatttggaagaatttaaagtcctttcttaggcatcatattatttatattacaagtattgtagg

SEQ ID NO: 30231 - DNA, 2300 bp, Homo sapien
tttgaactgttattctgtcttcttgcttgttttgattctaatgagaaactgatgtaatccttagttttgttctgctgtatacgacatgtatttttttccttggatgcttttaagattcttttatcactcgttctgagcaatttgattatgaagtattttgattagctttcttcatatttcttatgctgagcttctgaaggcaggtctgtgggtaaagatagtgacagaaggattaaaataatgatgggagcttagggaagttctcttttgaataattcagtgtaatcaatgcagtaggaagcaaggtcattgtgtgagaatgaggataggagacaaggcattgggtatgaatgaaggtataaaactaatatgtaggaaaatcaatgaacagggacctgtaatgagatgttcaagcatctttaaggtcctacttaacatcagtaatcatgaatttaaagtcagcatgattgggtgttttttttcagattcagctgcatgggtgcaagcacttagtaagtgtaaagtagggatggctaatatggtcattttgccaagtgattacagcaatttagagaggggcagggagttgaggatgcaagcaagtggatgattgttgattattaaatatatctacatcaaacttcctcaatcagagtgaaaactattaaaggcagtacctttcctctagaaggttttgggcatgtatttgcagaccacacatgggtgtattgtaacagcagaaagcaaggggctagaggaaattgtcttaccagagcaaataaactctgtttttgaatcaagtgctttgtaaagttcttaacgtggtccacgcagctctgactgtcgtggatccagcctatcagggcgcctccccttcacagcaagttcccactgttctctaaacttcagacacactggacctcttcctgtcccttgcattttccacatctttgcacatgcagctccctctgcaggaatgctttccccttccccactggcctattcatgtctgagctttcctgagtaattcaaatattactataataataagctaagtatttggttagagtgcttccttcttagcactcgtcataattttaatgtttttgtcattgataactgtctgttaatatgctgtaagtttcccaccttgcctgtttttagccccatagaacctagctctcccgcacatttgtaggttgtaataaacaacttttttttttttttttgagacaaggtcttgctttgtcgtccaggctggagtgaagtggtatgactgtggctcactacagctttgccctccttggctcaagcgatcctcgcacctcagcttcctgagtagctggaactacaggcgtgttcccacgcccagctaattttttaatttttcgtagagacggggtttcgccatcttgcccatgcttgtctcaaactcctgagcttaagcaatccttctgcttctgtctccaaaagtgctgggattccactactaaagatttgtaaacaaatgaatagagatgaaagcaaattaagtgatatgtgaagtctggtgaggagagcaacatctttcttttggagaattctcgaggcaccggctaatgctatatgcctattcttttttttttttttttttttttgagacggagtctcgctctttcgcccaggccggactgcagtggcgccatgtcggctcactgcaacctccacctcccaggttcacgccattctcctgcctcagcctcccgagtagctgggactacaggcgcccgccacctggcccgggtaattttttgtatttttagtagagacggggtttcaccgtgttagccaggatggtctcgatctcctgacctcgtgatccgcctgcctcggcctcccaaagtgctgggattacaggcgtcagccaccgcgcccggcctgctatatacctattctttaataatttgccctgaaccttgcagaggaacctctctcccttagactcaggacccgagataggctttgggaggcgcctgcgcactgggctcgccggatatacgcaagggcgtggggcggagctctggtaacccaggcaacagcccggaagccgctggctgggttaacctgtggcgcgctccgcggttccggcgcctgaagttttagctgcggtggcggcggcagtcgggaccgactgcaaggcaggttgagatgatggatctgaggcttgcagctcgcagtcccaacgagccttagggaccagggctaccaaaagggtggggagaacggtggtggcatctgtctgttgcctgggatccaggcgc

SEQ ID NO: 30232 - DNA, 2300 bp, Homo sapien
cactgaatgacttttggctagaataaggattagataatattacagagtgacttgtaatatataactcaaattgttaggtatagataatccatacaaatggctttaaaataaatattttgggtttcatgctatgatgaaggatctgttccatttgcttccaatttagttgcgtaaagttgagataaaatcttgaaggaagggtcatagcaccatttaaatacccacaggtctgtcatgtggaagaagtattaggtttattcctatgactccagagggcagaactagtacaagtgagtagaagacaggcagatttcaactaagaatatgaaatgtctttctaataatgagacacttgcccccaaaagaaggtgttgacttgtgaaagaaccagttcctcatctcttatagtgtttaaaaagaacgccataatagaactccataatcctagagactcctttaactggtcacaccagctaacctccaggaccttcgtagatttcaagtttatgaaatgttgttgaactttgaaaagaggcacagatattttgaatacaacagtttaaagtcattcaaattctggatgaaattatttcgttatgctcctcaaaaacagtgagttctatttgaagttttacccccagactctcctttgaattagtatttttgcccatatacccatatattttcaagaaatttctttctttccttccttccttccttccttcctttcttccttccttcttccttccttcctttcttccttttgagatagggtcctgctctgtcatccaagctggggtgcagtggggtgttcacggctcattgcagcctcgacctcccggactcaagcagtcctcccaactcaactcccaagtagctaggacgacaggcatgcaccaccacgcccagctatttttgtattttttgtagagatggggtttcatcatgttgcccagacttgtcatgaacacatggcctcaagctagcccacctcccacttcagcctcccaaagtgctgggattacaggcatgagccactgcacctggccaagaacattcaaaactttaaaactgaaaattgtcctaataaggagtctactaacttaatcttccatcagcattgttttctgatttcacagaaaactttacaacaaatgtattgcattcattcttgatgttttaagaaattaaaggaattagacaaggtaaaaacaaaaacaaatctatctctttaaagatggcaaggactaggattttaatctgtaatcttaaatttttgaaaaagatcttttccttcttaatgacttctttttaaatggtccttcaggttgaacacaattacattcttttatagtatacagtaatgaagctgaaataaaacagtgagttctcttccacacgtaaattgtgattgttcaatgttctgcaaggtcttctgatggccccattctcaccctgctccttacctgcctctttaactctttaaatctaatcccctaatttttatcagaaaagtatttcctttttacgataggctgtggtttctgcctttaaaaaaacaatcctggggtttctctcagaatctggaagaagtcattgcaatggtaaagtaggtaagaggctggggtggaaagaaatgccttctgcataaatctagttagtctgagtcgttttttgacaacttccgggaccagacttcaggcagtgctggaaattgttctctttaccatatctttttttttttaactgtacatatttacatacatacacatatggtgagggagagaacgtgatgacgtgagactctccatggagagtaggaggtaataaagaaataaaacaggtgtctgaggagaggttctattagagaggggagaatagagagtaattatcgttcagacaggcaagagttctctgcaggtagcagcctgggaaagcgaactcgcgcaccctcttgggggacgggctcttttgctttctatttcttctcctgcagccagggtgcacacgtatttgaaacagaccgaatttcctcctcgatgtggcgtcaggttgacttttcgagactagcgggtatttctttttaatgactccaatgcctttttattattgctgttattgaggttgagggagaagagatcggtctaaattctggctgggtaagtggggggattctcggcgatgagaaacgggggacttagaagccggaggaaaatcagcagccccacatctccacttctccagtccgccctactctccacccgtgacctccagtggagaccccaggcggcagcatcagt

SEQ ID NO: 30233 - DNA, 2300 bp, Homo sapien
attaatttatcgaatcagagttactaatatttaacaggtgcctgctgtgtgccaggctctgtgctctaattaacttcttcttgatgtttgtttacaaactccttttagtgtcatactcttccatttactaaaagaaaacagcatatgatacatttgaaagaaagcatggttccatttgcctttcatggcaggcgctctaagtagattatctcatctgatgcccctcaacagtgggtactgttattatcaccaagtgacagttaaggaaattgaggcacagagggattaagcaattttacgaagaattcacagccagtaaatgaaggagccaggatttgaactcaggcagtctggatccagagccttaggcctaaagcaggctgatcaaaatgggtctagagtggtcaggccctatgagagatgacagtgctgaccaagaatgccagaccaaaagcctggcaccccagcaaggatctaagttgaaaaggggtccaaaacacttccagttttgccttggatgagttccaatatcatggaaagaagttcctctgttatgcctgtcataggaagactgtctctaatcctgatgttttagattttagaaaacaggagtgttcctcattagttagctagtatagttaacatacaaacagacaagttaagctaatagctggttatcaatcgctctaaagttgttatttagccaactaagccaagcacagtttttctaagctgtggtataaggctctatggaaacttctagccacagattattttgctatggtcaaatgcacagcatagatttctccaaatatagacaaagtggaaatagaaatctggagatgtaagaactatttggcattctaaatagaagaatagactgaggaaaaaaatgctaataggagaacttttccttcattaactaagcaaaataaaaagttttctgtaaaaaccatatgaagctactcatctcagcataatgccagttacttgatgagtcccttaaaccctattacgaatacctatggggtttgtagtacgtgctatgagatcaggataaaaaacattgatcagagacatggcccttgccatcagggaggtaagaatccaaagtgtcttcatactgtattagcctgaaactaaacactattcccttcccatcctccagcctcagtccattcaacatgcgtttatgaagccccccacgatgaatgtgcaggccctgggtcaagcactgcatacctgttctcttatttgttcttcacaatcacattgccagacattgaatccaaactgcccaatccagaatactcatccttccctttgattcttgtattcgttatctattaccacaataatgctacattaaaaaaaaaaaaaaaaacttcagtggcacacagcaatacatgtttaagtttgctcacaaatctatgggtcagctggatggttccgctaatctgggctgggctgagagatcccaggtgggtgtgatgagagagtgtggtccactgacagatcaactaagagctagctcttctgggctggcctcagctgcacttgtctgtcatcctgaagcaggctagctggggcttatttgtttccaagacagacagcagaagagtgcaaggcctcttgaagatgcagattcggaattagcacaatgttacttccccctcattcaattggccaaaataagtcatgagggtagtctagattcaggaaatgaagatgtagactctacctttggttgaaagagctggatataaggtgaggtgcagccattttgcaatcaatctagcacagtcctcatttgctattttttcctttattcactagataccacctgccttatcctagctttgtaaatcatttaactcatctaatgaaaaattttgtcagttccagaatctagtgcaaacttgggtaaagtctgtgaatacaaacacataatcaaaacatatcatcttctatgagtacatacaattgctttccagtcaattgttaactaaaattattaaaaaggaacttcaccacagcctcttttgccagctatgagagtcaggccaaattataacttctctcccttttttttttttttttttttttgagacagtctctcgccctgtcatccaggctggagtgcagtggcacgatctcagctcactgtaacctctgcctcctgggttcaagcaattctcctgtcgcagcctcccccgtagctgggactacaggcacgtgccaccatgactggctaatttttgtatttttagtagagacagggtttcaccatattggtcaga

SEQ ID NO: 30234 - DNA, 2300 bp, Homo sapien
gccaacatggcgaaaccccatctcttctaaaaatacaaaaaattagccgggtatggtggtgcgtgcctgtaatcccagctactcaggaggctgaggcaggagaatcgcttgatgcagttaagcgagatcgtgccattgcactccagctggggtgacagagtgaggctccatctcaaaaaaaaaaaagaaaaaaaaaaagaaagagatgtgtttaccataacttactaagaaagactaattaggtgtcattgaaaaggatgctaggccaggcgtgatggctcatgcctgtaattctaacactttggtagaccaaggcaggaggatattttgagcccaggagttcaaaaccagcgtgggcaacatagggagaccccgcctctacaagtaataaaaaaaaattagccaggcatggtagtgcatgtctatggttccagctactctggaggctgaggtggaaggattgcttgagcctgggaagtcaagactgcagtgagctgtgattgtgccactgcactccagcctgggcaatggaacaacaccttgtctcaaaaaaaaaaaaaaaaaaaaaggaagaagaaaagaaaaaaggagaaaagaaagaaaaaaggatgctcttactgctagatcataaagcaaaaaatatatatattttgcaaaacacgtcacacccatgctactgaaagatcatctacttagaagcactggaatcctttgttaaaaaggaatgttttagaaaactttgtaatagaaaatagccaatactaatgtttccacttacagagtcttatagaaattatttgtataatgtctcctatcctttgaccccttttaaatttgtaacacttaagcctggaacatttcacagttgattgagaagctgtcagttgctttgtttctttgatgggaaagatccaacatagccaaagtggagagtctagatcccagatcccagatcccatagagaaaaccaaaccagtactctttcttatctattttaagtcatagctaatagctgtttctattccaaaaaggcccagtagtcatccaaaaaggtgttttaaggttctttaatctgcctagaaaggcctcatttgcccatttgccataaagaggcagctttctaataacttgtttgttagtggattctttaaatttgattatcattaaaatctctagtgattacttgaactgtaatagaatgatggcctagtagtaatgaaatattagcaattcctatttgtttttaatttgaaagtaattattatcaatgatggtctttaaaattttaaggtctggtgcagtgactcaggtctgtaatcccagcattttgggagactgaggtgggcagatagcttgagctcaggagtttgagaccatcctaggcaacatggcaagaccctgtccctactaaaaatacaaaaaaaaatagttgggcatggtgctgcatgcctgtggtcccagctattcgggaggcctgagcccagggaaggggctgagggcaggagattgcagtgagctgagattgcactgctgcactccagcctgggggaccctgtctcaaaaaaaagcaaaatgctaataaaagtattgcttatgtagattgctgtaacactagatttaaaaaatgacatcttagacattttacttattatagttatttatagtagataatgtttgataagcccttccccttccccttccgctccccttcccccttccctttttttttattttcagacagagtctcgttctgtcacgcagggtggagagcagcagcatgatctcagcgcactgcagcctccatctcccgggtttcaagcaattctcctgcctcagcctcccaagtagctgggactacaggcgtgtgccaccacgcccagctactttttgtatttttagtagagatggggttttgccatgttggccaggctggtctcgaactcctgacctcaggtgatccacccgccttggcctcccaaaatgctgggtttgcaggtgtgaaccatcacgcctggccattgataagcatttcttagggatttctttacctaaaacttctttaccgtggttgaatgagggcactttgactaagtagtgtaaggtttgataaacgaattttctcccatctagtggagaggcatagaaagaagaaaattaatgctgggataaacagaataggagagctgatcccatgttctcctgccctgaagcaggtaagaagtctactcatatcttcattcattacttatgaacagacaattccctaagttgttttggtgcttagaatgattatttttgtt

SEQ ID NO: 30235 - DNA, 2300 bp, Homo sapien
gtttgaaaataggactggtgtgattatctgaaactgatgttgaatgggtaaagccaaaaaaaaaaaagatctctgggcttcagcccaggagttgaagatcagcctgggcaacataatgtgacccccatctctatccaaaagaaaaaaataattgccgggcatgtggttccagctacttgggaggctgaggtgggaggatcgcttgagtttgggaggtggaggctgcagtgagctgttacagtgccactgaccttcagccttggcaacagagggagaccctgtcgcaggaaaaaagaaaagaaagaaaacaaaggaaaggaaaggaaaacaaaggaaaggaaaggaaagggaaagggaagaaaaggaaaagaaaaagaaaagaaaagagaaaaatccctgtttgggatttaggctacacttaggtaataaggattaatttaaaaagctaatattctgatctttatcaaacggaaattgttcttcttttctacgtctatatcgtgccagaaatatattaatgtgtattttttaaaggtgatctaaaggaatggttaaattctgtttcatgaatcatcaaaactatttgtttttactttagaattgatgcattgcagttgtttaggaaatcatgcacaccctggatatgatatttgttaacgagaaataccttgtattctgaacacactggaaattgtttcctatggctgagcataccaatactatacaattttatggtgatgttattagcattgctattatggctctgactcgtagaatctttcttatctgcagttttgatttggatgtgccaagtctgttcaaaggctaattagaacttcgtgtgcctagatggatgagttaaagaaaatttctagcctgtttattagtaccacagtttataagcaacattacaggccttccgtttcatcatagcttttcaatctgctgtacaaacataagactccgttactgttagcctttacccttttgctcaatgcgatgtctgctgcttctgtatacaggctcaagtaattcccattatgccatgccctgtgtgcaccttctggaagttagcccacggacatctaagatctgggatatttccaaatctggttgtggaagggcttggaaatctataaccgcaactaggtggaggacacctgtttcagcaggaggttataaaatatgaagcgaaactaggaagagggagttgtgatcacggttccaagggctccacacagatcctggagttaaggggcactcaggtctccatttcgtgacccctggccctacctctcctagatccaggtatttagtaacccaggcttgagatctcaaaccccatcccccaatgccaaactcccttgtcccagctgggaggcccccagggcatttctgaacatggccatctccaattcacagaaatctgtgtgttgttgcaaataaaggatgacaagagaccacagcctacgaatgcgagcagcgtcaagtcagcaacaatcttccagttatcgagaagtcggaaacgtctgattctttcttctccacatttactaagacgtatcttctcaccttcctgccctccacgttaagaggggctaactattccgaaagacttccgtgccctcttccttttcaatttttccacttccaaactcctaccgaaagacgaagaaaagagaccacagaagaagatacaaagaagtttcttaaaacaccttcttttctaggttctcaaggcgtcccctttaaggaaccaggcccacctctttcccattcacctactggctttccttcctgtccgtcactctacctttaagaatatttcctgtttcttcaacccaacttgcacacctccgccccccggccctcctcattgggccgcccgatccccgttcactccttggtttcctctccgcctcctcccgccctctagcgtagtgcaacggcattctgtcttcttattggctaccacggcagcgttcccgcagcctgattggcgggttgagtgaaagaggcgggaacgcggcgcgcccagggtaggctgttcgcttgctgagctgcggccgcgggaggggcggggaggggcggggggaggggggctgggaaagttgaggccgcgctgccgccgggtctccggccttgagggctcgggctcgcagcggctgcggtggccgcaaaaagaggcggcgggggcggggggagaggagggcctgggcccgcgctcccccagccccggaggagcaggcggtggccgcggacggagagattcgcccagacggtcagacactcctgccttc

SEQ ID NO: 30236 - DNA, 2300 bp, Homo sapien
tacgacttcttaatcgacttacaacaacaaactatggcatcgcagagagctttttaacgtttatgagcttcatctctttgagggtaaagacaagctccaaaacggcttgagacaatgcttcggaaaaatgttacgtaattaatacattaaaactatacaacttaatggtaaggagacatttcataaaaacttaaccagtcgatccaaaataattcctaattttacgtaagaggcaaacggtgaaagaccgaacattaactttgccaatcacctgaaaggagcagcgtggtagaactacccaggaccgcctcagcactcaggggcaatagtgaactactgaagcaacagctccacctactgatccaccctatacttccttaaatatgttggcaccccaagtctacagtgatcgcgctctctccccctcctccactcgctgtgacccaacccaaatctagttgagtcactagctcttaatactcatccccgtgctctttattccaatttcttcttcctccagaaggttctgcacagctcccaagcgtgaattaaactgaaaggtgtcaaacaccgcagttccagagttgagtctggaggtggaagacaaccaaaccactccacctggagctgcgggccggcgtggctcagcggtccgctcccgggaaggaggccccgggcgcttcacaatagcctttccatgttgccccactcggtcgcttctccccactcaacaacccacactcgtctccgaaccgaaaccctgaagccccccgggtcttgcctccgctggcccttcagcccgccaacagcccgagcctcgcctccgccccctccgggagccgagggaactgagaagcagagaaatctccctccgcccgtcttcgccctgaatctctcctcgcctttgcggctctccccctctacatgggcccggacccttctaccccaccggccgggccctgcccggctgcccttcctcaccctttcatcttccccgcctgctgaggccgtcgttaccaccgatatcaacgccgtcgtagtcgccgcccttaggtctccgcacccttagctcgggccactcaaccccgcaagccggcctcctagcctgggcagggagctgtgcgagcaacgaaggccgcgagagtcgagtgagggcttgagtctggtgggggcgggagtgtctcccgccgccgcgcttgtgccgccgcttctccacacgtgcactcgggtctctcggctccctcccgccgctgccgccagccagacccgctgccgcgctgtgacctttcaccccgcccctcgcgcgccggcgcgccgccgcctcacgcgcagccgcactgctcgcctccgcgcaccctgccccctccactccggaacctccatctttctcctggactgggccttctggggtcatgctcctccctcccacccgcttacgacactgcttgtggggctggctcggtaggccctggcggtaaaatccagatttttccacccctccctctcttgtcccatatccgcaagatagtttttctcagccccgttcttcccagtttgtggtctccagagtgaccttcaaacgctgttgcctcctagtagggttttataaagttagttcttctaaatgtaaagaaatctgtggaaagctcaagtttaagttaggtgttttaaaacaaacgtagttaacaatcggccagatagattggctaccctccagcacgcctcaagttttaagatcacgtgattggcccaaacctcagagcctggaattttaccggcggactccagagggacggaacgccaccgccatttcctgtccctcgattgtggcgtgaacgtcacttccttagcaatgcgctttaactcttgctgtccacattttccacattgtactttataacatactctttgtgaaaatttatcttttatttctttaatccaagaaaattaatattcaagggatccgtaaaaattcaggccccccgagatgtagagcgctgggatggaggaggcagggcggagctcgacgtcatgtgactggttgggcccgcccccccccccccccccaacctgtgcagctgaggacttcccctccgtggtgacagcctctgggtcctcggtcggtacagtctctgcacctcgcgccccagcaggtgagcggcgaccggtaactggcgagtggtggggatagagggggtggaaggaggcagaggaaggagagaagggagagtgtgaacggcgacttttctgcctgaggcttcctccccgctgtcaccctgcaccggcaaggagctcatttc

SEQ ID NO: 30237 - DNA, 2300 bp, Homo sapien
tgcagtataaataaaagagtttaaccacaaactgaaaaacattcttccctaaagcacattgtttgggatcaaaacattggtaataatacattatggacggaatgggagtacttgggttggacaacacctgtattttcaattggacaacaatttctgtattttcacaaaatactattcatcaaaatctgaagagggcaccgggagttttacaaatggggaaagctaaagagggatacaaatgctacttaacctaaatttaccacaaagccgatcaaggaatagattgggagtgccaattcagtagtattttaggggaaaatgacaaaaagggaaggattgacggcagaaaacatgtgcagacagcaacatctcgacttgattctacctttaagcatatggccaaatcaatttggtttaactatttccaacccaatcagtttcttatttcggtttcagggaaccctactcactcttccctaaaccagcctgggcctcctgcacaccacaacaccacaataccatctttcaacgcctcctcattcaatcgagactgtcgcattactaacacctcctgttttgaagacagtattccttcaactgtcctctctgcagagaagaaaaagtaaaagcccttcttttacttttctagtcccatccgaagcacgtgaacatctacggaaccttccctgcaggtatgtcagataaaatccttagaatcactgagaaagcacattcggagggaagcttcacagtgactctgcagtgagggccgtatcagtgacagtccctcccaagcctgtctcaccggagacgcctctgcctccagggtttttgctacctccccgctcctcagccctgagctgagggtaaggacagtgaggacctttgccaaagaatgggctttaaggaatgggacctaatgtctactgcagaccctgtgaaatggctgaaacaatctgctacccgaagccccaaaggctctgagtagggaaccataatggccgcactcacttccaaccctgggaaaggtggacatctgaatccccaagtagcgggaacgaccacacttgggggagcgggggttaaggagaaatgagctccttgccggtgcagggtgacagcggggaggaagcctcaggcagaaaagtcgccgttcacactctcccttctctccttcctctgcctccttccaccccctctatccccaccactcgccagttaccggtcgccgctcacctgctggggcgcgaggtgcagagactgtaccgaccgaggacccagaggctgtcaccacggaggggaagtcctcagctgcacaggttgggggggggggggggggcgggcccaaccagtcacatgacgtcgagctccgccctgcctcctccatcccagcgctctacatctcggggggcctgaatttttacggatcccttgaatattaattttcttggattaaagaaataaaagataaattttcacaaagagtatgttataaagtacaatgtggaaaatgtggacagcaagagttaaagcgcattgctaaggaagtgacgttcacgccacaatcgagggacaggaaatggcggtggcgttccgtccctctggagtccgccggtaaaattccaggctctgaggtttgggccaatcacgtgatcttaaaacttgaggcgtgctggagggtagccaatctatctggccgattgttaactacgtttgttttaaaacacctaacttaaacttgagctttccacagatttctttacatttagaagaactaactttataaaaccctactaggaggcaacagcgtttgaaggtcactctggagaccacaaactgggaagaacggggctgagaaaaactatcttgcggatatgggacaagagagggaggggtggaaaaatctggattttaccgccagggcctaccgagccagccccacaagcagtgtcgtaagcgggtgggagggaggagcatgaccccagaaggcccagtccaggagaaagatggaggttccggagtggagggggcagggtgcgcggaggcgagcagtgcggctgcgcgtgaggcggcggcgcgccggcgcgcgaggggcggggtgaaaggtcacagcgcggcagcgggtctggctggcggcagcggcgggagggagccgagagacccgagtgcacgtgtggagaagcggcggcacaagcgcggcggcgggagacactcccgcccccaccagactcaagccctcactcgactctcgcggccttcgttgctcgcacagctccctgcccaggctaggaggccggctt

SEQ ID NO: 30238 - DNA, 2300 bp, Homo sapien
tcagtgggcaggagccctacaggcagtcctggaaagcctaggactcaccagactttgagcacctggaccagacactagatgtctggcaaaaatatggtcagagagagtgagttttataattcagttgcaattcattcccctgcctttcagcttacaagtttcttgctcttgcttcctctcctgttctgtctgtccacaactccttttattgcaatttgggtgggtttcaggaaggaacaaagttagatacatatgtgtacacacacacacacacacacacacacacacacacacacacactcacacacacacattttaaaaattttcctagggatggattgctgtgatgcccaggctggtcttgaactcctggcctcaagcaatccttccatctgagcctcccaaaagctaggattacaggcatgacccacttcattaggtctataaagatatgttaactcactatttatgggttagcaaaactagaaaaaagtgataaaaattaacaatgacatttcccaaggatctatactaaaactagtcatactgaacatttaacaaatttgaaagagtgaagtttgtaaactccttcaagctctttctaatattgaaatgtgagttacagagctgtacttcaggaacactctacttagtgaaggggcaaaaagtggcataccatcggtagcccacctctgggcctccttgggataaaataaagaggtgaccctaggactgctgcatgcttctgagcaccctatctatttcctcagcactcatttcttccccaccagccctgcccttaactccaaaactccctccctagtgcgttgtggaattcaggatcagacatgaacaaaatcttttttttttttttgagatggagtcttgctctttcacccaggccggagtgcagtggcactatctcggctcactgcaagctcggcctcctgggttcatgccattctcctgcctcagcctcccgaatagctgggactacaggtgcatgccaccacgcccggctaattttttgtattttagtagaggaggggtttcaacaccatgtcgcccaggctggttgtgaactcctgagctcaggcaatctgcctgcctcggccccccaaagtgctgggattacaggcgtgagccaccgcacccagccaacaaaatcttctataacctaagttctttgagttttctctgaaaattctctaaaaatctttcttcatcttgttctaactcaagggtgtccaatcttttggcttcactgggctgcattggaagaaggattgtctcagaccacatataaaatacactaacactaggccgggcacagtggctcatgcctgtaatcccagcactttgggaggccgaggcaggcggattgcctgagctcaggagtttgagaccagcctgggcaacacggtgaaaccccgcctctactaaaatacaaaaaattagccgggcgtggtggcatgcacctgtagtcccagctactcaggaggctgaggcaggagaattgcttgaacccgggaggcagaggttgcagtgagccaagatcgcaccactgcactccagcctgggtgacagagcgagactccatcttaaaataaaataaaataaaatacactaatactaatgacagctgatggcaaaaaactctcataatattttaagaaagtttacgaatttgtgttgggctgcattcaaagctgtcctaggacgcatgtggcctgtgggccacgggttggacaagcttgcactgatacttggttttcccctgaaacttgagaggaaacggctttccctgaagccctctcaagtggtgtctgtttcctctcccacaccatcatatcacttgtaacttcccattgatctggccttctttgatcctggcctccattggcctccaatcaataaggcctccattgatcctggcctctatcattcatgccctgtggagtcacctccctcagtgaatcagagctgactgaccccaatagaatgcggtgtaaatgatagtctataacttccaaggttaggtcataaacggcactgtagtcctcaccttggtatcctggattacctgctctgaggaaaggcactgccatgcaatgaggactgaagcagctctgtgaagatgtccatatggagaggaattgaggtcccaaaccaatagccagtaccaggtgcccggccatgtaagtgagacaccatagaagtggatcctccagccactatcaggtcttctgatgactggatatccacttgattaagggcaacctctgaaagcccatgagcta

SEQ ID NO: 30239 - DNA, 2300 bp, Homo sapien
ttccaggttcaagcgattctcctgcctcagcctcccaagtagctgagattacaggtgctcaccatcacgcccgactaatttttgtatttttagtagagacagggtttcaccatgttggccaggttggtctcaaactcctgacctcaggtgatcctcccacctcagcctcccaaagtgctgggattacaggcttgagccaccacgcccagctgccaaaaattattaattatccataaatgaatatccataaatgtatacataaatcattaattatcctgtaacatcaactctaatagccatttcatattcactattcctcaattgttctagaatgtcttccctccctcccttccttccttctttccttccttccttccttccctctctctctctttctttctctctctctgtctctcttttctggagatggggcccccctgttttgcccaggctggtcttgaactcctggacacaagcaaccctcccaccttagtctcccaaagtgctggaattacatgagttagccactgtgcctggcttagaatgtcttttttatagctgtttggttgggaactctgaaccccaaatatctgagacaggcctcagttaatttagaaaatttattttgtgaaggttaaggacacacctgtgacacagtctcaggaagtcccaatgacatgtgtccaaggtggttggggtacagcttgcttttatatattttgggcagacctaatacatcaatcaatacatgtaagatttacattgtttcaatctggaaggggagacagctccaaggcgagaaggaggaactttcaggtcattggtacataaaaaaattttctgatttgcaattggttgaaagcgttattattgactgggagctgtggcttgcacgtgtaatcccagcactttgggaggccgaagggggcagactgcttgagtccaggagttcgagaccagtctgggcaacatggcgaaaccctgtctcaaaaaacaaacaaacaaacaaacaaacaaacaaacaaagtagttaagcatggtggcacacgccagtagtcccagctactcgagaggctgaggtgggaggattggttgagtccgggaggtggaggttgcagtgagcagagattgcgccaccgcactccagctggtctaatagagccagaacctgtctcaaaagaaaaagagaaaaaagagttattatcagtagaaaggaatgtctgggttaggataaggggttgtggataccaaggttttatcatgcagatgcagcctccaagtagcaggtgtccgaggcaatagatgataaatatttcttctcagacttaaggtctgtgttgatgttaatgaggcatgtccaatcccctctttcatcatggcctgaactagattttcaggttaaatttggaacgctcttggccaagaggaggggtccatttagatggctgggggtgggcctcggcattttatttttggtttacagaaccaagaatctgcaatacgtacagcagttaatcagtaacttcaatcctttattggaaggaacaagagtttcctggccgggggcggtggctgacgcctgtaatcccagcactttgggaggccaaggccagcggattgcctgaggtggggagttcgagaccagcctgacccacatggtgaaaccttgtctctactaaaaatacaaaaattatccgggcgtggtggcaggcgcctgtaaccacagctactcgggaggctgaggcaggagaatcgcttgaactgggaggcggaggttgcagttagccgagacggggccttggcactccatccagcctgaggaatgagagcgaaactccgtctcaaaaaaaaaaaaaaaaagtttccgagcaattcaccttttcgcacattggggcagggtatgccatttcctgggaggcacagtagtttgaggttgggaatagggaagtctcattgtgacccctagaaagacaagccttcaggctaacccggtaacacccatcgtcaggaatccttcacggccgccagagggcgcaaggagctgcggctggaagtactcggagggccggcggaggaggcgcgcggagcctgtaactcgcagcgcgcgctggaggtgggcgcggggcggtgcggtgcggtgcgcgcggggcggtgccgcggcggcggagggagccgcgatggagggcgctccgactgtccgtcaggtaagccgcgggcctcgctggggcaggttcccatctgtggctttagcctactttttctcacggtgattgcttgaaccttctcagattacagttaat

SEQ ID NO: 30240 - DNA, 2300 bp, Homo sapien
aaatgataactacatgaggcaatggatatgttaattaacctgattgtggcgaccacaatgtatatgcatatcaaaacatcaagttgtataccttaaatatgtaccattcctatttgttaattatacttcagtaaagctgaaaaaaaattttttaaatacaaatgctgttgaggatgtggagaaagtggatccctcaagtacattgttggaaagattgtaaaatgatgcagccactttgaaaaacagtttggcagctcctcaaaatgtttaccatagatctgttcttgcaaaaacttgtaccccaatgttcatagcagcatttattattcataatagccaaaaagtagaaacaatccaaatgtccatcaagtgattaatgtataaataaaatgtatgacctggtgtggtggctcatgcctgtaatcccagactttgggaggctgaggcggacaggtcacctgaggtcgggagttcgagaccagcctgaccaatatggaagaaaccccatctatactaaaaatacaaattagccgggcgtggtggcacatgcctgtaatcccagctactcgggaggctgaagcaggagaatcacttgaaccgggtaggcagaggttgcagtgagccgaaatcgcgctattgcactccagcctgggcagtaagagcaaaactccttctaaaaaaaaacgtatatccacacagtggaatatcattcagtaataaaatgtagtgaagtagtgatacatgctacaacatggatgagccttgaaaacataatgctaagtgaaagacgccagtcataaaagaacacatcctgtaggattctgttcttatgaaatgtttagaataggcaagttcatagaaacagaaatagtaaagttattgcctggaggagggagtaatgagaagtgacagctgatggagtcagttatctttctgggttgacaacgtgtcctgaaattagcggtgatggttgtttaactttggatatgtgaaaaccgcctgaattgtacacttagagggatgaattttcaggtatgtgaattatagcacagtaaagctgctgttaaaagaaatggtttaaggggaacagtagagatttcctgcagataagaaagcctctttttttttttttcgagatggagttttgctcttgttgcccaggctagagtgcaatggcgatctcggctcactgcaacctctgtctcctaggttcaagtgattctcctgcctcagcctcccgagtagctgggattacaggcatgcgccactgagcctggctaattttgtatttttagtagagacagggtttctccatgttggtcaggctggtctcgaactcccgacctcaggtgatctgcctgcctcggcctcccaaagtactgggattactggtgtgagcctccacccagacaagaaagtttctttctttgaagctggcaggtgggaacttagcctcctctcctccctactccccagctaagcaccttcctgaagtggacagacacattttggcctccagagctcttcatgttgaatggccttttgaactgaacgctgaggacaggctctcctaagcagtgcccaactcaaatgctttcactttactggagtggggacccttggagaagtagcctacaagtctgagatggggaagggacagaggagaaaagctggtgtgggtgagggggcttgccaagcccagtctctctgacccatggtaagggagtagaagtgactagcttggaagccccaagtccaagcccctgctgagtgtctgtgggtgtttggatgccctgcttcaccagagccacatgcccttgctcctggcctgggtgatgctcacagggcaggtccacgggcagcaggtcctgcagtgcatgtcgtctactacaagggcgtggagcaatgcatagctgtgtgctgctctcaactcagctctatgctgccctcccaggttgcactttggcaaggaagcctccttcacccactgcaggccggtcactttcagattcattgtcattaccgtggggtgctctattctagcactggctgaaaactccagtgttgccatagggacctggctaccccaccccaaatactaacttgttgagtgctcagaatccgtgaggtgcattctctcattctagcaaggcaccagcgacatcgcagactatgcttggttatatactgtattgaatgtccttccaatgtcacatttgtgcttatcacacacatgtgagttgggatatgtccttataaaaacaaatatctccagggaagtgataaagttcaggtttaca

SEQ ID NO: 30241 - DNA, 2300 bp, Homo sapien
aatagtggtcagtttacaaagcctatgtcagccactgagaccttttggaggagtgtcatccagctttctcctttagcctgcgcaacattatcaaatccccttgttcttttattttggagttactggaattccaaaagttttccagtagtgctatcaatctaataaatgcaacattcagacctacctggaaaaaaaatgaatatgaaattggtaactatttgtcacgtttgctatgtaatagcatggcagtatagaagtgtttgtattatataattccctcttttttaccttcttgattgtcagaactcctctatctattttcccttggtcagtgagctacaccgccttctacccagtcacccaagccagaaacctagatgtatcctttttcttgcctctttgccagccagccgtgtctagttggtcaccaaggtcatcatcatttctagcttgaaccattaccaatgtcttcttatctctttttaacacctgatctgtctttgaggttgatgtcaaatagtagtgttttaaaatcatgtcttttaaaatcataattctgaacttgttacttttctatatgaaaccactgggtggcttttgatatttcgacaatgtaaagtccatattctttggcatggcatacaaggctcttcatgacctggctgcttcctccttccccactgtatctcctctccctgcctcactctcatgacacacacatgctcaagtgatggggaactggtttggcaagctgcatcattcctctggatgcttgcatttgacatacatgtgctcatcctgtgctcatcttacttgacctttcggcagcgttagataccactgtatactccctctattttgaaatactttcttcccttgcctttcatgacattctttctggaatcttctcttacctttctggtatttccctgaatctttttttgctggccactcctctattttctctttgtgtgttgggctttcttggggttcagttttaggttctgtttttccctctgaagcctactaaatttagctctgccctacatagcagtggtttggtataaggatttttatatttagcaaaaatgtgtataaatatcagttgtggtacagttaatgtatattttctcatagctatttgttcaccatcgtaaatatatttagttacaatttcagtcaatgagaactaccataatatgctaaaagcactgccttttagacagcggaagctgcccccacagtgggctttcttcatttgaatgagtagtattttcagcatcactctactctatctcattctgccattgtataaaatgatgagattttagcatccctcaaaaggttgatccgtggagttcatcaagtagcctttgatttgtttacacacatcactaaattaaatggaatgactaggtagaaattagggcaaattttgcttctttatttagaagaaaaattttcttctgagaaataaataggaattagtagatgaaactgtactgtctattatagtccagatcactgccagggaattattctaaatacaccaaagtcagaaatattttcaaagaaaagaattattgagtaatcaaaatgttgccttaaacctttcagtgatgagagatgtgccgggtgcttagtagaattattccacctgaacagctggctcttcctgctatttccttacgttacatttacagcactcagagatagaatctttggttgttgtaaaggattaatgcaagagtctgataggaatactacgtcagtactagagaagtagtatatgaagaggtaatcatgacattcccagaattgcatagaaattactagcatggagaagaaaaattaacctgtaatatagttaattttaaagatgagattaaaataatattgcagtagctgttttatatcaatttagcataagcaagatgtttttactttcattttgttttttctaatctgtgcgtagaacagagaaaattaggaactgtccctttaataaaacctgtttacctatcttcttcttgtaggagtggcttaggaacctgtagagtgaggtataacttccaattctgcattctgacctgcaaccttggaaagagtgctggtactacaaccaggaagtgacagataatgtgctttaaactacattagaaaagcttctcatagcaaaactgagagattgaagcagtgattatttttacatagttgtcattaaatatttggagctctgctgtgcatagagatggcaacatacttagaatacacagctttctgggccagaaattgatctt

SEQ ID NO: 30242 - DNA, 2300 bp, Homo sapien
ggtgtgtagtaagctataccatctaaatttgttaagtacactctatgacgttggcacaacaataaaatcacctaatgatacatttctcataatgtatccctgtcatcaaagcaatgtatgactgtacttagaatagttcctagcacacattaaatatccaataaccataagctgttataattgaaggtgaatctgcctgtgatcagtaatgatccttttccaccctcccccaagaacttccagtatctcctctgagtaaatgttgggaaaacattgaatgaaaatatatttatgtggaaggccagcatgttatcaacttgtttttaccagtcatgcatctaccttagcctggttttgtgttttgtgtttcttgcaaaacttattcatctagagacccttagtgacttactactggtgcaagggaagtgaataacttaatgctttaagatcgatcatacattcattggtgttcagtatagatgttttcaggttatagaatacaagcagtatagaagtttagccctttttttttctgtttgcattcaagagccatatgatgagattctcagatatctacaagcatcgtatgtcacttgctttgcctcattttcacttctaacaaagttggaaataacaaaaagtcaaaaataacttttttccaagaaaatatgttttttaagctatagaattaatactctttgtaaaacttcatgaaatacagtagagtatacaaagaaataaaagccatccagataccaaccactgaaagatagtgactcttacttttcctataaatatctatctgtattctttatagtaggaaatagaacttaatttgcaacaagaggagacgtgtaagtgtggagctgtagagaaatgtactctacttagcatctgttaaggggcccctggtttagctaaataggcacgttgctttatagtgtggaactcccaaataaatcaagttttgattttagcaataatctctgcatgaagaatcaatcttctgaccagggcaatataatcctttaataaattgtgtcctcggtcccagttgttattctgctatctgggtggccagtggaaacctgtatcctccctggagctgattctgctacttagtgcttctcaaggatctcatgggacaggaagtaaagtgctctcttccatctgtgtacatacagaaaatgcaagaaaatattctgctgtatagtttatatagactttttgtactattccactaagtctgattataatacagtactattttacttgaatactaacatagcaatagcatcatactttaatgcctaacattaaatttattatagagatgacatcatctttattaaaccatctcagaaagtatagatagcatcatatattaaatacattttaatgcctaatctcttagtccctttgcagcaaagccaattgtgtttttatgagtttgctatgaagttaatttgttttaatcttctctctcccactgtactcatatgtgacttttatctctccattttctttccatttccctgttaggtcttgagagatgggtgagttttcttccttgagatgatggggcaggcactggctggggaagctaactgggtttggttcttctcccttgtctaccccaaagaatggattgttctattatttttgtcctttgtcccctttcccttctccataagtgatttacatgatctgtgaagctcttttatatggtgtttttcataaacttgtttattattgtgtaggatgactttagaatggtatatattatttattcatattttacggaccgacatttaatagcatgggaaatgtgatgcaagtataacaaacaaaatgctgtaaatattcttcaaagctcaatatttcaaagtatctttaatattaaagttctcactgcaaaatctaagctaaacctgtgttttattttgaaactggattgtttaccttttagggattaggcaaagaggagtcccaaaatgagaaacagaccaaaaagagtctcttaccaactttggaaaagaagttaactagagtgccatcaaagtcactggacttgaataaaaatgaatatctttctctggacaaaagcagcacttcagattctgttgatgaaggtaaataatttcttataaattttattaaatttcagttatgtctttttatgtttatctttgtaataggggtgtgcagattgagaatttagttttattagacacagtctcaccctataaagaaacaaaaaaagaatgggagcttatagaaaataggagaaagaggctgtt

SEQ ID NO: 30243 - DNA, 2300 bp, Homo sapien
gtgaagtctgatgctttgttagcacagaatccgtacatgtccaataggtcgcttttgtaactgagataagaccaagaggataaacaggacaatataagaagaaacctctatgtcattactgattttaaaggttctgttttcaggcatataacatttccaggtttgtgtactgtaaagattataatgtcttcatttatttagcatgcaaatttaatagtcaaactttttgaatctgcatgttgatgatgattatcagaaagggtcttctgccatgctgtatctttatgaaagaaatagttgttttttcttaaggtaactatcagaggtgggattatcttgcctcctcacttagaataccaacagtcaaaaggaagaaccatcctctgagttttaaaaaccagaaggttatgttaaaatctgggcatttagtgacagatcaaatgcatacttgaactaagattggcttcagcttagcagtctttcatggtggaagtgacacatctggttgaaaataatttgtgtattttcagtaaccatgtatggcttccttctttatgtatgtgtgtgacttgttttgattggtaagttataagccagacatagattttagctctttaataaaaacttcaggggcacgtatgtcccagtacaagtgtactgactatcaagttttaactcagatgcaagctttggctctttcataaaaagtttttatgcatatgtgtctccatacaagtggctcattaaaataagaactttgtaaactgacttaaaatcagatattttttcaagagttagggaaagttgaagtgttttactgttttgtctcttgagccctttctctggggaaaaaatacatatccatctatctatctatatataaactgtgtatacattcttactgtttgaacaactattgcctttaattaaatgtttcatttttctccagagtccccaaagccacatggcattattatagtcatttttgagatgcctgtagagaatgaaagtattgactccgttagagggaaaatgggtttctctgggtgaattccaacgaagcatacctaggggtaacagtgaacctacctgggtttgttttgttttggtaaggatttatgtagtgtctggctgtaagcaagaatgagtggattataaacttgaagatttctctgttaaagtcacaaaaatgatcgacaaacaatatttttgtgatgtttatttaaacgttgtattttataacatacttcaaggaagagtatcgaagtaagttgctttataaattaagactaaattcgtatggatgcagaattcaattaataaaatttgagcctgttacgtaaattgaatattaataaaattgaaaatttctgagttgtagtttttcttctttttctacttaaaaacaaaactagaaagcctgcggtagtgaaacgtgtacatgggcccacactctttaaagaaattttgtgcaataataaaacccaaaaaggactctcatctcagggcagtttcatctcaaatacacagacgactggaacaaaagtactagcgaggcctgctggtccaatgtaaaggctgctagccagaaatcatgaaacgaacaggttgctaaatgaacagatccggcagcagtgatgggcctttaagagaaggtcagcgaaactgggggaggtacttggataacattttgcggtggaaagctccctcaccgcctgttgccggagtctgaatgaaggctggcggctccacggtctcacgtagttcggaaatcctccgggttcccgggtttcccgtatttccgtctccgcacctcgtccgcaccccggggctccggaggctgtcccaccggcgcgccgcccgcaggcaccggcggcgcccggctgccgcctctggggcggggcggggcgtggcgtggcggggcaggccggaggtgcgggacccacctcctgcccctgcctcctggacgcgctctcgggagccgattttccccttcccggcgccagggccgcgggccaggaggaggagcctcgcccgcgggcaccgcggggaggcgggcggcgcacgtgcggacaggcggggaaccccggcgccgggggcggggcacccggaagcgcgcgtggacctggcgcaccgagccgggcgggcggaggggcggttgggacggcgcggggaggcgggcgcgccgcccgggccgcggcgggctgtggtcacaggtgggcggctgcggcgagggagcggccgagcggagcccgggtcccggagactcctgccgtcacgcccggggctccgcgtagcag

SEQ ID NO: 30244 - DNA, 2300 bp, Homo sapien
gcagtgggtagaaggcactccctctacattctgccccacaaatggccatgacacagaactgtttttacctgccaaagagcctgcatgttatcaagttgttcttccccctacgctatgtttctaacctctttggatctttatattactcttcatatatttaacatgaattttcccatactatgtaatacttctgatttagcatttttaagttttcataattctatttatctccctttccttaacatggtgaggacaatgttagatctccatagctgggtaatattgatatttaggaagatttgttagccaggttctgctttttatacttagtcttgtccttaaactgacgatatgattccactttgcgaagagtagagaatataagactgcattcctcagggtgcaagtttttaattccctaaaattgaaaaataagagaacttcttaataactggaatttacattttccctatttaaaaccttgtcttggctgggcgcagtggctcatgcctgtaatcccaacactttgggaggctgaggtgggtggatcatgaggtcaggagttcaagaccagcctggccaacatggtgaaaccccatctctactcaaaatacacaaattagctgggcatggtggcatgtgcctgtaatcccagctacttgagaggctgaggcaggagaattgcttaaccgggacccgggaggcagaggttgcagtgagccaagatcgcgccattgcactttagcctgaactacagagcaagactccgtctcaaaaaaaataaagctttcatgtttattatgtaagttatatcaagaactcttaaaaatgtgtttgcttttttatttctctatgctgttttgaggataaatagctgcgttggagaatcaaatcatcaagcatttatacttgcccttttgatcttcttgctcacctcggtgtatgggatcacactgaccttggacaccatttgtagagacagaagtgtcttcacagctcttttctattgtcctggagtttatgcaaattacaggtgagcagtgggtaccacagtatggaggccccctgggaagtaatgggtgttgccattgacagggactattactacttggttaggagttctcaatcaaaacataggccaggctatggaaatgctgggtatccctggaattgccagcaaaattgtgcattggtgatgtgtgtttttcaagggtgctgttaaaaggattgttgacctttaaaaagtgaagaactagttctctacaaacaggaccaggcctaatcagggacttccagagtcaaatgaccactcataggctcaaaagtcgcaacagtgaaacagaaacaataaacaaaaactagcagccccagggcacatatgtgcctattttgtcataacgatcagaaaccttctcactttactgctgctttctgatgttttttagtccaatcttaatttactgcttccgacccttttgagatgtgctcgacatctctataaccttgcttttctttctaacctctcttggtttttcctgttctactttctttctttttttaatcaccactgatgattactgtgatatgtaggtcaaaatttccttaggcccctttatagattgtgaagatttccaggccatggcaaaatttgggattcttccgcttcggcctcagcgccccctccctgaatgctggggcccccctctgcccatgctctttattcccttcccttcatcatcctctctgacataagtgctctggggtatctgtggtttggcccttttctttattctcactcttcattttcagaacaatccttgctttctttacaaagtatccctttgtggcatttgtttttattagcctgtggacagatctccccattgtcatcctagaaccagacacctgtgggcattattagaatagattggtcttcctcagattaagtttccttcctcactgtgtggagagtatctccagcatgtgaatgaaattctctgctaacgctgcaggtgaggcccgtcctgaagcacagcatgtctgtgcactctcggtgcggaggcgagggaaccgaggaatacagtcctgccattgcttctcaccctgctctgtgcaggcgattcacagcacctcatctttttggttaggtccttggatttaatagtctttgaggtcccttcagcttttacaaatgaagattctgaatgaacttatttctaactaactcttaatttgcgaatgttggaaaatcatcaaatggcagaggctaactggcagcctgtctcattagtgagcctgag

SEQ ID NO: 30245 - DNA, 2300 bp, Homo sapien
caacaacaaaaactggggaatggggcgagggttaatcaatctgacttttactgttttacaaagcagaaaatataaatttccacccagatcagtcaggtattaatctgaaattagaagtaaaactatcaggacatttcctttcttcaacctctgaaactcccagaagcttgcagaattccctctaatagtcacttaacaaatagagttatcttcttcactaaaaattcaggtgtgtttttaaaataaggggatatcctgatgatttgtcattggagcactaaatctcttttggtttggcgttcccagttcatgaattgcttcttactcaaatatactctttaaaataataataataataataataataaaataaggggatatctaaactagcatactgacacatggaggtgggaaaaatataatactctttcacttacctaacactttaccttcaaagcatcttactgataactaacgcagctgtactgcttaataattttgtcactgcaacaaagaaagagctgatctaattaaaatacaactgaacttgaagaagccctatgtttttacctttttttctctaggcagtaataatgagcactagcagcaaaaatccttccttttggagtcctaagaaattattctaaatttttacctttcatcatcaagtccatatctatatcctatcttggatccaatacattatgcaactgatgtattgaaatagcagcagcctcagtttccaagtctccctgatgcttcagtctgtgccctctagtatctagggcaacatatttgtcatgtggaatatgtccaatgcatttagctggtaaatttagaataaatcgcaagaacaatcgcctggggccctcaaaaaggccacatacatctacagaatattatttaggaaagtataacttaagggtgaaaacagctggtgaaactgctctgtagctgaaagctgagaagcttctccattttagtactctcatttagattttaagcatctttttggggactgttaaaaaggtagtctgtggaaagcacacggtgcaactgtgactttgcacatgtcacatatgtttcaagtttaaaatggggttattatttttttcttatcttcaggtgctaatgcatccaaatgggtgatagatacggagagaatctattttttgaaagttggttgaatttagaaattactatgtgaatcaagtattaatgtattcaatatccatttgcactcctgagtttatttagatactttacgtaaaagtgaaggggcaggaatataggcagggtatttaatgtgaagctctctcccgttaataaagatcaattaccccaagatttgcaaaaaaaaaaaaagagagagaaaaagaaagaaatgtgcgagaagtttcctaaaatttaaggtagggggaacggagtttgcaaactcctttcaccccgatgggcattagcagacacctccggttttagaaaagcgttacaaacagttcttccacgatgctgcccaccaaagccgtaatgtgcccagaccccagagctcctagagcatttcactcagggtaatgctggctttggggcggtcaaggcaggggcgtgtcagctcaggatgaagaggcaggaagcacagacgggccgcgactggcttcctgactgcgccgcgccttgggaaagtccccgccctccaaagctctcgattgggatcaccttgggactcggcttccttgtgaaccgtttccagcgattcagccccatccttttctttgagaaggaccttccctgaggcgccaggagcattttccaagttcgagcccgaacctcggccaaagctgcagcaaccgcccttctgcccgggctgcctccgggtcacgctgggaattgtagttcctccgcccgcaaggaaagcaggcataggacaccgtcgaaccaccactcccacgaggctctgcgcaggccgctcgcgttggctcagttaccatagcaacggcagaggtccctcgctcttgccgtcatcaaggctcgcttgaatgtcggctttgctttttttctggcgcccagtgatgacgcagtactccctgattggctctgcactggaggcagtgattttggggcagagaattttgcaacacgtggtagtgaactgtgaggagtttgaggggtctgaagactgaaagagtcgaatggtttgttggcaggtaagtgcccctttgccctgctggtgtgggagctgctagagatggatgagtcacgtcgcgtccagacgcttcctggttgtgttgcagtaacggtgattg

SEQ ID NO: 30246 - DNA, 2300 bp, Homo sapien
taaaaacacaaaaatcagccaggtgtagcagcacatgcctgtaataccagctactccggaggctgagacaggagaatcacttgaacccaggaggcagaggttgcagtgagccaaaatcatgccactgcagtccagcctgggtaacaaagcaagatgccgtctcaaaaaaaagaaatgaagaacgctacaattctagaaaacagtaaatgaagatttttccaaggcattcggaaatcgttacaccatttggtagggggaaagagataacgacgacgttaaactttgttgagtatgtgtgttaaaaattcagaagtaactgttaaacgattaatgacagaatgcataatttccaaactcactggagagggaagtgggaagataaagaaaaatgaattaacctaataaaaggcaagaaaggaaaagagaccaaaaaaaagaaatagaaaacacaaaataagatggtagaattccaaatgtcagtaatcacaataaaagttaaattaatttcacatatagaaagacaataatagcaactaacatttatcgggtatttactatgtattaagcactgttctttatatattcactccattaatcctcagatcaaatgcataatatagataccattattatctgcattttatgtatgataaactgaggctgataaaatccccagctggtaagtggcagagcaaggactttaattattgaagtctagttttcagcgctgtactctaataggctgggagcttattagaagttccatctggtacacaagcacattataatcttagtttccattttgctatagtgttcttcttcttttccctttctccctcccgcctctaatccatcctcccagtctctgcaatctttctccattctcatacaaatatttaaacatacttgcatatgggagggagtgttttggtcagggtttgcttttacaaaaatggaaacatattatactataatatatgcacttctctgcaatttgcttttctctcaagaataaacattagacgtctttcctgaagaagagacataaagctaacttacccttttgaaaaaaactacttcgtggtactgcatagtttgtatgagcacaatttattcaaccgcctttcagacagaccagttacagagctggtcctaggatcgctgcaacagtccgagggcatagcttccctaacttcattttcaccaatttcaaatcaactttagtttacatttcctggcagaatgcttcacatacatttatttttaatcattacaacactccagtgattcaggtattatcgtccccattttgcatgagaaaacagggtctctgagttattaaacaagttgcctagggtcatatagccacaaagtagttgaattcaaaactcctgttctaaatctttactctgctttataagcccatttatcacccctaaatgggctgtctctggaaacacctcggctaagccaataagcctggatttatctttgctccatgggccatctccatggccccagacctccctaggcacctggctcagagattgaagacggtcccaccctcccatgggcagttcggaataaaaacttcctgaaaactctacctttcagcagaggctagtcgaaaggggcccttttatctcagaggtgtcggcgacgctcacacgatttatgagaatctgaacttacagaaaccaatccaccaggacaccctgaaaagggaagcagaggagacatggcgggagtacaatcaccgttactgcaacacaaccaggaagcgtctggacgcgacgtgactcatccatctctagcagctcccacaccagcagggcaaaggggcacttacctgccaacaaaccattcgactctttcagtcttcagacccctcaaactcctcacagttcactaccacgtgttgcaaaattctctgccccaaaatcactgcctccagtgcagagccaatcagggagtactgcgtcatcactgggcgccagaaaaaaagcaaagccgacattcaagcgagccttgatgacggcaagagcgagggacctctgccgttgctatggtaactgagccaacgcgagcggcctgcgcagagcctcgtgggagtggtggttcgacggtgtcctatgcctgctttccttgcgggcggaggaactacaattcccagcgtgacccggaggcagcccgggcagaagggcggttgctgcagctttggccgaggttcgggctcgaacttggaaaatgctcctggcgcctcagggaaggtccttctcaaagaaaaggatggggctgaa

SEQ ID NO: 30247 - DNA, 2300 bp, Homo sapien
ggtgagccaagattgcgccattgcactccggcctgggtgacagagtaatactccatctcaaaaaaaacaaaacaaaacaaaaaaaacccaaccctatgaaataggtgtgattagccaaacttttttaggtgagaaaactgcatgctaatgtctttcattcactttggcctttgttactaaatcagttttctagttgggtctctaggtagttctttactagtctttttctttttcaattcaattcagacgtttatttaatgcctacctatgcaaaacatgatcctaggcactgataggtatgaagaccttaaagatgtgactgacatcgttcctgctgttgaggagattacatctaggagttctagtaaactccctgatacaggagagagttggggtttgtcagtgacactgaacaggatgaactgccttcactaactctatagcatacctgtgatttattcatttttaatttctttatttaaataaagttcaggctgggcacagtggctcacacctgtaatcccagcagtttgggaggccaaggtgggtggatcacctgaggtcaggaattcaagaccagcctgactaacatggcgaaaccttgtctttactaaaaatacaaaaattagccgggtgtggtagcgcatgcctgtaatctcagctacttgggaggctgaggcaggagaatcacttgaacccaggaggcagagaacccagaactcaggaggctgagatgggaggattgcttgatgccatgagtttgagaccagcctgggcaacgtaatgagaccctgtcactacaaaaaacaaataaaaattaaaaaaattagctggtcatgggggcatacgcctgtagttctagctactcgggaggctcaggcaggaggattgcttgagcccaggagttcaaggctgcagtgagctatgattgtgccactgcactccagcctaggcaacagagtcagaccatgtctcaaaaaaacaaaaaacaaaaaatcttgattgtatgcattatggaaagcttggtaaatacagacaagtaggaaaaaaggaataagcacccaccactcaaagacaatcacttttgatatattggtgaatttctttccagtcttttttactctgtatttaaaataatctagattttttttttttttttgagatggagtcttgctctgtcgcccaggctggagtgcagtggcgtgatcttggctcactgcaagctctgcctcccaggttcaggccattctcctgcctcagcctcctgagtagctgggactacaggcgcccaccaccacgcctggctaattttttgcatttttagtagagacggggtttaccgtgttagccaggatggtctcgatctcctgacctcgtgatctgcccacctcggcctcccaaagtgctggaattacaggcttgagccatcatgcccggcctaaagtaatctagattttatcataccatatcacaatagtgttttgcattcttatttttatcacttaatattttaaataactaagcatttgttaaatatccaatatgtaccagacagttttattgaatcattatcttacttattgtttgatttatgtgttgtagctccatataatggacagcgcagttaagtggcttgttcagcttcataaatttcagcctaggtcttttgaatttccaccagagttagcatttatacacaaatacttttcaattatattgtgaacatttgataagtattactgtcatcaaatttccgatagcatcttctaccagctccacttaacttaacacaacctaacccaacccaacacagctcaagccaacccaaacttaccaagcacaatggccaccatttgggttgccttcttctcccgaagtggcactccccgaggttgcaggggccccagcttcaaagatgtcgataatctgccattgctgagttttcgaacttctaagctgagcttgggcgctatggtgggactcagggaattccgagtcttctcctctcttttcaactctcctcctctttcttggaagcctggtccacccaaggcagtgtcctggcagatgctgtagtaacgcttcagctccagatgtgccgggtcaggagagagggtctgcaggtgtgacaagagggaatcttgacatttctgggggtattgtttatcttctgaatgttcctgaaagggccagagaattcaaagaaggaagacggcaacacagttgtgggaaacctacaaagggaacatctgagggagtggtgggaccatgagaagttaagggaaatgaaatttgcttta

SEQ ID NO: 30248 - DNA, 2300 bp, Homo sapien
ttgagtgcaaacagtgtgccaagataaaggacaatttttttaaacaattctctaaattcattccaagtttgtcaccctttcccaagtatttgttcattttaactctttcatatttcaggctgaaacatttcaaagtgaggtacaaaatgacagccatgattaggccggtctcctaatcaagggagagctacagatacctggcttgagggcaaattctggccaccaagtcagcctctacttttgccaaggcctgaagagagagttcccataaaggtctatatgtaccatgcttaaatattttaaagttgtaaccaacaagccattgagtaaaatgtttcatcctcccaccttgacaaatacaccttcgtaacaacatggaaggccaagtttgaatttaagattcctggacctttcaaaattccatacaaaatgtgatcatacaggagaagctgggcccccacccctaatctgcttcagggaccctggcctcttctctcccaacctcaggctacatagaatctatttgtctgagctctaactgaaagccaccacttggccccaggaaccctacacatttatggcacagtctcccgtcagagtgagagatttagaatgagacccgtgatgtcttggaaacaggctctgagcagttgggtagagaattccctgagtgtggtctagacagggttgtaaacttagtggaccttctccttggcactgtgggaggttacaacatcattctatagaggttagaggcataaccagtagagggtgccttagtccttttgggctgctatcacaaaataccataaactgagtagtttataaacaacagatatctatttttgacagttctgaaggctgggaagtccaagatcaaggcaccagaagattcagtgtctggtgagggcctgctttctggttcatagatggctgtcttttcactatgtcttcccatggtgaaagagattagctagctctctgggtctcttttataaaagcactaatcttattcatgagggctctgtcctcataacctaatcacctctcaaagacccccacctcctaataccatcatattgggaattaggatttctacatatgaatttagggagacacaaacaccgagaccacagcagaagaccagagtggactcctctatagcacctcctctagagcttggggcaagagtcacttttgcttgggtttcagggttactccctaagtcacaggccttatgtcttcccctagccttcagaactgtgagacaacaaatttctgctctttataaattacccagactcaggtgttctgttatagcaacccaaaatggactaagatagatgggtttcattattcccacattttacatgggaagaatctggagctcagagaggtaaagtaatatgcataaggtcccagagttaggaagcagcagagctgggattgtaatcctgcaacagcttcccatctcactcagagtccaagcatggtactttcaatagccctgcacaatctgtctacctcacaccctcctattctactcctgcctcacttggctccagcctcaccagactccctcctatgacttctatgtgctagcccttcctgctggcccgtgttgttctcactgctcagactgctatcacatctgataactgcatggtctgcttcctgatctcctccaggtcaagactcaattgctgatttctccatgaggagttcctgattatactcagatactcactcacatacgcacaatcttcacccgttacttacctgcctctctgatttgtctccaatatacgtatcattattgaacacaccacatcttttatttatcttgtttattatctgtcttctcctctagaatgggagcttcaaagggaaggaattaagattttatctgttttgttcattgctctatctccaactctcacaacagtgcctactatatagaaaatgctcaataaatatttgctgatgcaataaataaaaaaatgtaactaagcaaccaagccccaaagagtctgattttattaatattgttttctgtctcctcacaggaagccccttggcatcacgcacctccctctgggctatggcatctctgagccagctgagtggccacctgaactacacctgtggggcagagaactccacaggtgccagccaggcccgcccacatgcctactatgccctctcctactgcgcgctcatcctggccatcgtcttcggcaatggcctggtgtgcatggctgtgctgaaggagcgggccctgcagactaccaccaactact

SEQ ID NO: 30249 - DNA, 2300 bp, Homo sapien
ctataaagatggcatcatgaagactgatgtaatataatttacagaatgatttctaaatcatctaaatgatttctaaatataattatatacaaatgtattattaatattattattactgtcataattattattctctctgacatattatcagtcttttgggaagtttaaattttcttcttttggaagactataccatagtggttaagagaattaggttgtttagatccaaatcttgggtcagccacttgttagctgtgtgactttcagacattatactaacctccataagctttaattttcctatccataaattaaggatggtaaaaaatagtacctgccttgtagggttgttgaaaggattaaaaggagcaatgcattaaaatgactggctaaaagtacatgctcaataaatgatggttgttatcaatagcagtatttagaccttgttgatgctgctgccttctttctcagccagcagaggtctccatcatagtcaaacaagagctagcttccctataactgcaccgcagttgccaagcacatccactgttggcagagaaaacagccgaagaattaccacactgaccaaacagaggagaaaaaaaagagagagagaacaggaaatggttaggatgccacagtaaaatgtaagatgaacaggtgaccataagttaggattgtttatgttctactgctgactttcactgatattgtccttggttgcatctcactttagcttgttccaaaccagttttaaaaaaggtatctatgtatatatcacagagaagcagtaagaatgaattggcaaatatttatgaagtcctctgaaaacaagaagtgctgctaagtaaacatttaacatttcttacagtattaagcttatttcatccttattgccagttatacgccatgcctcagttttgctacctttgtaatatgtttcctttaaccttcttttcccagacaggcttacacctccaagttcaattatcctgtcaattgtgttttaaattgtactgatttccattaaccaattgtggtatcaatttgatgatctgttccttctgaactaatcatctttacacccaccaaaatctggaaaggcaattaaactgaggaaggtgagagttattcaagagaaattaaagcataaaggtaaaaacagtggaaaaactaagattaaaaagagcactgaggagaaaatatacatgtactaaaaagcacagtatccgagcagatagagagacaaagaggaaaagagagcgaggtagaaaacggatactgcctatgcctactccatccctctttcagcaccaaggacagaacctctgagcggctgacccaagcaacgctcagtttagggtccctcccaaatcctctaaagaaaacggatacattcgaaagcagctatgaaacatgcactaaggtctaatagggaagctggaaaagcagcactcaagtaatttcaccttagaggcaaaaatgggtgatttctttctgttcatttcatagtttctgagtcctgagaaaggcaaagtttgctttgcttgggtatgtctgctgtcagtaaatggctgcaggagccgaagtggtaaactcctcggtctccagaaatcagaagaaaattttagggtaagtaatttttcttttcgtttctaatttaggacatagtattttcctcaaggttatttaatcagcttggggttctgtggatctctaaaaatatgcattaaaactcaatatccactcttatttaaaaaccaaagccctgaggaaatggttttctttttcttctaagtggttggacagcagaaaccttttatattcctttttcttttattttttcccccaaaattgtatccttgtgggctctagaagctatatcaaggaagaattaaaagatagaaaacaaaaagctgttattatttctaggatttgtatggaagttgattgtattcctcttaaggattttacttaattgtaagggtctgttattttaaactcctcaattcagcaccctggcaattcagagctgaaggtttggagaggcactattttcaatggtctatttaaagtcaggctgtttctaagtcagaatccaattattcccagcagagatatgtagtacttgagatgatgattgtgtatgtttcctttgatgatggtatatgatttttagggtattgttatttaattgtgagacttccattacttgctgtagcttactggggcaacagaagtcattgcaattaggtatttgttccagttcatgcatttagtttaattgaataccatcaaaa

SEQ ID NO: 30250 - DNA, 2300 bp, Homo sapien
ttttcctgtctcttgttcctacacagaattagagtctatatcactctttatcttccttttacttttgccaaaggaaggcactaaaaacatgctgaggaatatcttgccagcatttacaactgcccttgaagagagaatatgtgttctcaacacagaaagttagaaatagggttcttcctactacattcacgcattatcaagatagcattatcattaggcacaatgtcttcaaatgttaaagaaaataaacataggatactgaaacgtgaaaaccatgttgctgaaaatgagtgatatgaggttcttaactccttagaaggcctttgcttcattctgctcacataacagcctgacattactccctgcttttatatgtcagacaagccaagttttagcagtgcatattctcttggtccccttatccaagggaagaaaagccttggagttcacattcaacccaggagttctagtcttagggcatgttcaatatagttatgtcatataactaatacatttatgcccaataagttatgggcaaccttggatatggaacctaacctctctaaccctctgtattagtttgctagggatgccataacaaaattccacaggctaggtgaattaaacaagagaaatttatttttgcacagttttgaagggtagaaatccaaaatcaacagggtggcaggtttggtttctcctgcaagacccctctccttggcttgcagacagatgccatcttcctgtgtcctttcctctgtgtgcacatttctggtgcctcttctttttcttataggaaaccagtcatattggattagggcgtaccctccaggccccattttaacttaactcacacttcaaagatcttacatccaaatacagtcatgttctaaggttagggcttcaacacttgaattttggaatgacacaatttagtccataacagcctctataaagatggcatcatgaagactgatgtaatataatttacagaatgatttctaaatcatctaaatgatttctaaatataattatatacaaatgtattattaatattattattactgtcataattattattctctctgacatattatcagtcttttgggaagtttaaattttcttcttttggaagactataccatagtggttaagagaattaggttgtttagatccaaatcttgggtcagccacttgttagctgtgtgactttcagacattatactaacctccataagctttaattttcctatccataaattaaggatggtaaaaaatagtacctgccttgtagggttgttgaaaggattaaaaggagcaatgcattaaaatgactggctaaaagtacatgctcaataaatgatggttgttatcaatagcagtatttagaccttgttgatgctgctgccttctttctcagccagcagaggtctccatcatagtcaaacaagagctagcttccctataactgcaccgcagttgccaagcacatccactgttggcagagaaaacagccgaagaattaccacactgaccaaacagaggagaaaaaaaagagagagagaacaggaaatggttaggatgccacagtaaaatgtaagatgaacaggtgaccataagttaggattgtttatgttctactgctgactttcactgatattgtccttggttgcatctcactttagcttgttccaaaccagttttaaaaaaggtatctatgtatatatcacagagaagcagtaagaatgaattggcaaatatttatgaagtcctctgaaaacaagaagtgctgctaagtaaacatttaacatttcttacagtattaagcttatttcatccttattgccagttatacgccatgcctcagttttgctacctttgtaatatgtttcctttaaccttcttttcccagacaggcttacacctccaagttcaattatcctgtcaattgtgttttaaattgtactgatttccattaaccaattgtggtatcaatttgatgatctgttccttctgaactaatcatctttacacccaccaaaatctggaaaggcaattaaactgaggaaggtgagagttattcaagagaaattaaagcataaaggtaaaaacagtggaaaaactaagattaaaaagagcactgaggagaaaatatacatgtactaaaaagcacagtatccgagcagatagagagacaaagaggaaaagagagcgaggtagaaaacggatactgcctatgcctactccatccctctttcagcaccaaggacagaacctctgagcggctgacccaagcaacg

SEQ ID NO: 30251 - DNA, 2300 bp, Homo sapien
agccaacatcttcttcaatagcaatcgccactactcccttttatttgtagttactctatggtaactctgtggagatgacgtgcatgtgggggccactgccctttgtggaaggaattagatttgaggaattggactatcgatagaaggtggctgggcaagtgacgaatcagagtcaggagatggttctgaggaaagagacctggctgcccagtactgtgccccgtatctgagccccatttctagtcaggaaaggtctttcatggggtggggccagccaggatggtccagcctacttgcatcctcccccaattggcattctaggcaatttcttgaaaggacattccttgtcttcttctcacacggcttgagtgagtacactttgtgctaggagcaagatccagcccatcccaggctgagatctctttctgtcctggttaggaacaggggccaagagaggctgccatgggaaacacatggctcagcctgagatgagcattctcagcagactcttacttccattacaagcagcagtagtaggaagcaatgtttttggagagcgtccactgcactctccttggtcttgccagtgaagtgcaggggcggggaccagctcaccttcacattcctggccatgaaggtgagaatggatccagacaataatgtgttttcatttgtggttgcttatcttttgtctccaactggcaagctggaatgatgttggcaccacacgacaacagcagggagtcacagccttttcataaatgcatggagaaatgaggcatcagcaggtacaggttacagtgactcaggtggggcacaggaatttcatgattttaaaaaaggattccagattcttctgttctccttgccaaaggctagtcaattttcccagttgcttctctattgcccccatcttattcaaaactgcacaaattcaaatgaccccacttcatctagacaaaaacgtaaaaagaaaagacagtcaatcaagattctgcttgattaacatcttgggagaaggctaacatgagtcttcagggatgaaaataaatggctctgagcctgggctgtggtcataaacctgaccttgtcactgcctaagcgaggaaagcaatggaggaaattagagctctcgttccagtgtgattacaattgtacccttaacaggacatgacaatgttttttggcattcaattatgttttgctatgcgtgcatgcatacactcacacactcacacacgcagagctagaattgaaatcatctcaagtgagaattcttgtgatgcatttaaggggcctgcatttgacaagttgctacctagttatggactaaaatctcaccaggcacccccatagcttatcgcctgtcatttcaaaacaaagacatcctgcttcccctttctgtgtcacacctcatcgactcattctcagcagactcttactttcattacaagctcggtgccacctcccggactttcatcagatgaaaacttgaaagaaaaaaaaaacccattccatgttttgacttggactctaggtgttgttattctctcagtccagcttgagaaaaaaaaaaaaaaaaagcccaccccacgagggggcaggcctgctttcctgtctcctgccaccacacagtctctgaagtgtgtgaagaagagaggaagagacaattaacactcagcaccaatctgcatttcctttttagctgccatttacacgctgctcaggttttgaaaaccagcatttcatgctactccctagagagccagcaccagcttcagcaggatccatctgcacagcactcacattgctgaaatcttcagccaacccagaattcatttatttattttttgaaaaaaaatgagagagaggaagtgagagagtacgagtgagagagcaagcaagcgggtgaaaataatagattagaatctggtaatatttaatgcgcacgcttgaccaatccctgcgctggtccaggcaggggtgagtcagtggagtttttctttgatcatcttctagattagtgtgagcagcgagcgaatgagcaagagcgtgtgacaacagaggatgacaggctgtgaggttcgaagcaggaaggacacactccataagtctcggcactgctcatcagcccatgtgtcagcacgctcttgctgatgggagcagcggggagaaacgccatactgggaagtcactgctggtgtgggacaagttacaagatgcttctgggggaggaaaatgtgtatcatcaactcctcaggtctggccaacttgctttatttcctttagcccccaaaggg

SEQ ID NO: 30252 - DNA, 2300 bp, Homo sapien
tgggaaagctttgttttggaaagacctttaggacataggaccaaacttttccaaagtgattttactaattacagaaccatccacaacataaaagagatcctgaatttccatgtcttctccacactgagtattttgactggattgactttaatggccagccccttggtacagtttatcgtggggtcagcgggtaaaattaagtgataagtgggacacactctctccacgccctgcatgaacaggttccttacatgtatgttcttatgtgcacgtttgtgcgcaagcttgcaggtcgccccgacccaaccggcatcaacttccatttagaataattgagggttaaattcccaggaattaaaaaatgaaactgaggcctctgagacttgtagttcggctggcggaggctgcacgcggctctctggtatctgtagtcggaagtactctctgcatatgcggatgcaggtgccgcgtggcttttgtcttgctccattgcagcgacatccgaggcagtggtgcaggacatgtccatgatcttaacctggaagaagtgggagcagctggaccagccccagaggaccccgtactgggaggtgacaccagagacctgcagaccactcgtcacgggggcatgcaaaccacagttgacctactagctgaagcagtgataaaagagcagaaaatacctttgctaaagctgctgtccaggtgacaaagtaaaagccaaagccagccagccttgtcctagggagccttgctcctggaaagactaactcagggagccagaagttcctccaggttgaggtgagtgagggaaagagtggttgtgagaggtgacagcgtgctggcagtcctcacagccctcgctcgctctcggcgcctcctctgcctgggctcccactttggcggcacttgaggagcccttcagcccactgctgcactgtgggagcccctttctgggctggccaaggccggagccggctccctcagcttgcagggaggtgtggagggagaggaaagagcgggaacccgggctgcacgcggcacttgcgggccagttggagttcagagtgggcatgggcttggcgggccccacactcggagcagccggccggccctgccggccccaggcaatgaggggcttagcacccgggccagcggctgcggagggtgtactgggtcccccagcagtgccagcccaccggcgctgcactcgatttcttgctgggccttagctgccttcccgtggggcagggctcgggacctgcagcccgccatgcctgagcctcccaccccctccgtgggctcctgtacggcccgatcctccccgatgagcgccgccccctgctccacggcacccagtcccatcgaccacccaagggctgaggagtgcgggtgcatggcgcaggactggcaggcagctccacctgcagccccggtgcgggatccactgggtgaagccagctgggcttctgagtctggtggggacatggagaacctttatgtgtagctcagggattgtaaatacaccaatcagcaccctgtgtctagctcagggtttgtgaatgcaccaatggacactctgtacctagctactctggtggggccttggagaacctttatgtctagctcagggattgtaaatacactgatcagcactctgtatctagctcaaggtttgtaaacacaccaatcagcaccctgtgtctagctcagggtttgtgaatgcaccaatctacactctgtatctagctactctggtggggccttggagaacctttatgtctagctcagggattgtaaatacaccaatcggcactctgtatctagctcaaggtttgtaaacacaccaatcagcaccctgtgtctagctcagggtttgtgaatgcaccaatggacactctgtatctagctactctggtggggacttagagaacctttatgtccacactctgtgtctagctaatctagtggggacgtggagaacctttgtgtctagctcaggaattgtaaacacaccaatcagcgccctgtcaaaacagaccaggcctctaccaatcagcaggatgtgggtggggccagataagagaatgaaagcaggctgccggagccagcagtggcaacccgctggggtccctttccacactgtggaagctttgttctttcgctctttgcaataaatcttgctacttctcactctttgggtccacactgcttttaccagctgtaacactcaccgcaaacgtctgcagcttcactcctgaagccagcgagaccacgagcccaccgggaggaacgaacaa

SEQ ID NO: 30253 - DNA, 2300 bp, Homo sapien
cactgaatttaaaaacaattggtcaggccaggcactgtggtttaagcctgtaatcccagcactttgggaggctgaggcgggtggagtttgagaccagcctgaccaatatggtgaaaccccatctctactaaacacaaaaaattagctgggcgtggtggtgcatgcctgtacttgggaggctgaggcaggagaatcgcttgaacccgggaggtgggagttgcagtgagccaagactgtgccattgtattccagcctgggcaacaagagagaaactccatcaaataaataaataaataaataggtcatggggattgatttcatcagattgcttatcagaatcaaaggaaatgattataggctttgaaaaatatagaccttatatttattattagtggattttgcaatattgaatcattcttgctaccctggaataaaccctacctggtgattatgtattttgtttaatatattatcggactctgcgtaacaatatttagaattttttcctcaacatatggaagtgagattcaaatctggtgttctttaattgtgtgcaatcttaatcactttaatatcagttttgaattcatatcataaaactaatgaagaaggctttatgttctatgtctgtatattttaagtaacattgaaattatctgctcttcagaagtttgttgtagtctctttgtgaaatcttctaggtatggcattctttttgctggggacaggaggagctcttgatgcttgagggagtcttggaatgatatgttcacgtgtacttctatcccagtcctagttgtcttggatgactgagggctctaggtaagaggaagaaggaaagaagtgtccaggggtagaggctacctttcccaaggaagatggggccgggatggattgatagtataaaggactgagagtaacaatgattctttgcttgaccaaactttgtcagcaaagtttgtcctgaaccttctcctaggcccatccatgcacttccttgtaaaatccattttttagccaagaacaaggataaatcagttttgcaagaacccctatccccctgtatctgatcacccttgatatcttatcaggtttctcatcctccaccatttctcagttcatgtctgatctaccctggcctgtctttagcaagaatcctattaggtcagtttagccagaatcttccttacacgtgatgttccctcttagcacttttccatccactgacccccactctgcttcttggtgataaattcccattgcccatgctgtattcagaattgagcccaatctctcccccactgcaaaatcccattgccttggtctctatacctattgtgatggtcctgaataaaggctgccttacctttaagaagtgtcattgcctaagttgtctaattatacgatagtttaatcccatctagaatagaggaggagaaggagggaagcaatgtgggtgtgtaggagggttgtgaagagaggcggcaggagaggcctaagctgagaggatcagccgcctcttcccaaagatttttcttctgactttgcattccaacctatcctaggggtctctgtcctattttcacagctggaaagaagaaagaaatttcccatagtcggttgaacttcttggcagccttggaggatggaggagatagatcctcagagccacctcacgggagggagttttgacaaacagaagtcagcggtcccactcccaagttctcctcatttgtatttgccagtgtcagccaagtcccatggcttgttaataagcctcagatcacgggcagtcctttcgcgtggagtctgattttctgaggcagctctctccacaagtggctttggaactccatcactcaggccgccccactgtgaggaagcttggctaaggctgtgagacagctgggggtgatgggacacagggcgggcccttcctggtgcctggggcggccaggtccccttgtcccccctgtgtcagggctcccgtgcttcctcgcccttctctcctaacatctaaggcaggaggcagggccttctcgccccccgccataatataacctgccaccaggaggcgctgttctacaggatggagagtggggagcttggaggagagagcacgaccccctgctgctgccgcaggatgttgcccttgattctaggcagagacaggaggcatcagacagctgtgacagccatggagctcccctaccacttctgagccagagggaagactttggagaagcagaagcccaaagacactgctgggagattggtctgtgctctgggagaaccctagg

SEQ ID NO: 30254 - DNA, 2300 bp, Homo sapien
aaacatgctatcctcctgttctatcagataaggagggcagaatgaagaggttgggtggaaccctggccttggagtctggagactaggattttactcttgacaaagcacattatatagatagggatattgtcctccaattttcctttcacttccttaattaatattgttatcaatactactgttgatgtattgaactcctgccatcttccaggcactgtgctgaacacttcaccaaacactagagaattaaatcctcacaaccctatgaaagaggtactcttattcctatatgcacatggggaaactgagccttcaggaggttgagaaagttttccaaggtcaccaaacaggatgactttggacccagtctgttaatcatccccctctagagcaccattgatcaaaatggacttgaccatattcctctttggactggttacttagcaaaaaacagaaaaattatttaacaattgtttaaaaccacctctaagtttctctggatatctcattatataagagaggtctcacctctttggctcccacccagctcaactatggaaacacaggctgtaaatttttatagcccaaatcctagtgtccaccactttctgtgctctagtcccactagctgctcttggccctgccactcctggctccccggccttagtgagtttgggaaacatccctccagttcaaccttggcaccttcccttggacacacattaggtattatttctccttcagctgaaggctttgtagctattgaaaggcaaggcatctcttgatgtgagccttgaaggacaggttgctttgggtaggcagagagaagctggtaaggcgtatattgtctaagggtctggaggtggggtataaggggtatacaagtcatagagttggggataggcagaacccagagaggggagaaaactggcctgagatagaagaccttgcaagggagaaggagggtaggagcctggatggtgtgaaatgctagaggtgcatggctggaatggagggggtggggcaccaggcttcagatgcttctgggtgcagatgcagattttcaggatgtacaacatggagcatccccaaggcaactgtgttgagagcctgcgaggcaggtgaatgtggatcttctaccccctctcctgactgagttcaccaaggaacaagctttgtaaactatttgagggtaggggctgtgattatttactctcatatcctcagagcctggtgttgaggttggtgctttgtaggcacccagggactttcaaatgaatgaagggagggagggaggaaagaaggatgggtccatagtaggacctggtgatgggctgggagctccaggcaaatgtcaaccaatccctctcctgggtcagctcccaggggctcacccttctttgcatttccagctctcatgaggtcattgtgcacaggaaagctctctcctctaatctcctctgatcctactgcaccagagaaatcaagccagaattcaataaagtctcagtccagataaacaagacaaaagaaataagattcgagtagaagatctccttcaagggaaagttgctgtgtttgtccaagacctttgtcccatccatgtatcatcccccaagtaaacacttcttgttcacctgttcattagatttcaagtgcagtccctggcctgtaagtccctacaatgataagcttctcttatcattgcacattcttcatcaggaggatgccagaggagctcagccaacagttcctcatcagtagcagattcttcagaatcttgggcactacacagatgcccttgagctctttgaataaaggctgatttttagaaaaaacattaagacagaacttaaaaacaatagattgactataatccaaagacgagtgtacctctaaccacaattttcatttatttttaaatgtttccttcatggcctttcttgtggctcaccctatgcagtttgtgtatttgttgacaactttatgtgtttttaatatggtttttgccaaacttggtttttccgagaccgtcttttctcagaggctcagttttaccgtcctatctgcagtcggctactttcagtggcagaagaggccacatctgcttcctgtaggccctctgggcagaagcatgcgctggtgtctcctcctgatctgggcccaggggctgaggcaggctcccctcgcctcaggtaaggcctgaaacccagcagagcagcagggaggaaaaacaaggctaagcttggttggagacttgggtgcttgtgtagggaagactccaagagcatgccacagct

SEQ ID NO: 30255 - DNA, 2300 bp, Homo sapien
ttttgagaaaaaatatttaaaaacaaattggctatgtaacaaatttgtgtgtgtgtgtgtatatatatatgtatatgcttatatatatatatatatgtatatgcttgagaaagtggtttttcaagatgtatgtgtacagtacacacatggacacgcttcagtcctctgacttcccatgtgctacctcatgtgtttctcttctcatgaggatttgcaatggatagttgtacaacctggggactgtcagtgactcattggtatcagcatatgctaaagaagctcttgaatccaatcttgaaacctgatctcccttcgtcaacattccccaataccaaactggcccgtttacccatacaaatgcacagtaaagggaagaacagcggtatttttcctagccaactgactctatcatttgtttaatgtttgctggtttttttctggttttgttttgttttagagcaggggtgggagtggctgtaacttcacaatcctaatacagtaaatgttttgcatcttccatgttttatgcaaaaacagacatttaaatcaataaataattgtgccctagactgaaggttaatgtttaggagaggaaaaaaattgttggaattttttctacatttttttgtgaagaatcttttttggaaaggaaggatacatatttttgttgtgtaatattttctatttttgaatgcattttattggtacaagactgtttttttggtgaagacattatttaaaaaaaaaaaaagaaaaaaactaatcgaaaagtttgcccttaaggatatgctgcagttttgaggttaaaaaaaaattactgattcaagatgcgtgttaaaagttgggattatattgttgttttttgtaattgttacaagaagaagtttgtacccactgctgtttattttgtttcagatgagtaagtaaagggattgttcttgttttattctttttttagagaaaaaaagctatttatgaaatgtcaaaaacactggactgtgagtttaagtgtggaagcattttaccaccctgtgtcttcaaccaattatgggaaaccccttttctcttccccctaccccctgccttagccttgccaaatgagaaaaatataacagctgtcagattatcaaagccaccgaagccctgctttaatttttatggtttgaaaaagttggaaaaccaaagttaaatttgtttctgaaatcctgctgtgcgttgcccttttttgtatgacacagccgggctctgcctctctatctcaaatcattgccttcttagggactgggggccaacctgatgcaaagagaggcataaaggtggtgagcctgagagttgaggtctcacgaagtaaaatgtgagtgggacttcaccctctcagtgggcaaccacactttcccatcctgagatgaggctgccaagagagcacactgctaacactgcctgaggagagcacgcctcctgtctccttcaccctctgcttctgagaccctcctgttactgttatcatcgttccctagcctggctctgcctttctcagcagcccacattccatggatgggagcaggggggcagggacccaaaggagggaaatggctgtgggtggtgtgaaggccccccagccctcaggaaggtggggcaagagaccactgagcacaagggatcttgcccacctcctctttgactctgtggattatccatccatctgctcactgtgaagatggagaggcagtgccctaaggctgttcaatagcttttccatattttttcaacattgaaaaaataatttttaaaaactgtgatttttttaaaaaatcatttggctggagggaagggaaaagggaaacaccaaaagctgtaccatgatgaactggagatatttaactggggcactttccagaccaagacaaacaaattcctttctggactctaaagcagccgaatcttgagactgtcaatgacagaaagctgaagagaggcctctatttcttcctttttcctttcttctgtctaaaaactctctcttgttccccttttccagcttcccttggactactgccccaatggccccttggactcgcgtttcatgtatgcgagcacacacacacacaaacttgcaaaataccgtttttcttaaggattgtgggaccgaataatatcacgtgccttcatcttttccttttatagttagatgaacctcttcctctttacaatttttttaaaaagtgataggggaggttgatgtgttagtggaagatttgggcatcgtttgagaagtaacttttgtttaacacattccccct

SEQ ID NO: 30256 - DNA, 2300 bp, Homo sapien
agttctttgtgatgctttgtaaggttagtgtaactgaagtgtttgtgagtttgatttggtcccacagtgcttaattcagtggatattttgctagaagttttaatgtaaacttgggtggttaactgactattaagtgtaacctattgtgatttctaagaggagtcctgccaagaactgtatgtccaaaactgatctgttttaacagttagtgaggaacagcttccgagataaagtaagttcatttttctattgctaattttgctttttaaaatagcagtgttgtaagactaatatttccacttaccaccaatagagggagcattaattaactatgtcatggaattgttttgatattttggaaaacaagtgattccacccataaaatgaaaagagaagattgaccttaagaaaaaaactcttaaagctaggagacaatgacatgaaatcactcaatacatgttacaaatgaaagaaggccaaaagccactttaaaatattttaaactgtttcacagtagatttgaaagtgtctttgttcaaatttagcaaagtaggaagaattttcactaataccgcctgaaaagttgatcttaggtgccattatgggccacgtgtagctttctgtttctcaaatctgagagagacccatttgccttaatgctgatttgccatgtaaaatgctaagcaattgggttagaatccaccttttcttttggtagaacatgtagagaaaaagctgcaggtgacttgaaaccctgaggagtctatcatcctttccctgtaaaggaagtgtctcttaaaaaaaagggagtgggggaggaggtggaggatccctaaagaattcttaatgaggtgatataatcattgtagtccatgacaaaatggaccagccaggtttgcatagcagtagacatattcctactgtacatttatccttcccaaatatgtcacattctaaaatagttgacaaattattttgtggaaagaggaagaagctggattggagtgggagatctaatctggaggagcaaagaggtagttgtttattgctatgttcctggcccatcaaatggccactttccaaactgacccacattttaggaaataaaccaatctggacctgtttcaaaaggatagagatgcttttagattgtcaattctcacttttaagttaaacaatcacaaatatctttagaaatagggaaagacatttgcttcaaaatcaaagaatgagtgtggatctttttaatttttttttgtttcaagtcctacagtcatcttacatttagaccttcatggtagggtgatatgagtgctaaaaaaatttctttctagtagccaggaaacagatagataagataaaagcaaatgttccagatttaagacttcttaggatgagtacaaggaagagagaaatagtatggaaaggacattttttagcaatttataattttaaaatggaatttgccaaacaagggagaggaaaaaaagtcaaaggggaatttttatctcaagatatttagatatggtttataaaaaaataatattttctaccactaaaaacactggtattatctcagcatcatgggcaatttttccttattacatgccaatatttgtacaaaaaaggcccccaaatgtgtgaaatataatcctaaaaaagaaaataattggaacacatggatctgttacaattctacacagggggaaacaagctaagcaaagaaaaaaaatctgaaatgaaaatctctgtatcaaaatggtttcctgtatcttttaattgagaggtaaactttagctcctaataacagttttatagaccgttctcttcccaaattcctaatgctttgaatctatttgtgccatgattaagtgtgctggataatttcctgctcatattctagcctcagttcattcctagtcatcttagagatcatagtagctcttggccttagaaagacttgggtttgctgtgtttaaaagtcataagggttttattttgtatcatcaaaatattctataaggtcccaaatactctttttcaacccatgaacagtaagaatttgtgaattctgataatgaaaaaagttttcctccaggtatgtttgtttcacattcagtcctaaagccttgagctatgtgtacttccctcacacaggaacaccagctgtcctgtctgtgctctgcctgcgcccaaaactcaatattttctctcagcacagaagtcaaaaatgagatatgccccttataaaaccccttcgattcctgagaaaacataataaagccatatgttgcttcctt

SEQ ID NO: 30257 - DNA, 2300 bp, Homo sapien
ttatatgcttggaagtactctaaagacttcacatgtattaatttattctcaaaacagcactataaggaaggcgtatcacgattattctcattttatacacaaggaaactgaagtatagacaagttaagtaatttttccaaggcgacaaggtttagtagtagctaagcctgaatttacacccaggccatctggctgggtgtaagagctcaagctcttcctgactacagtatgctgcctctgaaacacaaatacttgaatatggcttatataatgacctgagtcttctcttctgcagtctggacatccctaggacatcccttctccataaagggttcctgtgacggtgtctcttggtggcagggtgctttgttcttatgatgggaggaacacagttggggtttctagaagaggcttgtggtggggtctgtttaaaatctgaaagatgatcccaaaccttcccttctacctgctctcttaccttgccttcccacagccccctcagcccctgctgccaggcctccaggtggggtgacactcacctgtgtgtacgaacatgtgcttgacgtagttctgtttggcggtgaaagtcttgttgcagagagtgcactcataaggctttttttcgccttgcccactggctgtgctgtggcctgcggatgaggccaggggctgtggcgctggcagctgtgcagtaaaggtcgacagaccgggctgggacactgtcacaaactgggtctgctggcctgccaggggctgtggcaggctgaagaggaaaggcttggggccactgcccgcgggctgggtagtgaagagggctggcaggtaggtgttgccagctgtgccaatgacctgcgtgttgctggtcaaggtcagaggcatcctcaggttgctggtgagggtttctgtctggcgtaagtagagctgggtacttggcaatggctgcccgatggacgtgttgaccgaaggctgttgtaggacgctcttgtcggagctgttgctgacagtgataacagtgctgtccatctccacttcattgcttctctccggagaggaagcacctgtttctagctggtttgtctgcggaccaccctcagcgggggcttctgcagcctgctcgggttgggtgggttcagcctggctgtcccgcgccgccccaggcccaaactgctgctccaccgagtcaggctcggtgcctatggaggagctgacgcccgagtcgaagctttcacctttgggctcactctcggtgccctcggcctggtctgtgtcttccgtgcactcctcggattcgttgcgttccaggatctgcaccctttgctgcccgtagtagtcgtaatcgtcctccatctcctgcttgatgtggatgttgcccactagggtctggatgcgcacaggccggggctgcttgcggcagtgcgtggtctcgggggtggtggacaggtagcgctccatctgctgcgagcgctcatggatgcgtgtgatccagctggggtcttccatgtggtggtcgcggggcaggccgagcgcagtctcgtggtggctgaccactgcgccgctgtaaaaagagcgctcgccgctgccattctgcatggagcacgcgtagagtgccgagtagatcctgtccacgctgtgctgtgggtggctctgcaggtagcccgactccgtgtcgctgctctggcctgacgtgcctgactcgggagtgccccgcggcgtgtcctggcccgagtcctggatccccgggaacacatcgcccacgttctgtgacacgatgcgcgtgcactcgtcgatgactgttttgatctgcaggatgctggcggccgtgaggatctgcagagcttccgactgcgagacccgtagcacgccgctgtacatgaagtcaatgagcttttgcactgactgcactgacaccaccgacgggatctcgatgtcgctgtagccaagcagcagtttgtcctggaagaaggggctgccggctgccagcacgcagcggtgtgcgcgcagcatgctcccgtggatgcgcaccgttacgtcacagaagtggccacggttgcgctgctcgttgagggtctcgagcacggaattgctgaagttgtgaaggttgatgctgtgaatgcgctcggtcatccccttgcaactgatgtcacctgcagcatgtcaacgcagacacaaaacagggcatgggtcagatctagctggttgcattcctaacacctaggtttcaggtgagtaatgctcatggctcctagaagcactgcccttacatacgcaagtggggagatggacaggctgcggcatacaag

SEQ ID NO: 30258 - DNA, 2300 bp, Homo sapien
atcatgggtacatcataaatatttgtaaaatgaatatgtaaatgaatgaatgacaggagagaaggaagaagaaaagaataggtgaacactaggaatactaaaataactaagacatttccttaccttcagagagcttacagtctcacaagagggatatgcacataaatagccattattgaaataaaattgagtgagtgaaataagattaagaaaaaaaagagcttaggcatttcggagaaagacctagggaggaattcactgtggggagtgaagtcctacctggcagagaggaatcaagacagttataagatgaagacaccatttaataagtatgaaggataataagtatgatttcaacagggcagagatgaaatatgggatattcaaagtaagagaaaacttgagcaaagatgtagagcccagaatgtagattcccaggatgttctggaggatattcaagaaatctgagggtacagtatggccaatatacaggacacatgagaaaagttagaagagatacggaactgaccttgagtgtcaggctaatgtagtcatcttagatttagtgaatgcaaagaaacaggactagaggagtgaaagaggttggagagccagttagtaaacaatcagctagataaaaagcagtaggtgattgcagtgaaattggaatggaaacacagatgtgagaaaaaatatgaaggaagcagaactgtaagaacttactgatgaattggctttaaggcagaggaaggtgtatagtgaccctgaggtttccaacctggtggtagacaacagtgatagagatatggaccttagagaaagcattggttttaataaaggagttgggctttagcaactttgatcttggctacatctttaaactgaaaatcagaataccagctccttcagggtccatgtagacactcaagatttgggggttactcccatagtcaccattcaaaaatcaattgataaggtcttataatttgttgcttctcttgtattggcttcctccatactgaaaaagatgtctgaaagcctcacctctattctaatctttgccatgccatctctgcctcctgccctctgaagaaacagattttatttcacaacctgttggactgaaaacacagcatactaatcataacaccatattctgcgagggcagatttaactacccagcacaacaaatttaaatacaaaatattctgcataacaagtacattaccatgctcacagaaacaagggaaacatggaaacaaatctacttacaacaaattctgtaccacacatagtcttctacaaataaaataaatgctttttctggtcatgtccacataatgatagaaaaagacacaaatccaagggaattggagaaatgttcaggaactattactaataaaccagtttggctgtggtctagggtctgtgtagtataagctaagtatttgttaatttcatatcagttgcattgtcctggggagaggagacctgagctgactgatagctgtgctgttttacttcctattcctgaccccatataacaattagtaacaattactttctaattcccttcacccttctcttcctcatgtcccaaacacacaatcacaccctaaactccaggacgatgcaccaaatcaaaaatcttaggcgtaggatgagtaaagagttggagtagaaaaatctctgcatgacaccttccctctttagctactagaatctaagctcttcttttcacttttcacttgctactctaacagaaacctcccatcactaccccctcatccgtacaggctgcaaatttaaattgtgatttgaaattttatttaaaataaaatcttaataagagcaggaaagttgaatgttccttaatgtagtccatgagtagaaatttaaagttggaaggaacctttaaggccttctaatccaagccctttattttacagatgaggaaactgaagcccagagaggtgaagtgaggtgcccaaggccacacagcaagttagaggcacagctagtacggtagctcaagtctcctgactcccagtccagtgctcctcccattactccacgagtcctgtctctaagcttcctgacaaatgctagaacggtaaaacttccactagtatttttccagaccatgttaaaactcctaaggggggaagagggatgctttcttggataatgtcagccatacgtagctcaagctgtctaaagttctgggacagggtctttttatgcagccaacagagtccaaatgtggtgctgtttgcttggcccatatgctttcatgtgtt

SEQ ID NO: 30259 - DNA, 2300 bp, Homo sapien
ggcatgcaccaccatgcccagctaatttttgaatttttggtagagacaggatttcaccatgttggccaggattgtctcgatcacttgacctcgtgatccgcccgcctcgacttcccaaagtactgggattacaggcatgagctaccaccccttgcccggaaatgtcttcttaaagctaacatgatgaatatcacagaactaacaatccctatgagaggaactaccattattgagctcttaccatgtgccagcacaaggcaaatcactttacatggcttatctcatttgttcctcacaataaccctaagcggtaggtattattattcccattttacagatgaggaaaatgaggctcagagatgcggagtaatctacccaggacatacagctaataggtagtggagcgcagttccgctaccacccttattggggtggtttgttaccacctaccctttctctcctgcccagatactaagcctatttaatgtattgttggggaaaagagtagggaaattgttacgactccagtaagattgggggaggcatcactggtctaaattatcatgagccaataggaggttccaactaattttttcctatctgataagtaacaggcacattacttaccagataggaaaagaccaagctgataagtaaaaggcacattaacgtgcaagagagggtgggagcccagtgaagagagaaaattgggatagggtgaaagaagagagcactctcaacaccctggagactgctaagagctcacacagataaaatatttatttttccatatgttgcagaaagcattgccatcactgtatgtgtgcaatatgtgcaaaagagtgtgaaatatatacatcaaatgccgccgatctggttaatttccatgcatttaacatgcttaatacctaccatatcatcaatatgttttaatgcatatttctttccacatacaatatggtctagttaggaaagagccaacatcctccacagccttactcactgctatgtttcagcctaaaacttcttgctggggccagcacaatgagagttaaaaaccagaaggctctgctggctaactcggccgccagtctccttaaaacacactcccaattcttgaagcagccttttctcataacagaaatgtttgcagtgaggagatgaaaatgtttttgttctccttggacaattgagagatgttcagtcagaatgtcagaactgaccgttgaaaggcgggtgcctgcggccacgcttttttgccttttttttttttctttttttgaatgcagagctccaccagtgtggcgggaggaagtgcacaatgattggtctgtttctctgtggaagtgttcagggtacacccagttttgctttgcatatatttgcgaaacatctgcccttttcttattcttaagtccttccctgtcaccagcccccttttcctttttccctggtttctttctttgttgttgttggcttgtctaactttttcattggagctttcattttccggttgaggggcgacttcatcagagtgtataattttaacagagagagaggaggaaggggttggagagagagagagagagaaaatgagagagagagagagagaatgagagagagagagagagagagagagagaatgagaactgaaaagaaagagactgagaggccagagcctggcaaatcaacctttggcatggtgaccaggaggaaggttctggtcgggagttcgcctctctgaaatccgctggagtcagccagtgtgctgctgccctctaaaggctccagggaatagtgcatcgccacagaggcttgaaaagacttgccctcagatgtgccatgtttataattctttttatacagcctcaaaatgtattttcaactaattatgacagggcttattctttcctccttaataaactatgaactgcaaaaatggggtcaattcacagcacctgtgcatgtctagacgtaaacgggtgctatgttttagggtttctcagctccggaaaaaggagtccgaagaaccattagagagggtgagacaggacatgaattgcttctgaggatggtgagcagttctctattatctggacagttgggaaacagcccagtggtataagggtaagtaaagtgatataagacaaataagggggtgagccaaaaaggttgagttgctaacatttcctgtttatagaggtagctccaatgcctctgtgctatcaatattctcccaaagtgatcactgaggcaacaggagggtgtgatacaagatgtcaggtaggaaacaagagcga

SEQ ID NO: 30260 - DNA, 2300 bp, Homo sapien
ctgaggctagaaagctcatttgcccaagattaaacagttagtaaatatgtgttcagatgacttaataccctctgaaatgaaagctgaaagtttattttacatttccttacccatatacatctgtgcatctctgagggacaacatttaggaatatgtggtgggtcctcattactcctcttaaaaggactttaaagaaatattttactcgtgttcccgaagtctgttgctctccttctgttttccatgctgttttattctacatcatgtgacttgagattgctttcttccttctttatggccattactaccatttcctgatagttatcagtctccacctggcatcttcatctagatatggtttctctaagtctgttcagataccaagacttttttttatcagttgacttatagagcaatttgcctcctctgaaacaaaatgtctatcactaattttttttatgttgaaccttgtttttctatctattttattttccctctccccttgctatattacagtactactgcagagggagaagtgtttgaagtcctgttagtgggagcatcacttcttgatggaggtctaatggaggtctatgttggccccattgagtagaaatatggtcacagtgtcatagttcccctatgttttatcattaactggtaactctcttttctctaagctcttctctacccccacccaagctcaacttaaagagtactcctctttaaccatttcatacaggctatatacagacactattaacccaaatgtacacctttgagatatcagactcatattattttatgaaatatgaggcttttcttgctatttaactgcagtgccttgcattttatttgttttgctacttactgaattgggaaaacagtaccaaaatactaggatagtatataggaagtcaccatttcttaattcaagtttgggagcatgtggaagaaaagacatttcagaaaccttaatgagcatcttttatcctccagggctctaccagtgccctctttttctgactgtggtactctgttttgtccttgctatgtttggtaggcagcttttttttttctcttgatgcttctttttttacagtcctacaatcttcaccccagagctgatgaggcgctttcattttgacctgcagtatttctgtgtattgcagaacagagccctgccatctagactgcctttctgcttcattttgctcctgacctaaacccccctgctattccaggcctggcctctcatgaccagagactgctgactcatcctggcctgtgccaagctgtgcagtcgcttagtgatgtggacaggagtcgaaggactagaatgagatcactgaactcatttcacttgttgcttacggtacagtccagcatgagctggaaatgtaggaacctcagcctcccgagcagaaagagtaagtagataaaacacaccgcatcaccaagtcctcaacaagcagtagtcgggtggtgggtgggggctcgctctatcatggccgtggctagggcattctggttcatcaggagttttcctttgtcctctcttcttcctcttctccacagtcgtacccttccccccttccctgaacttcccttctgaaaatgtctggatggtacagcagtgatctgggcagaaatgaaatttggctaataagcagcctctgcacaaaattctggaacagtgacactgttgaaattgcttagtttagtttgtctactgggaactcacatgaacttcccaacagaattcaaggggatgaaatcttttttgttctgttttgttctcctttcctttttgattctctttttctttctgttttgagggaggtagtttcaggagacatggctgcattctggtgtggtgtaaagttttccgtcgggagacaataatgtacattcctctggcaggacgggatgggttttttttttttttgtttctcttactgttgtttatttataagacatttcctcccagttagtggaagttagatcgtaagaggctccagtgattttccttccacctcccctccctaatttctgtgcttcagcactctggaacactgtgaactcgacaaactaatcagagcagggagcttaacagccaggcctggacaccctcaagagactgtgtgctgattctcagtcgtcactccttggatcaggaaccatagtcctggtgagtggtgaggttccagaatttgatgtgtcaaggattttattcttggtgtctctaaggcaagcaggaaataaagggtgtttttaaaacaaacaaacaaaaaatacaa

SEQ ID NO: 30261 - DNA, 2300 bp, Homo sapien
ctaggagtatttactatctatgaaagagctttttgggggtttaggagtattatttcctttctcatttaacatttgcactcttagtcccatatagcatgtgctatctgactagaagtagatgtgtgaccacaaaatggacacagatttttccccttcctttaacagtcatgcaaatatgatttatcttatggtacagtgaaaacagaagcagtagaagcctgcccatagtaaaagaagataaataggcaagaaaacacagaaaggcagtgtgtgtcaagcatgtttcatgtttgcctcagagaactgaaacacacaaagtgagaaagacatgtatgttactatgtgccagtgctagagatgctgcatgcttttttgatgatatcaagacattatagttttggggaacatttgtttcttaataagtttatttttaaatcctgcaatatttaccatctgaaacatttatctgaaattgtcatgtattaaatcccatcttttctagaactggtgctctgcttctagtaacagtttgagaaagggttcaaaggtttgcctctccctagaatgttcttctcaccactggtacttctacccaacctttacaaatagttgatgcatcacttctaggaggcccatcctacatgtttatgtatatttgtgtcattgctctggctatattgtattacagttttcagttgagatgtgtgttttctcttttagagtctggtgactaaattgtgagcttcttgaataacgaggctgtgctttacttatctccaatattattcagttcctgaaatagagtagatgctcaataaatatgtatccaataaattaataaatttgcagtctcaaacacaggcatatattcttatataagattaaggacattaataaaatttttttatttgtatgttcctaaagtgattgtgaatctttggaaattgtttatgaacatattaatatgtttcttagtgctctagtcactttgagggaaattttttaatctttgaaaaacatattttttaatctctgtatattcttttttaccccgagcattacttttgcataatggactcaagtgtgttgtcaattactgattatttggttgagccacacagaaactgttagaaatccttatttttatttgcacactatctgtttggtggctttgttcaagcccatggattgtcagttaaatggaaaagtcttactttcaagcaaaattctcagcatttaatacagtgtgtagcatatatttgggagtcaataaatgttcatagaatgcatgaacaaatcagtcattgttgcaaactgatttgaggatgaggtatgagattttttttttaaggctaaatgaaatgcccagtatcacatagcaggataagagaaaatctgacactcataactcatacttctgtgtttccagactgttacccaagctcactgagaagtgcagtatatgtctgatttctcaacttcaccctgcagtaaacttttgcaatccagaggctagagacctcttttgtgaatgttgtctgcccaatgactgtgttggcaccagggagtccctagcagataaagtggaggaacatatggtttccatctgaatacaaattggtggacataacgtggtaattcaactgagatgtcctctatattgtaaactgaaagagtatgattagaggtgtttataaacggcatctgaattcccccacacccctccccatcccctttccactgtagttttatctgtctgaatcatagcaatctagcctcccagcctcactgcattatttgtgaaaatggccagtgtgaggaattattaattaaagctaacaaatcaccctgacaagctgtgccctggcatggctgaaggttgattggcgaaagtcttctcctttggagaaaagactttttgtgctcgtgacgcagtcagggacggattattgaatatgcaagttagaagaaaaatcacaggacaagcaaattgagtatttactggcaaataattgcactcttaagctgtggctctcttcctaaattcttaacattctcgagggttagaaagaaacacagaaaaatgcatcggtacagagtacatttcaaaaaaaatacatagactgatgtttcagacttgtgcaggtaagtgtgattgtgtgtgcatggaaagtgaaagaacaagggaaagcaaaggaaagataagggaaaaagcataactgttagtctggtgagtttttaaaatcaacttgtttattggagctcagcgtatttctgagttggaaatttagtttcagtgc

SEQ ID NO: 30262 - DNA, 2300 bp, Homo sapien
ggctggcccaacggaatgacaaaaacacttaccaggctaagtggaatcagatttaagctttcacttacaagaaagataatgcttttcaaatgtgttttcttatcatattgtgatttacatgtgcaagtctcatttgtactggtaacatttgagaccacatatttccctgtgtatcaagaactatgcatatttacatgtatcagaaaaatctcttggtacatgaagtattgggttcatagttcagcagttaccatgtaagcatttttgttggttcagagaatcctacttttctctcctacaaaaatctataattttactgttataacatacatattatactttcttataactgaatatttgtctcatccaatagattgcctggctcataatataaggtacctggttatagagtatttgccatagtaatggttagataaggaacgagtaaatatttgcttagtgtttataacactattataatagtagttacaataaggttaaattggagaaattaaaaagcaaattccttctctttcctgtgatttaactgactttaccagtatacgtatagaaatatcctgttcccaactatattttgtatccctttcatttttcatctgttttaatttattttattgtataattgtgtacttttggaagccattttaaatctttttggtttcaaggatcgatgtatcagtgaattgttggatgggtaaattgattaaatacagtgtacatttttagggatttttctctccacaattgcacaaataatactagaggagactagctaactcaatcctccctcctttcttctgtcaaccccttctttccattttctagcgaatatttatggaatgctagctctgtgccagaaactttgtagatgttatagataactgttgaacaaaagagacttagtctttatccttgttgagcttatagtctaacagggagatataataagcacataaataaatattagagacatagatatattaataaatgactattttgctaaccttctcaattctagcttgggttagggaattgagtctacggtggagaaaattatcttcaatgatctgccttcttaatggtggatgacttgtagattaaaaattgtggagaggccaaagtatttcagattatgttttaaggagcaggtggctttgagatgaagctaggtgtggtaatatttgcatccaagatgagtcgtaaacagttttgtaaacctggcttactttatatgatatagaagatctccatagacatttgaaaatctcagattggaatattataggaatttctagtatttttaaattataaaaatcatttcttttgatgattatttatcaatagcccagagttcattcgtgaattggggtatagtaatgatgaaaaaagaggaggtgaccgaagtgtgttttcttttttctcattgggtgtatatgtggagtatttttgtcttctgatcagatagttcattatgctcccttttggatgtgtgtactgtttggccttccaacctgcatgcttattcaaaggcattccaagtcattatgttggacttcagccttgttcagtaaaaggctatttcctccatcagctgtccacttggacatacattctttttactcgcaaaaatatttcatatgcattcagtttatattagatgcatttgtcaaattactcacaaataatcagttttttaaggttataatttgaggtatgacctctcaaactgtaaattataaggtttgacctttttggttcacagtttgacataacagccattaattacagtttttaaagaacattttatttcatttagaatttgtattttgaaaacagtttaagtattttctctctaagtttttggaataaatgtggaaatgtaaatgcatatgtatctatatataatatatacattcaaatatactaaatagattgcatatatacgcatgctatattcaaatgtgtttatgcatagtacattggtatacatatatacaaatatttttatataatagcttgtgagttaacactaagatcttcttttatacaactctagcatcaggatgagatcaactcttttttttttttttgagacagagtctcgctgtgtcacctaggttggagtgcaatggggtgatcttggctcactgcaacctccgcctcctgggttcaagcaattctcgtgcctcagcctcctgagtagctgggattataggtgcccgccaccacgcctggctaatttttgtatttttagtagagatggggtttcaccacattgg

SEQ ID NO: 30263 - DNA, 2300 bp, Homo sapien
gagaggttggaagagcttctgagcaagtggatggtaggagtcgggaataagaaatatcagaacaattagggaaaccctccaatgccaaagatttatctgtaaaacatcgtatattagtagccatttgaaaagttaaaacacttttaacaagaacttatttacagtagtttgaagtagattatttagaacaaacaagttgaatacatggaaaagaaatatttctcccaattagttattttcactttgacataatcttttgaggaagcaatgcttttcttaaactgtgttctaacctgaaataaatgacagaatgtttgaatcaatgacagcatcctgacaggataggggaatatttttgatactgtgttccagttctcatttcagtttcttacatgaactatttgttactcctgttatagaaaatgacactgataatgactgacatttattgaatcaccccttgtgcttataactaaactgtgaggtaaatattatcttattattcttcacaacaatctcataagacagatattattttcatttgaccaatgaggaatctaaggctaaatgagattaaataacttccacaaagtcacgcatctggttatgcagagttcatatgagtcattgatgtaattggtagaaatgattgccaagtctattgtgtgtactgttaagggcaatgaaaagagcctttcacgtttatcctgtaaacagaggaaggtgagctttttggaacagtagtggagaagggccagagagggagagccagtgttctttttagattgctatgaatgagtgaacttaatcagaaaaggccgatgccccagtgcagcattgtctttcaaaactttaggtgctgcttttgaccctctttaaacatggatatccaaggcagcttaagagttggattatgcgttgctgtgaccaactgaggggccaagagcaatggcagctgtatggcaggttcttatgactcttaattctatttggagcacttcctgtgggcaaactcttacctgacacagctattcgagatccttagaacccatgagacctgatgccatgcaatgagtattccgtcagttacatcactgagacctcaaagtctgtgatcttaaccagcatgctacttggtataacaagcatatttattattcattgtatctacatcagttacagaaaagcccaatacctattcttccatacagttttaaactctggggtgatatagagcttcaactcggaggaaaaaataatcaattatataatatggtctcttatgaatgggaaaccctcaaaactgtataaccaattagaaattattcaaatttcttttactcgcaagaatgtttaaatgtgggtgaattgcagagataaaagaaataaaccctgatatttctcaagttctgccataaagaagtctagtttattgccttagtttcaaaagaatagttttctaagtatttcaaaatgtccggctggctgccccttccattctctttggaagcttctttgtcatcctcgtggcacatccctctggcatgcatgaccagctgcaagctaaaccctgtggaataagaattctttcatccctttgtgtgatgtgtttcattttcagagtttggatgatcctcttcggcagcagcagcaggcattgttagtttcaataggctgcctggatgcacaagaacagtcatcatagagagacaggctctcagggtccgtcccttcatgtcatggtgctgtgttagatcactttcctctgctggattaatggtcagagaaaaagggaaacaaactgtacccaaaggaatccaattaaagcacttgaacttcactgacgtctatcctattgttttcttaacttcctaacctatggttaattattctgaccagtggaaagaaacagcataaacatgggaattatcttaaattccctactttgtttagtttgtaaaggcatcaaaattttactgtgcaggatggaatactaatttggtatagttgaaattttttttggctaatctttctatttcttctttactctcctcaccaaaggcactgccaggacttaccgtacaacactccttggcttctggaattttatctctgctcacagtctacattacaacattagttcattctgggcactttagcttccttgaatctccagttgatctcacacccatgcctatgatattcttctcctggttaatcaagaattctctatttctgctccgtcatccatgccactgtaagtaggaaagtaatttaggcttttgaatcacagccttgtc

SEQ ID NO: 30264 - DNA, 2300 bp, Homo sapien
cgccaccacatccggctaatttttgtattttttagtagagacggggtttcaccaggttggccacgctactctcaaattcctgacctcaagtgttccgcctgtcttggcctcctaaagtgttgggattacaggtgtgagcagctgcacccagtcaatatcactttttagctaagatttatatataagtttaaaagtgttttggcttccaaactcactagcaattcccagacttcaaaattgacaccacacacagtaattttctggattctcaaagcctcatacatataatcctcacaagatagctttaatagtattaatgaggtcaaggcccttacttttttttttttcaccagggccaatttattttgcttagtttctgtcaaagacctctaaccaggcatcttatgtgaaagcatgctgtacgttccaaagaagcctgggttaaaatccagatgacttaagtctattggaaattatacatcaaatccatgtcctagaaacaatgtcattttcaaatcccaagtacagtgtattctttgcatgcatggtatttttgataaagtctcttattttgtgacaaaatattgctatatcagctgcctaaaaaagtgcaacttagtttggcagtaattatttttttttctttgtatagtgaaaagcgatttccccaaccctcccatcttggcccttgtaagaaatcctttttaggaatctatcctgggcttcctgctggacttcagcctcatttttttctccaatgcctgagtactggaccaatatttggtaagaatttggctctggggagtgctatgttgaatgacaaatggttgaggacgaagattttattgaagcatttgaaccacacttaattttccgtgttgctttatttgttccttttaccacccaggatattgaattctgtgggctctggttgagtcgttggtacttcaggcgttcagtaataagaaacataatctgctttttccggcaggataataaatctcatttatattaagggaggcttactccaaactcttttacatagtatttttctaaatcttctgcatgaacaaattcttccttgagccctagcactggggacccggtctggcaacctgcgccccattccgcgggaatcaagcgtgacccggtgcggccttgcgcgctgccgccagccagaccctccctccggctttcccacccaccgcccgggatccagcctccatcccgctgcctcagctgtccaagacagcgacacccccctctccgctcccgcggctcccccggcgcagctcgccgcgccagacagcgggtaaccgccgcctccgctggggcatcccggctccacaggcccagcgcgctccagacacctgcctctcactggccaccgccgctgcccctcaccccgcagccctctcggcaattggccccaggccgccgctcgtcatcctcagccttctcctagagtaccgcctccgtcgccgggtcatttaagtttatcacaaataaataaataaaggaggaaatagaaatgcgtagaaagtaaaagcagtagggggtgggggagatggggcgtggaggaaaaggagggaggagcggaggagtaagcaacctaacctgattgcgcctgtgtcgaccaatcatggctcactccagtccggtctgacgggctccctgaaccaatagccttccacctcccggatcactgaacaacgagatacgattgaccttttcagaaagggtgaaggtgcggcggggggagggggttgtgggggtgggcgaagtggaaggattgtccaccaatcgcctgttaatacttctctgagcgaagtttccgcgtcccaatggatgtttgagatagcggattgggcctcttttagcccaatcgaaggtgacagagatgagggaagaggaagaaaggggcggggacgggggggcggaggggagaaggaagagtgcattttgtttatgggcggcaacctcacgaggggcgtcccattctcattggctcactgaagccaagattggcgtgagagctatcctatagcggggagagatagagggttcgcggagtgaagcgtccaatgtgggccttctgccgaagaagtaggggcggggggaagtttaggagttgaggaaagaagattaaagagcgcgaggaggtaatgccacaaactctaatttgttgtgggacgggcgggagagagggaggagtgtgtgcgtgccgagggggatgaggcgtctgcgaggcgcctggagtggggggcggcgggactgggaaggaggggagcggggtgggg

SEQ ID NO: 30265 - DNA, 2300 bp, Homo sapien
tgttgacagtggggtgttaaagtctcctattattattgtgtgggagtctaagtctctttgtaggtcactcagaacttgctttatgaatctgggtgctcctgtattaggtgcatatatatttaggatagttagctcttcttgttgaattgatccctttaccattatgtaatggccttctttgtctcttttgatctttgctggcttaaagtctgttttatcagagactaggattgcaacccctgcctttttttgttttccatttgcttggtagatcttcctccatccttttattttgagcctatgtgtgtctctgcatgtgagatgggtttcctgaatacagcacactgatgggtcttgactctttatccaatttgccagtctgtgtcttttaattggagcatttagtccatttacatttaaagttaatattgttatgtgtgaatctgaacctgtcattatgatgttagctggttattttgctcattagttgatgcagtttcttcctagtcttgatggtctttacattttggcatgattttgcagcagctggtaccggttgttcctttccatgtttagtgtttccttcaggagctcttttagggcaggcctggtggtgacaaaatctctcagcatttgcttgtctgtaaagtattttatttctccttcacttatgaagcttagtttggctggatatgaaattctgggttgaaaattcttttcttaaagaatgttgaatatcggcccccactctcttctggcttgtagagtttctgccaagagatctgctgttagtctgatgggcttccctttgtgggtaacccgacctttctctctggctgctcttaacattttttccttcatttcaactttggtgaatctgacaattatgtgtcttggagttgctcttctcgaggagtatctttgtggcgttctctgtatttcctgaatctgaatgttggcctgacttgctagattggggaagttctcctggataatatcctgcagagtgttttccaacttggttccattctccccgtcactttcaggtacaccaatcagacgtagatttggtcttttcacatagtcccatatttcttggaggctttgttcatttctttttattcttttttctctaaacttcccttctcgcttcatttcattcatttcatcttccatcactgataccctttcttccagtggatcgcatcagctcctgaggtttctgcattcttcacgtagttctcgagccttggctttcagatccatcagctcctttaagcacttctctatattggttattctagttatacattcgtctaaatttttttcaaagtttttaacttctttgcctttggtttgaatttcctcctgtagctcgtagtttgatcgtctgaagccttcttctctcaactcgtcaaagtcattctccgtccagctttgttccattgctggtgaggaactgcgatcctttggaggagtagaggtgctctgctttttagagtttccagtttttctgctctgttttttcctcatctttgtggttttatctacttttggtctttgatgatggtgatgcacagatgggtttttggtgtggatgtcctttctgtttgttagttttccttgtaacagacaggaccctcagctgcaggtctgttggagtttgctagaggtccactccagaccctgtttgcctgggtatcagcagcagtgtctgccgaacagtggtttttcgtgaaccgcgaatgctgctgtctgatcgttcctctggaagttttgtctcagaggagtacccggccgtgtgaggtgtcagtctgccctactggggggtgcctccaagttaggctgctcgggggtcaggggtcagggacccacttgaggaggcagtctgcctgttctcagatctccagctgcgtgctgggagaaccactgctctcttcaaagctgtcagacagggacatttaagtctgcagaggttactgctgtctttttgtttgtctgtgccctgcccccagaggtggagcctacagaggcaggcaggcctccttgagctgtggtgggctccacccagttggagcttcccggctgctttgtttacctaagcaagcctaggcaatggtgggcgcccctcccccagcctcgctgccgccttgcagtttgatctcagactgccctgctagcaatcagcgagactccgtggacgtaggaccctccgagccaggtgcaggatatgatctcctggtgcgccgcttttttaagcccgtcggaaaagcgcagtattcgggtgggagggaccggat

SEQ ID NO: 30266 - DNA, 2300 bp, Homo sapien
attactacttgtgcctacctcattttgagtattagataaaataatgcatgtaaactgatgaggaagctgattctgagctgggtggtttcacatatttagtcacaaagttcatcaatgcttgtgcccagttttaagccctagcttgtttaacttcattatgccactttgtttccaaggttccttcccatatataaagggggaaaaatataaatgggatggctgaggtgagtacatcgaaagggaaaggaattagtcccactctttaagtttggccacatagttaatgaaatggtcttatcaatggagttatcctgtttaaacaccaaaaggtgcaatttcttctccatcatccccaatccccacattctctgcctcctcccttcattgctctttagccactagcaggctaggtagggtgttcctaatctgcaaccggaatgtttctggtaggagccatttctcacccactctttgtcctcttttatcacttaaaatcacggaaggctgttctgaaagcggctgggctccttgtaacattaaaaaattattaaactcagaaactaattctgttttttaatcataaatatgaaaactaggaagcaaactgagaagaatgaaagaccaaatcagcggatctgaagcaggccactctcaggaagactcctgaggaataattaaggctaattttaaatatcacctcctgggtatcatcatcaccatcgttcccaggtacctgtctgagatagtccattttgaaatagatataccttaaattatgttaaaatgtactaagcacttattgagctcagtgatcctgaaatatgcctaacaataagctgcctagttgccacttattagctaggtttatgtctaggaggtctaggagggactatgaagaatatgagctgtttaattaggggtacttgtcatcactaatgaacaacaagaaatagtttgaaaacttctttgagatattcacttgcaaatgtcacccgaatttcagaaaagtacagtctctggagtaaagctattatacactcagagagactgttgtgctttgcatgcgttatatcatttagtcctcaaaacatgttgtcaagattggcattattatctccattttaaagatgagaaaattaggtgcaaagagcttcagtaacacactcaaactcattcaacaataaataactaaaaattgtgctatacacactttaagagtcacatgttcctcccccaaaattatgaaaggccatagaaggaattcaagaagtaggcttcatgacttatcgtttcttctcatctcagatgaattcactttaatctctcatgcccaaattgtaaaatatcattttgatcaccgtcaatattacacagacctgtttgaatgtgctcagctttttcagtaaaattagaagaaaccacaatttacaaacaggtatatgtgcattaaggaaaaaacaaaaaactaccatgtgattttagatatggatgccaattcttaaacattgtttattatttctgagctcaagtgcttagaatgtttaaaatgcaatatatttatgtggatttttttccaggatattggaacatatataaaatatgcttgtgcatatctaagctttgtatttatttcaggttatatgtatactgagaagaatatataaacagtgtatgatatttacatgttatttcattttttgagggaaattaacctccacaattattaactatgcataaaatgtaatggcagatatgacttatattgtataggactgactacaattcctctttagaaatagctgttctttgcttttataatactaggaaaagaggaaaagagttcttaaagaaatacaaggattcctcaagcccctcttccctaaaacatgctctatcatatctcctggattgactggaatatccttctctgcccccaccccatcaccctctcaatgcagtggaaaagtcggtgggtaattgggtccagattggaggtgtttaaatattcatgaggctggcaggggactgggagggggcgactgtctagaatgggggtaggggctgggggaagtgattagtcactgaaggctagagaacaattccgagaaagagacggagagagagggaagaaaaagacagatagatagatattggggggaaggagaaaaaaggagaagagagggaagagaggacagcggagagagagcaccagagagagagggagagagagagagagcgctagagagagggagcgagcatgtgcgatgagcaatagctgtggaccttacagttgctgctaa

SEQ ID NO: 30267 - DNA, 2300 bp, Homo sapien
cagtgtgaacaatggaggaaaatatagtttagagaaaagtcagggaaaggtagggccagaggactgacaccaagaaatcattgaatctcaacataagacttcttggaatttagttaatcatattggaataaattccttcaagaatcttgtcccttggtaatcaaagtttgaaaccccgcactgaaaagcaccaactggttggaaataatatactgagaggagtgaaattcatcaattaatctgagtggctaatatatttaatatcctttgtatacaaagtaaaactccaccattcgtaaaaggaaatccttagacccaactttcagttaacaaaaacagaaatgactttgacccagggtgcttcctgaagaatgagaactatccagggctttacaactgcagaattgtaattatgctctgtgcaattgttgagcaaaggttttgccttgctggataaaaagtcttgtttgtttcgagacatgaaatccccatgtcttaaaagaactaaggcttatagaaaagcagatgggttttctctcaggaaggactgccccattgacctttgccttctcttccaagtcagacagacttctcgcttgccatgggcatttttttactacatagtcagactactggggctacttatagagaccttgtaaaagtactcgtgattttcacgttcttggaggaccaaacaaaaatctgtttctcctccaaaaatggacttacctcctttgcacacaaaagctaaactcctcagcatgaaattgtttgagttattactttaccaagttgtgagcttcttgaatcctccagagtcgcagattccatccctgagttggttgtggtttcactgtttctattggctattctccctgaatttttcattttgttctttgcagggctcgaattatttgtggaaaacaataatatatatgtgtgtgtattttttatctttatagatgctatatttacaataatgtatgtattataagacaaattaagaataatgttttgatcttaaaaggaagaaaagtactgaatttggttgtttagaaagaaaatctatgctcacgtagaaagacatagagccccactttttccgttttgtaattatttggcgaaaagaaatttgcttatagactatgtttaatgggattaaccatgtcctcatttttcttttcatcctcatacacttttagcctgcatttagtcttggttaccaatatcattttttaagagaaatgtaagtacagtgctatatcttacctacataaactattaatattttgaagacaaatgtgaaacacaccacaaaaatggtgagataagaaacaaaaatgcagtttaggaagcctcctccttgcttaaatgtttagaatatttcttctccaaagactgcatttgcctcagtgatgtaaattttccatcatggttggcataatatctgtaaacatctcactaaatgcaaaatggagtttacatttatgtgcatactagcagaaaagaagtaaactattctcatttgcatgtagctatgctgttcaaatgtcgccaaccaaaatttaggaaagaatttgttttcacccagcatgtacatctcacttttctcttggcaaggaagctggtgttaacgttgggtttaggtttaacatttacaccagcgaaaatgtttatgaatattatggaaaacttattttaaaccttgatttcttttgagcacatttacatgctgcgtgctgattaataaattaggcaccaatcatgtgtaaatcaatgtaaatcactagtttatgtacataatataaactatgtaaacttcatttttcatgcagtgcccaactactgctaaggtttactatgattcttaaggaaaaaaaaatcaaataaaaataaataaaaactgaaacgtttcacagttcagaatcggaagaattacgactaaagctccaaatatgaggttgccttagccaaaggaagcagacccacaggaacagttcaaggtttatatcctgctcaagtcacctctttggtctttcaggatctaagtggagattgtcccaactgttgctgtagttgtctcacccgaccccaaagcaagggaaatagagggaaaggttttaagggctatatgtctgctgtatccactcccagctatcttctttttactcctttctcaccatctaagatgtcttatttaaatagctccaaggaagtgacctaaaccttgatgagcaaaatattactcagtttttattttccattcaacaaaagcagtgggaaagcttgccatctggatt

SEQ ID NO: 30268 - DNA, 2300 bp, Homo sapien
cttttctggggaaggggcaagtactccaaccccttctctccttgtctctaccccttctctgcttttctggggaaagggcaagtaccccaaccccttctctccttgtctctaccccttctctgcttttctggggaaagggcaagtaccccaaccccttctctccttgtctctaccccttctctgcttttctgggggaggagcaagtacccctcaaccccttctccttcacccttagcagcaagtcccacttttctagggggcaagaacccccaattccttatttccacaccccgacctcttatctctgtgccccaatcccttatttcctcacccctacctcttatctctgtgccccaatcctttatttccacaccccgacctcttatctctgtgccccaatcccttatttccgcaccccatcctcttatctctgtgccccaatcccttatttccatgccccgaccccccttcccgcttttctggagggtaagaacccccgaaccccttccctccgtgtctctatgctctcttttctctaggtttgcctccttcactatgggcaaccttccaccctccattcctcctccttctccctcagcctgtgttctcaagaacttaaaacctcttcaactcacacctgacctaaaacccaaatgccttattttcttctgcaatgctgcttgaccccaatacaaactagacagtagttccaaatagccagaaaacggcactttcaatttttccatcctacaagatctaaatatttcttgttgtaaaatgagcaaatggtctgaggtgcctgacgtccaggcattcttttacacatcagtcccttcctagtctctgtgcccagtgcaactcgtcccaaatcttccttctttccctcccgcctgtcgcctcagtcccaaccccaagcgttgctgagtctttctaatcttccttttctacagacctatctgacctctcccctcctcgccaggccaagctaggtcccaattcttcctcagcctctgctcctccaccctataatctttttattgcctcccctcctcacacctggtccggcttacagtttcgttcggtgactagccctcccccacctgcccagcaatttactcttaaaaaggtggctggagccaaaggcatagtcaaggttaatgctcctttttgtttatcccaaatcagatagtgtttaggctctttttcatcaaatataaaaacccagcccagttcatgactcgtttggcagcaaccctgagatgctttacagccctagaccctaaaaggtcaaaaggccgtcttattctcaatatacattttattacccaatctgctcccgacattaaataaaactccaaaaattggaatctggccctcaaaccccacaacaggacttaattaacctcaccttcaaggtgtacaataacagaaaaaagttgcaattccttgcctccactgtgagacaaaccccagccacatctccagcacacaagaacttccaaatgcctgaaccgcagcggccaggcgttcctccagaacctcctcccccaggagcttgctacaagtgccagaaatctgaccaccaggccaaggaatgcctgcagcccaggatttctcctaagccacgtcccatctctgcgggaccccactagaaatcggactgttcaactcacctggcagccactcccatagcttctggaactctggcccaaggctctctgactccttcccagatcttcttggcttagcggctgaagactgatgctgcctaattgcctcggaaacaccgtagaccatcacggacgccgagcttcaggtaactctcacagtggaaggtaagtccttccccttcttaatcaatatggaggctacccactccacattaccttcttgtcaagggcctgtttcccttgcttccataactgttgtgggtattgacggccaggcttctaaacctcttaaaactccccaactgtggagccaacttagacagtactcttttaagcactcctttttagttatccccacctgcccagttcccttattaggccgagatactttaactaaattatctgcttccctgactattcctggattacagctgcatctcattgctgcccttcttcccaatccaaagcctcctttgcatcctcctcttgtattcccccaccttaatccataagtataagatatctctactccctccttggcgaccgatcatgcaccccttaccatctcattaaaacctaatcacccttaccccgctcaatgccaatatcccatcccacagcatgctttga

SEQ ID NO: 30269 - DNA, 2300 bp, Homo sapien
tataatccctgacataggacaccttgatttatataaaatgaatgcacagtacacataaaattaattgaactccatcaatcatggatttgtgacaattcaggttccaatcctccgtgttttcttaaaagcaaaataggtcttcctttttttcctcacgtaatctgtaagagttcatctatcttttaaactgaaaacatgcgcagaaaaagtgctttgagtattctgaggacaagccagtttcagcacagtgtttctttaaggcttgtgctctggtggggtttgataaggattcctaaacatgtttctttctttctttttattttatttttggcaaatgtcctaggctaaacatttgcttacataagagggatgggtataatatctatgtacatatttatttttatatatatggaatatttatggaaagatatataacaaacttaaaatatatgttgcctccaaaaaagagaaatgggttgcctaaagacgggaataagaagaaaactacggccgggcgccgtggctcacgcctgtaatcccagcagtttgggatcccagcagtttgggaggacgaggcgggtggatcacgagatcaggagatcgagaccatcctggctgacacagtgaaaacccgtctctactaaaaaaaatacagaaaaaattaggcgtggtagcgggcgcctgtagtcccagctactcgggaggctgaggcaggagaatggcgtgaacccgggaggcggagcttgcagtgagccgagattgagccactgcactccagcctgggcaataaagtgagactctgtctcaaaaaaaaaaaaaaaaaaaaaaagaagaagaaaactgcaattcactctatagcatcttgtaccatttggtttttgtaccatatgaatactttcattatttaaataaatataatcaaagaagagaaaaataaagtccttggctggtacaaacacattttttatcctcaacatcagtaatgagggagatgtccaagagtgtggggctgtcacttgagtgactatcagtggtctttatggtcctcatcacttgcttggctcatggaataaaaggagtgacaaatgatggtaacctgtctgccattagcaggagtactgcacacaaccttacttagtgtctccttgcaaatgacaagctttctgatttacaaatctccttccttgcatatgaacattttgagaagtaagtgccaggaggaacttgggtagcaattcaatgtgccctttaaatagtaatccttaataccattactcatgtgtaggattgagtgagagtttcctggagagtgaagttgatttagggatcagggatcagctgctgaggctggcacttggaaaaaacaagccaagcattcacaccccagaccactcaataccagcattgtctccaatccatctttcataaaggggttccaagagggggaggggatgaaggaaggagagaaaataaaccattttaatcctgtaagagaaagtgcaggaaagaggaaagaatgaacaagacttgaacacgcaaagccagttgccaagaatgtttcgtttgaaatcaactttggcttttaatcttagactccactgtcaagtttctcctcagtttccttctcccatctttcaggacattccccaccctcactccccacctcaaagctttcctgtcctctgtcccactcccctcatttgcaactctccttcccacctcctttttcttctttcctcaccccttccctctcctttcctggactctttctcctgttcttttataacttaagtccctctccttctcccctctctcctgaacagtacctctaagctccgttcccccttcttaaggaaatcagccaggcctcagatggagctgtcgtcctgacaacccaaaggcgcatcaggctttcattgaggctggctgctgctgaagggggcagttgtgcaaagcgaggggccacgtcgaggggagggcggaggggatgacgtggaggggctgttgaaaaccagcagggtggggggagggtgggggggtgggggggaggtgctgagctgagagagcgccagggactgggagaaacaggaaagggaggagggggagagaggctctgggttgctgctgcttctgctgctgctgctgctgtgtggctgtttctgtacactcactggcaggcttggtgccggctccctcgcccgcccgcccgccagcctgggaaagtgggttacagagcgaaggagctcagctcagacactggcagaggagcatccagtcacagagagaccaaacaagaaccc

SEQ ID NO: 30270 - DNA, 2300 bp, Homo sapien
tactgcaggagttgctctacatttgacaaagaatagattgtgcatgttgtcatgggaaagtgtatgactggaggcgcttgtgcatttgtccttgttttacataacctacctcattcacgcatggcacaaagataaaaaaattggatcttggttggttatttaaaattcacaaagtcctattcttggccatttatatgctttattttctcaatctatactgaaacttaggagcaaagattctcctgattttagggtgtggtttcggaaaagaatcagagagaaaatgaacaatgaaaagtattgaacatgccctctgtgtaagaaaccattgcagatgattctttcaatccttgcaactaccttgcctcctataaggtagagcatttgttttctggctctccactagcaccaagaacaacgtctggcacatagtaggggtttaatatgcacttcttcaatgaagaagtgaacagtccacaagctgagtagcattatcttcactacactgataaggaagccgaggttcagaaagattaaatttcctagtcatagtcttaaaattaaatactaggtagagacaggttataaatcagagttgttgaccttcactaccaggcctctgttctctctactaagttggtaaaaagagcagtggctaaacttagttcataaagtctcatggtctaatagctatagaggtgaagcattctatagaaatgaaaactatgttgatttgtttctccctactccatagcaggaccatcctccctgcccaatgaccaccttaagacttattgaaaaataataaaggcacatcttgcagactgcaaacataaaagatgagtgccaattccatgtgctgagttataataatttctaatgatcaaaggcagcactatctctaaaccaaaaatcctgttttctagcctttgcaatagatgaattgtgatactatggacagtttcagtttcttcatcagtaaatgttgggatgtgggagaagttaaatgctagcaagagtcattcgatctctaatattttctgattccttctcccccagccacaattaggcaacttacatcttaagaattgagaaaacataacgtctattttgttttctctttattcaaggaagcctacatcacttttctaatttataatttgtccatgattacttatatgtagaatctacttcaagggcattctgaattggaaaaaatggaatatgctttgttcttgctttagtacatggagagttaatttttttttttttttttagtgatggtcatctatccaataaatacgtctttctacatttttaccccttgttaataataattataattattttgatcaggtgggtttttacagttttattccttctttattattttcactttatggtccaaaaatgcaagtttgttatggatgaaaatatgacaaatttgaactcggttactgccactaatcaggcttagaaaaaaattagaacatttaattgatttcccacagctcagagttatggattttgaaaacagaaatggattttttttccttatggataagagaaacaatgcggtgatgactaataattagcatggcttccatgctgggacagtaacaggaactggtagagaccatggctgaatgaagaccatacacattgcctatagaaggcagcccctactcagcttagccaaattttctcatgtagaattataggtctagtggatctagatcttaatatatttttgagaaaagctagaaatgtggatttttatatcaaatgtatccgtttttaatgctggtgcaatttctaaaaataaacaaaaactgtatgggccaaataaaatatatacgcgagctgaattaggctagtggattactagtttgagaactcttatttagaaagatctgcctctgagaattagtgtttccttcttgaccaggcagaatatggatctgtgtgtatgtgcttctatgtatgtgatttagcaattaaccagtaaacctgcccccttcaaaagacgcatattgatgaaatcatttgtgacctcacaggaatcacaaatgatgttcctatgacgccctagattgttctgttacacaaggggtaccaaagtccactctgagcttttcctctgggaacagatcccagattattccagacttaagacatggagatatatcttgctagaggtaggaagatgataagatcagtttctataggtagaggataatgtgtcctaaaatgtaggtagagataagtctgacagtggtttagacaaaaagggcctctgc

SEQ ID NO: 30271 - DNA, 2300 bp, Homo sapien
aatgaagtatgcctatttataatgtgtgcttaatgtcctggtgacactgttgtgtaaaaaaaaatcaaattatctaactgggaacagtttgatctcgtttctgctttttcctcttaaaaatgtaaattttgtatgagtttatataagcaaggaaaagctaaacaacatttcttctagctcctacaacattcctgataagtaatgtttggtaccattcagttgcctccaatttagaacctaaactttaaggccaaccagtaattcccatccccatttacacaaatctaacttattcagctttaagaataccctgttgtctcttaactcatccaagtatctttcctctttaatgtttccagggacaaatgagagcacaatacacacaagtacaatggatgaaatatttatatcggaaagcatatgagtgttatagatcaatggatgttatataatggagaagatgcctaaaccacagtgtataaataactgcagttttaagtacgcaggcaagtgaggaaaaagtagaatccatcatttccatcaatatattaatcctgctgagtcttcccacacagttcagttaattcttaaaaatccagaatgttcaaaggtggaagattccaagaatggaagtattttcaagtaacatatgctggcttctatatttctttagtgttacaagaaagaaaaaggtatttttgaatttgaagggattatgggtaaagctgtagggaagtcagtccatccggcaatgccttaggtcacttcaaatgagaagagtggaacaaaggggatttgactggtcctcgataggatgttgcctattatcatctctgaactgtgtttatgcaattttcctatctgatcttcccaggcagcataaatttgccataaatttgtaggttctggaatacacaggttctgaaatttgccaatttgctgcctactgatttggacaagttacttaacccccaaactataaaatataccataatcctctcatctataaaatgtaccataaagcctatgtcctagggttgttgaaaggattaaacgatatgaagaatgcaaagtgcttagcatggtgcctcacacatagtaaacacttagaagatgctgtttcatattcttactttctaatcatcaatttgaaaatttccatctaatgtgaagtttgtctgatgtctttttcttttatttctatacctagcacctatataaattaatcttgaaatatgacaattctacatccccttgtgctttcaggtacctgttgatcctgccaatctcccataacatgctaaacaactacagggtacaggctgtgcacctcttctagtttttttcctctaaacagtatctagtacatgcacacacaacaaatggccaatgaatgatgtcgccttagctctccgacagctagagagatgcagcacttccaggttgtaatatttactgcccacatcttacaactgagtaactagttaaccaaccatccaaagaagaaaacaacacgctgatcagaacttatggtaacagttcctgtgggtcgatttcagaattcaccttctcactcagtgtgtttagcttcttctctaagagagatacagtggctacatgtcacaattccccttcagtatatgggttgctgtacaaatagatgtaatcagtgaggaagaagctgcttactttctcaagcttggtaaatatcataccagaagatgagtcatctttgctgggagatatataacaaaataattatagaatgttttcaggatatgaatacaatatttacataggacatttcacccaagtataaccacttgcacatgtatattgtaccactaatattaaaatgttcatttaatatttaataattagcagtaaggttattgtagtaatatttctctataaggatccttctcatatttctagggaaaagtgaataaactatgtgtctaattaaaaattcctattgcctcgcacatcagacaccagtttgatttctccttttagctgcagtgaggtcacactcctgcatttgtgacatagcagcaggttgtcatggagatgatagctttatcagcaactctgctgtgcaatgacttcacagcaaggttaccaagaagcagatgggctgtgaaggagacaaacccttctgtctaaacacaaatagcattgataattaattagctgaagcagcaggggaaattatgaaaatgtgtgaaaggtaaaataatttctatttatttcagatttgatagttttattcctcttgccagaggaagatcacatccctc

SEQ ID NO: 30272 - DNA, 2300 bp, Homo sapien
agacatttaaagtttctaagccttactaaagtccttttcatctgtagagtgaggaaaataataaatctgtcctccaagttttttgtgggggtaagaggtggagtaaaatgatattagctcagtgcctggaacacagcaagcacttattaaacattaatcatcattatcatttcctttttgtaaagttttggactagattaaggattcctaacctttttattaccaggtatctattttgttactttttcaagaacatatgtttgagaatattttcatacccaacatactacattaaccaagtaataattaaattgttctcccattttagctgttccgagacatagagcagtcgattagcgcttcagatgtttgtaataataagtattaccacattgagttgacattctaatatgaagtagagaagatcacattttaaaatggccgaacaggaacagctctgatctgcagcttccagtgagatcaactcagaagacgggtgatttctgcatttccaactgaggtacctggctcatctcactggggctggttagacagtgggtgcagcccacggctggtgagccaaagcagggtggtgtgtcacctcacccgggaagcacaaggggtctggaaacttcctcccctagccaagggaagccttcagggactgtgccttgaggaacagtgcacttcggcccagatactacacttttcccatggactttgcaacccacagaccaggagattccctccagtgcctatgccaccaaggctctgggtttcaagcacaaaactgggcagctgtttgggcagacactgagctagctgcaggagttttttttttataccccagtggtgcctggaatgccagcaagatagaactgttcactcccctggaaaggcggctaaagccagggagccaagtggtctagctcagcagattccaccccaacagagcccagaaagctaagacccattggcttgaaattctgcctgccagcacagcaggctgaagtcgacctggtatgctcgagcttggtggggggaggggcatccaccattactgaggtggttttcccatcacaggctaaacaaagccactaagaagttcagactggacagagcccaccccagtttggcagagctgctgctgccagactgcctctctagagttttcctcgctgagcagggcatctctgaaaggaaggcagcagccccagtcaggggcttacagatacaactctcatctccctgggacagagcacctgggggaaggggcagctgtgggcacagcttcagcagacttaaactttcctgcctaccagctctgaagagagcagcagatctcccagcacagtgctcgagctctgctaagggacagactgcctcctcaagtgggtccctgatgcccatgcctcctgacagggagacacctcgcagcagggtttgatagacaactcttacaagagagctctggctggcatctggcgcatgcctctctgtgacaaagcttccagaggaaggaacaggcagcaatttttgctgttctgcatcctccgctggttatacccaggcaaacaagatctggagtagacctcgaggaaactccagcagacctgcagcagaggggcctaactgttagaaggaaaactaacaaacagaaaggaatagcatcaacatcaacaaaaagaatgtgcacacagaaacctcatctgaaagtcaccaacatcaaagaccaaaggtagataagtccacaaagatgaggagaaaacagcacaaaaaggctgaaaattccaaaaagcagaatgtttcttctccaaaggatcacaactccttgccagcaaggggcaaaaaactggatggagaaggagtttgatgaattgacagaagtaggcttcagaaggtgagtaataacaaactccatcgagctaaaggagtatgttctaacccgttgcaaggaagctaagaaccttgaaaaaaggttagaggaattgctaactagaataaccagtttagagaagaacataaatgacctgatggagctaaaaaacacagcacaagaacttcatgaagcatacacaagtatcaatagctgaatcaatcaagcagaaggatatcacttaatgaaataaagcgtgatgataagattagagaaaaaataataaaaaagaatgaacaaagcctccaagaaatatgggactatatgaaaggaccaaatttacgtctgattggtgtacctgaaagtgatgggaagaattgaaccaagttggaaaacactcttcaggatattacccaggagaact

SEQ ID NO: 30273 - DNA, 2300 bp, Homo sapien
aaatttaaacatatcaataaaactataaaacttctggaagaaaacacaggagaaattctctatgactctgggttagaaaaagccttctggaataggatacaaaatgcattaaccacttaaaaatgggtaagacctcatcaaaattattgttttgataataaaacaataataaaacaaggtaagtttcttgtcttcaaaagacactattaagaaaataaaaatacaagccataggttgggaaaaaatattttcaaaacacaagttcttgtatttataatatctaaaaactcttaaaattcaacaaaacaaacagtccaattttttaaatgcacaaaagatttgaacagacacttcactatgcatagaaagtatacaaatgagtaataacatcctgaaacgatgctccacttcattagtcaacagggaacttaaaaccacattgagataatacaaaacatcaactagaatatattatattaacacgacaatgctaagtgttgacgagaatgtagaacaactaactctcatacatttctgaaggaaatgaaatgtagtacagtcatttggaaacattttcatattttattacagaattaaatgtacacttaactatacaatctagcaattccaattctagatatttatgcaagacaagtaaagatacagatctacagaaaaacctatatgcaaatgttcactgcatctttatttgtaatagccaaaataccagacacaactcaaatgcccatcaacttgcaaatggataaaacaattgtgacacagccatttaatgaaatattacttatgaacaaaaaaaacctcaaacttctgatatatgcaaaatgactaaatgttaaagctattgtgctaagtgaaataatccagaaacaaatggctatatactgcatgtatccattaaaaaaaaatctacggagaaagcaaaactatacaggcagaaaacaaagcagcagttgccagatgctggagctgggactgagggttaaagtttggcagagaatactacatagggcataagggaagtccttggagttacagaaatagtgtacatcacggttatggtagtgaacacaagacgagacatttgtcaaaacatagcaaactatatacctagacagagggattttattgtatgtaagttatactttaaaaaaatgtttttttagaaaaaggtatgttgggaagctcacagaatcatggaaatggcttgaaaaacaaattaagggctaatcttccaggaaaacatccataactatactgtaaaactggcttaagaaaattgctgcaactgtccctgtcaccaaaccccaaatgccaaaactttactgcaactacgaatgatgtcccagtgctatatcaggcacttaaccctacaacactaccatcctgcaaagccatactcttatgctgctatctgtgctagcaatagaagctcaacatagaacttgttctgtcacgtttcttctttcaagtttcttctttcaagtcagggccagagactctctatgtgaatctgactgaagggccgaagtccaagctacacaagaggccagaaatttaagttctcatttctaacactggggaggtagactcataatgtgggaattcctccaaatagaaatactattcaaaatatgatttgtcagccatgaatacgactatgctgactacagcaagcaacaaatgaaaacaataacaattatgtctttctccttcttctctcctacctcttctaagcctatctttgtcaagttgtctgtgtattcctttatcttgtcggctttgcagggtgaaaagatgaaactactgaagaccaacaggcttcctgtctcttgtgaagcctatgctcactgaggaagctacagtggggcagaggaggtaggaggggctgcctttgagcctgataaaggagaaaaaatactactgggaggggaatggaagttggccaagttccttgacaagaggagatgcatgctctcctttgctcagaggacaaaggaaataatggtgcctcaaagagtatggctgtcctggagactggagctctggtcatcacaacattccatgtgtcctacaaggcacagaagctgcagagcaacacaaaggatcctgcgggcttgaacaaggggctcgaacaaaaagcagttactccacagaagaccagaggggtcctcccagcattgtggctctgtaagacagactgcagcatatagaggggagcctcaataattgataattatcacaatgatttttttaaaaaggggtctcagatttgaattcaa

SEQ ID NO: 30274 - DNA, 2300 bp, Homo sapien
gcagctggattgcctcctgaaatctgatcatcctcactctcccttcagaagccacacttttttttttctattgaaagggctcctttactgaactgtgagcattgtcctcttaatgactcagtagctcttgcctggcaaggcagaagtatccttaggtgacaaagaggcagaactctatctgcttatttatgatagcacagatatagcccatatgcaattggaacttatttggggtcaggggtcatttttttttttttggtttaaccttaaacctggtgccttacaaagtgtaggtacttggtaaatagttgttaaattgatgcgataaatatatcagataacttgctttatcagagctttaagctcagattattaggttatttaaaggatatttatttaaaggataaatattctgcctctatatttatatctgggattatggtgacatgaagagttgctctcagtagctcctatcacttgaccgcttccttgtttttcttcttatattgcttactcttataccctgcttaggactggattagactgcaggaatatgtacaagagagggtgagggattgaattggatggaaaaaagaaactctagtccttaccctggagtttaaaagaatgagaatgagcctcgtgatatcatagttggaaatttaaatttgttattaatatgaaaaactctactgtcatatcatttatttcttgccattagagatctggtagggaattctagcaagttggaagtagtgagcaaagttgaggcatctctacttcataatcaaaatttatcctttcaggatattcttgttaaaagttattaacatttcttaacatgtttcatttttttaaccttaaaaatataatatccacattttcaaaaagaagtacatccataactccaccatcttgatattttaattttacatatatcttccaatccttgtccaaatgtatgtttaaaaaatattttacatatttttcttctgtgcatattatttttgtttctgagtttccctgggaggattgtatttgccagatgagggctcaatttctgaatggctccgagaaccctaatttatgctgctgtagaaactgaccaaaatgggttggcatcccctgggcaggtatgtcctcaaatttagaaggctcagtttggaggctgaagcaggaagtgactatgagctgtacaataaagagcagagcccagtataagagaataaagataggttttacaagaaaagatgtaggtagatatttaagtaaaacaatttcagatgctaggaaagtctttctccccacccaacccaaacaaacaagaagcaaaaacaaaaaacccaactaaacaacgattacaataaatgtacataccccactagttaacatgtatacttaaggtcagtttaagaaagcactaacgtttaagctggaaaacttaaaatattagaagttgacataaggtttacaaaaggggcaagagaagatggcagtctctctgataggaatggggagttaggggcatggtccagcctctatccacttttcaaggaagaaaggtgaaaaggcatccaggaaacagcgcaaaaccaaaacactgtaaaattaggaattcctaattctgccagagtcaggttctttcagattatttaggttttataagagaggactgaaagtgaaaaagccaaatataaattatccgaaaactgcaacaggaaagactcttgcaggctcagaggaaggctgtggaaaagtcattgctagagctctccaggatgcatcaggccgacaccacctgtttgcggaggggtttagaccaagggaggggccctaactccggcgaggagggcgcccacccctcggttcccggagctggtggaggcgtgcgggggagcgggcggcgcggtgcacaggtggcgggggccgcgccagctgcgcgccgcgctctgctccgcgggtgggccgccaggcgtcgcgctggagccgcggttgccctggagaccaagcggggcgagtgggcggcgcggcgaggagccgagctgcggctggagtagcggggcgtgagttggggggagtggctccccggactgcgcgaggggtcggctagtcctggggcagggctgggtggcacggctggcgagcccggaacgcctctggtcacagctcagcgtccgcggagccgggcggcgctgcagctgcacttggctcgtctgtgggtctgacagtcccagctctgcgcggggaacagcggcccggcgctgggtgtgggaggaccaggctgccccaagagcgcggag

SEQ ID NO: 30275 - DNA, 2300 bp, Homo sapien
ataccccactttttttgtgtgaaatagggtgtcactctgtggcccaggctgcagtgcagtggcacaatcatggctcagacagcctcaacctcctggtctcaagcaatcctcccacctcagcccaccagtagctgggaccacaggtgcacaccaccacacccggctgattttttgtgtttctcactttgaataatgagtagaaccctagacagaaggccagtaagaaaatataggacttgaacaacactattgaccaattagacctaacgcatatgaagaacattccacccaacaaaagcaaatacacattctttccatggaatattctccaggataaaccatatggtaggccacaaaacaagccttaatatattttaaaagattgaaaccatacaatgtatcttctctgaacacagcagaatgaagctagaaatcaataagagaaggaaaactggaaaattcatacatatttggaaactagacaacatacttttaaacaaccaatgtgtcaaagaaaaaaaaatcacagaaaatgagaaaatatcttcagatgaatgaaaacataacaccaaacacttgagagatgcagcaaaagcatcagctcagagggaaatttgtaactataaaacagctacatttaaaaaaaagatctcaaattgataaatcatcattttgtaaaatatatacatacctatagatatagacacatagatttgcatgggggtatttccagaaggataaacatcaaaatgtcaatacaggttatctcttgagtgtttgggaatttttttctttacgctttcttttttatatttctatgattattacatttaagttataaaatggaaaaataaatctccaaaaccaatagcactttgaagctacaagccatagcccaagacctattttactctaaacacagtatccaatggtgtcatgcatttttaaataaataaggtagataattcataaagtgacattcaacaagcacttcttgagcacctattatgttctaggcactgttacataaatgactttacttcagtgtgcttagattcccctttccattcctaagtatggtgtcaagtgtatccactctcctttgtcacaagtatttgaatttggattttaagtctcatttctaattgtttaatgcagttaaatccctactaaaggaatatctggcatcacactaccaacccttggcctgcctcagtgatttcaggctttgcaaggtcaaagtaatttgtctcatcaatcaccacctctgtactggcctactcctgaaagtagacagcctactgactctgaggtgcattcttaaggttgattgcaaagtgggaggaccaaatctcaaaaactgggccccactggccaacactatcaaatacaaattctccacttgctaaatattccttctggtatctttctcccactttccttactcccttcctttctggaactctgatttggcctccttctaactcgcctctctgctgtaagaccactagatggtgcagttttagaacccattctcactggatcttctctcctctctctggctctcccgccacagatcacatgtctaatccagcaagaaaacaccttggggcaggagtttccactgccaagacagctatacccaaaggggatggcaatagcaacaacctctgttcagttttgtggtcctcgtgcagctggttgtgtgttcatctgttgacatttggaggtgcggtgggggatgttaatcagaggagcagtacctgagagagggcctctttctcacacactgcggagaacctctgtgaacaaggaagagggtaacactctaggtggcgatgcacggagccccgtggcctggttgctcggcagggtgaggagaagctgtaactgccagagcctgagaatcgccccttctcaggacatggcgtactccctgcgctcgcctgcacactgcagggtcagctgactgccgtccctccacttacaacagcgggacggccactctccctgacgcacgcagtgacccgaacaaagcccgtgggaatcatggggcgttcctggagggtcgcctagacgacccagcccaaccccacccacagtgcctggcaacctagaccagtcagggacgcggcaggaaatggaagagcctccgcaagaggctctggctgaacccttgaaacatgaaagcccagccgctccctcaagtgctggccacactaagggccaggaagaagacgaccagaagaaccaggccgaaaggaaggcagataaccacactgctcacagaatagctgacc

SEQ ID NO: 30276 - DNA, 2300 bp, Homo sapien
tccttagtaaacctgaagggcctaggaattgtcattatcagtgaaacctgatgttgatgagatcttaacacaaggagttggagaaaatacacatttttaagagagacttggataatcctccaggtctccaggtgcaatataatgcacctcatgtcctgggaggtaccttaggcattgccaatcaacttcaagtactttttccttcacagggatgtctaatcaactccaaattcccttctcctggtagaagcccagagagggaaaatgacttaatatcacagagttagttgcagaactaggacttaaaatgcaggtttcctgaatcctggtttattaatccttcctgaatggcctttgggtagtagagaaggcaataattctcttttatttcccatccttctcttgcccttcctgaaattatgggtcacacataccacaacatgtgggtttattctttatccttgatgcaacatgtgcccttccgttgtacccctatttttactctccaggccccgtctagatctctgatctcccaggtaggtatcaaatgcccatttaacttacagatttggttactatggcttgagttttttcttgactgctggtatagttcaatttggatgagatggaggggagtcttgggaaaagagcttggtcttttgcttggaagttactggtgaatctggcatcaactgggttgtagggtgggatagtggttgcattctgagtttccatttcaactgaaggcttggaattgaggtctacttggctatcctcaaatttgcagggttgtactctgtagtcagcctctttgtcctctttgctgttgcctaactggggaaatattctgtcttcagactggccacgtgtttcatagtaagacagctggtctttatgattagcttgtctgtctgctaagtggtcagtctggtcagattcagtgtagtgagcattgtcaactggaggttgatcagcattactatgagcttggtcaatagcctggtgttcagctagttcagtggcttggccgtacacttggtggtgagtctttacagatgttttgtggtcaacgaggccatacaatctgaggtcagtctgctcagaagttcctgggtcagccaggccagccaatctgtagtcagtcttctcagaacttcttctcctaactttccctgacattctgcggtcaatctgtacggaaggtctttggtcagatggtacggacgatccactgtcaatctgtacagaaggactttggtcagatgggacggatgacccactgtcaatctgcacagaaggtcttctctcagatagtttggataatctgtgtgtaatctgctcagaagttcttcgctcagcctcgccagacattctgcggtccatctgctcggaagctcttctctcagactggcctgccattctgtggtcggtctgtctggaacctctctggtcagatggcatagccagtctaccatcaatctgcccagaagttcttctctcagcctgggtaggtaatcttcgttcagtctgttcagcagttctttcctccgtcaggccagacacctgaccatcactctgttcatgctgtacattattagcttggctagatgccttgcctttagtctgttcagacggtgtttgattaacctgatcatctgctctaaggtcagaaacatcagcagggttggatgctctgcggccagcctgaccaggtgtactatgcccattttgttcagctactccgttggtagcttggctaaatatgctggattcagcctggctaggcactcttagggcagtctggtcagctattctgtgagcagtgtggttatctgccttcctttcggcctggttcttctggtcgtcttcttcctggcccttagtgtggccagcacttgagggagcggctgggctttcatgtttcaagggttcagccagagcctcttgcggaggctcttccatttcctgccgcgtccctgactggtctaggttgccaggcactgtgggtggggttgggctgggtcgtctaggcgaccctccaggaacgccccatgattcccacgggctttgttcgggtcactgcgtgcgtcagggagagtggccgtcccgctgttgtaagtggagggacggcagtcagctgaccctgcagtgtgcaggcgagcgcagggagtacgccatgtcctgagaaggggcgattctcaggctctggcagttacagcttctcctcaccctgccgagcaaccaggccacggggctccgtgcatcgccacctagagtgttaccctcttccttgttcacag

SEQ ID NO: 30277 - DNA, 2300 bp, Homo sapien
tggagtctgtagtttgaattgtggtgataggaagaaaatatctaagtgtttctaacagaagtgagatattagtaatgagaattcactgatgagcttggaatcaggttaagatgtgggtaagggagccacctagccagagagaaaggaagattagcagaagagagttagaaataaattaactggaaaaaaataagcctgtcatacattaacgacttgacgttcctcaactattcagttgcagttattatctgaaaactaatcttccttttcctagctagtctcttgtctcttgttattgggtttgtgttcacattatctattttgaagattttcaaatctttttgttttctccccatataatcatggtaatggaacataaaatgcctaagacatgaatgaaaattcacatgtccttgtttgcttccttgctactttatcacaaatatttccaggacagcacatgtttttaataacttgtacgttcttataattataatatagatcctttgtaaacatatgaactgcaaaaatagaagactgtaaaagtcacccatattttaccattcagatatattctggttaatgtttgctgtatactatttctaactttttaagtcataggtaaactttcttaaaaattaaaatgtgtcagattacacaaactattttgtaaaccgctttttcattttcagcctctagaagagtgcctggcacatcctaagttttcaataaatatttgtcaaataaatgactgaacttatttccataccattaaatgtttatctgtggtgtcatttttaaccattgcacagaattctattgtgtgaaatatgataatttatctaacaaggccctgaagagctgcagaggaataaggccttgtgatggacacagaggtgctccatgcagtcccccttgaagtgggaggttgccctgctgctgggagtacttgcaacctccagcctccagttatcagcccctttcaggacttgcctcagctacagaaagctgccttcccagggtaatccacattgaagggcagatcatagaggagcccagtgtcagagctactctgacaggccatcttcctccagagtttcctgaggagggctgcttaagactgtcccatctatattgcagctcaacttcttcctctgcccagtcctgtttctcccctctccctgccatgggtgttaatctcagggcactgtctaataaatatattgcacactaaattttgtctcaaagtctgctcctgaacaacctaacctgcaacagagatgatgctgacctttgaggaactcccaagtctattggtaaaagcactcagtaaattctaacattactgcagttaccgattcctaactcaggttaaacaagcgatggcgcatgtataccatgataggttatgcagccattaaaataatgttctgggtgccatgtataacacatgatggctccagaagtcagggaagaaggaaaaaagaagggaagggaagagaagagaaagggagggaagaagaggggagggaagaattggacatcagataatcacttgagccctctctctccgtgaatttttcccaatctgtttctttccacatctcttgctccttatcagtctttgggccacctacagtatgagcattacttgggcaattactgtctctctgaatttggcatatgcaaattatagaaactaaaactggacatggccctacacaggtaagcacatatcagcatcgctgtgagcggtcaggactaacaagccttcaacacacaaaagcaggagtaaggatcaaattacacaaatcaaatcaaatcaaatcaaaataaaatccctgagtttgtattccagtaaagcccaaacctaggagggatccaggaaagcgatgagtgtggctgtcaaggtgcttccatctgtcagagtcacacattccaaagcagcagaaatcaactgacagcctccggttactcccccgcctcagcgaggcagggcaggcagcggaaagctcagcccatgtgaggtgcctcctgccaatcacagactacccttccctggtcctggaggttcaaagaattgcaggagggtagaaaagcacctgggtcgggtgcagactgcggagcgggccctaccgtgtgcgcagaaagaggaggcgctgtgagtagaccgctttccctctgcagggaatctcccgggctcaagggctgggttgctctcctgggagggaagctagcagactgggagggaaaggggaagaagttagattcttgattcataaagtctgtcatttttttct

SEQ ID NO: 30278 - DNA, 2300 bp, Homo sapien
tactagggaggctgaggcaggacaatagcttgaacctgagaggcggaggttgcagtgagccaagatcgtgccactgcactgcagcctgggcaacagagcaagactctgtctcaaaaaataataataataataaaaataaacttcttgaaagaagaaattgtcttatttcacacagtacataatcagtacgagttgatatcggtgctgaatttggcctctactgatttctgccctttcctctctatgcttctgttatctgaactcctacgtttcacagtctatttacttttgtctctagtttagatactaacccaactggtcaggaataatgtctgtacataccagtaatgaactttacaatgtgactcaaccagctacatgagtaagtttcccccttgggggagtttgtgcagtctaacacgcaacaataactggaaagaatgaatgaaatttctaagcagaaagaaatgaatggcatttctaagcagaaactacacagagacgcaatggcccagattcttccatttctccagcaaacatgaattgagtacccactgtgtgccaaattctgagctaaaagtgctcataaattttaactgaacttgtcacagctacccaggtaaacagataaaggaaaacatttagagatgtctaaacttacttggaaggttgttaatacttacagtgtaacaatgaggttaaaatttagcaaggcttgagacaaatagaaggtttgcctcccactgctaccctacaaaactaggactttgaccaaattgactggtttgctatcttgtgggcaccttgctcttctgtctctactccctaacttttcctttctctttacctggaatgtcacccacccccacctcactcccacacatatccacctctactctacatatcaaaccatacacatcctgcaagacttacgtcttcccgcctcaggactctcacaatatttcatctcactacatgtagtataattgtgtgggaatgcatcttagtttccctactaacgcaaaaaatcctagaatacaataatctcccttacatatctttgtatgcctcagaatgcatattgaaccatttaatacattttttatttacagcaggaatgcatgaattgattaattaaatgttgagagctgtagatggcttttctcaaggtgcttcaagtgcagaagcccaagtgattgacccacacacttacctttgtgttccttccagaaaatcctcagggaggtgagagacccatgttcagctgtgtatggcaccaaagtctatacatagtttctgggagtcactgtgggctgtggggaagcacgtggactctggagtcacacacaccaaggtctctagcctagctctgccacttactggttgtgtgaccccagggaacttaatttacaaatttaagctttagtttcctcatctgcaaaatggagcctcctcgcctttcttcttttgctaccgaactgggttatgagaattagatgcgtgcatgcaaagcacctggtagagtggcacacacctggcagaaggaagtaaattctagtccccgttttcacttaccctcatatacaacggggcacttttttatttgccaactatttctttgaagataataaaagagtcagaaaatgatagtttttaaaagcaccctgcagtccacatgggaaccaaccactacctctggccatgagtttaccctttgggtttccatttgtcatggccaagggcagtgagggctatgccagggaccctcagtgtgtttggccctacccaatcaccatctcaggtctaccccttgtgcattccaccttgcggggctcagtccaccactcagaaggatgcattctgcacactccttgcctgaaagaactcctgaaaggcactgaccaggctctggaaggctatattcttttcattctttataaaagttatgtgattaccaagctcaataatcaaatgtccttcatcgctaaaagattatatggctttggtttggatgctttgggaacaaggaggcaatacgcaatggcttggtttactcatgttacagaaactgtagcagttatttggtaatgctttcaacagtgccttcagcttgtgggaaatcccgaagatggccaaagacaactcaactgttcgttgcttccagggcctgctgatttttggaaatgtgattattggtgtaagtaatgattattttccaggaaattctgcacttcctgtaatcataattctagatgaatcaaaagtaagagtttaaaggaaaataatgctgtgattactgg

SEQ ID NO: 30279 - DNA, 2300 bp, Homo sapien
tttcaaacacagaccacagtgttctctggcactgaagattactaacagcctctgaagtttttctttgagattggggctttttggcctatttagaacaggttttcttaaaggttatatgaatgaattgtcaaacttatgtaactaaaagttataattcctgtctgtgatgttatctttaaattttaatgtacagtcgtcctccttattcttgggggatatgttgcaagactgacagtggatgcctgaaaccgtggatagtgccaaaccctatatacgctgtttttttctatatatgcatacatatctatactaaagtataacttataagttaggcacagtaagagatgaataatatctaataatagaacagttacaatatgctgtgataaaagatatgaatgtcatctctttctcaaaatatcttaccgtatttttttgtggttaactgaaaccgcagaaagtgaaaccaaggactactatattttaaaggaaaactatgtagtcattttatcagaaaacaatattgtttctgttgatgaaaactccattttagaaaaattagaagatacaaaagaaatagaagttttctcctaatactgtaattaagagatgaccaccagtgactatcattttgtatgtaaaaggtatgcacacacacatgtattgcataattggtattatattttatatacttttttttttttttttttttagagacagggtctctgatgcccaggctggagtgcagtggcatgatctcagctcactgcagcctccgcctcccgggttcaggtgatcctccttcctcagcctcccaagtagctgggactacaggcatgcgccaccatgccaagctaatttttgtacttttagtagaggaggggtttcaacatgttggccaaactggtcttgaactcctggcctcaagtgatcctcccgcctcggccttccaaagtgctgggattacaggcatgagccatcacacccagtctttatttcatatacattgttatatctttttttctacttagctgttatgagcatttttctgtgtagttattgtaaacattttaatgaaagcatatgtcccatcatatggatgtattataattaattaaatcagatcgctattgttaacatttagactcttcaatttttggttattttagcaatgttggtttgaatatcatggtatacctctctgattattttcttagaatacatttctaaatgatggaatcaaaaacctttcaaatacatttttaaaatctcattttcacatatcttcttactgcttttccttaccagagggaaaactaacatatctgaaagattgattgcattccaggtccattctcttatatcagtggttctcaaactttaatgcagataagaatcatttggggagcttgttaaaatttcatttttctgagtcctagaggctgctgttctgacccattggctttggagtggggcccaggaatctgcagttttaacacattcctttatgtatttgataaaggctctcttggaaccagatgttgagaaatgctttttaaataaatggccaaacagactcaaaacatttaggttacttgtcaaaagccattcatgcatctgataaccagaatttgaactcagctctttgtgacttcagagccctgttatacccatgatctcagagctttttaaacctttttaaggtttacggtgaggtgcccctaatgactgcagaaagtaaactcctactgactccactgttggtttcttagggacagctgaaagtcacatataagtacacaatgaacttctattggaacctcccatcagaaattctggtgaattctctattatgctgcataacatatactacacaaaataactttggttgtttgggtgttgcaggaccacctggcttcatgtgtggatttccacggctcttgcccagaggcgggtacactgtgttccaatgtgccacggaactcacgcagtggcactttgtggcttcatgaaggaagaggcaggccacgcaacacttcctccccaagccaaggagaagtatcacttttagaggcagaggagcggaaggcagtgggtgtgaccaaaagtgccatttgttaaaggtgaggaccctacccttagaaaagtgttgatattagtgaactgaagggagctagtatcggggtgagcctttttaatttttaaaatccttctcaggtggaattttgtactcatattattaatctttatttcccaccttcttttttaatgtttcattccttttagcagtagcctggaat

SEQ ID NO: 30280 - DNA, 2300 bp, Homo sapien
ccaggcagctgcccggcggaggggctcctcacttctcagacagggcggccagtcagagacgctcctcacctcccagacggggtggcggcggggcagagacactcctcagttcctagacgggtcgccgccgggcagaggcattcttcacctctcagacggggtggtggggcagaggcgctccccacatcccagatgatgggcggccaggcagagacgctcctcacttcctagacggggtggcggccgggaagaagcgctcctcactttccagactgggcggctgggcagaggggctccccacatcccagatgatgggcggccaggcagagacgctcctcacttcctatacggcgtggcagcagggcagaggctgcaatctcggcactttgggaggccaaggcaggcggctgggaggtggaggttgtagcgatccgagatcaagccactgcactccagcctgggcaacattgagcactgagtgagcgagactccgtctgcaatcccggcacctcgggaggccgaggctggcagaccactcgcggtcaggagctggagaccagcccggccaactcggcgaaaccccgtctccaccaaaaaatacgaaaaccagtcaggtgtggcggtgcgcgcctgcaatcccaggcactcggcaggctgaggcaggggaatcaggcagggaggctgccgtgagccgagatggcggcagtacagtccagcctcggctcggcatcagagggagaccatgcaaaggggagacgaggaccgtgcaaaggggggagggagatggggagggagacagagagggggagggggaggggaaaagctgagtgattcttgcaaaaggtatatattatgcttccaggcatcatatgctcaagacctggggactatgtgggtataagtaactgattgtataacgccactggatgaaatccagtaatgtcctttttcactaaatgtggttatacacccttacagcatgttacaaagggaacacaaaaaaataagtttcacactggaccttgttcaggagcagtgttgacctatttcactgacctatcctcaactgccactaggtggccctcttttccagcttccaagggcctacattgggcctatgcggcctcagtatagcctcagatttcctgctatgaagcttaatgagcccagcactggctctagctatggtttgttcctttttgggtggagtggatgtgtggttcttggagaatctactactttcccgtgagtgcagtgggagactgcattagagaatctagctatcctgactgcctaaacagagcctaccataatttttcactcaaatctttagtgtaaatataattgtctttgctttctgtaataatatctttgaagaaatacggatttaaaaaaatcatttaatattctcagacctgcaacatgggaaaaatattattattattattatcatttttgcagttgagagggctgaaatctcgcagggtgattaagtttattagcctctctaaagtctcagtttcccactctgtaaaatggaagggtccctatctctttcctactgctttgtgagtatttaaggggatggaatttgggaagcgctcagcacccagtctactattggcacagggttttaaagccacccagaggccgaggcgtcaaccctccgtttccctcccggtgctccttccagcgcccggtgtggtcgatttggcgggggtggagcgccaggcgcgtgcagagccgggcggaccagcctctccggccaaggcgggaggcggagctcgtactcaagagccgcctcccgggcggctggggcggtccccgagctgctttccgcgttctcccctctccgcgggcagtgctagctcgccgcggccgcctccggggtgagtacgctggctccgccggcgcccgggaaatgcagttccctggacacgggcgccgtgcgagggtagccgggcgacggccggggtcagtcccagggctgtagcggggcgggcgtggggatgacgtggcggcgtccgtggggcagtcccgcctcagccggagcggtgggccgggccgggggcctacggaggccgagcctggcgggaggcaccggctcaggtgctggcgttccgcgcggcgccgcctctgctgcgggccgggggagccagacgaggtgctgccgggtaggaaaaaatccagggctcattcataccccaggtcacgattccggggtcgcccccagcacttctccgccgggtgcatcaacctgaaaaagccccttcttcctggaaaccctccttctccagcgt

SEQ ID NO: 30281 - DNA, 2300 bp, Homo sapien
gggcagaggggctcctcacttcccagacggggctgccgggcagaggggccccccacctcccagacggggcggcggccgggcagaggggcccccacctcccagacggggcggcggctgggcagaggcgccccccacctcccggacggggcggctggccgggcgggggctgccccccacttgccgggcggggcggctggccaggcgggggctgcccccccacctcccgggcggggcggctggctgggcggctgccccccacctcccggaccaggcagctgcccggcggaggggctcctcacttctcagacagggcggccagtcagagacgctcctcacctcccagacggggtggcggcggggcagagacactcctcagttcctagacgggtcgccgccgggcagaggcattcttcacctctcagacggggtggtggggcagaggcgctccccacatcccagatgatgggcggccaggcagagacgctcctcacttcctagacggggtggcggccgggaagaagcgctcctcactttccagactgggcggctgggcagaggggctccccacatcccagatgatgggcggccaggcagagacgctcctcacttcctatacggcgtggcagcagggcagaggctgcaatctcggcactttgggaggccaaggcaggcggctgggaggtggaggttgtagcgatccgagatcaagccactgcactccagcctgggcaacattgagcactgagtgagcgagactccgtctgcaatcccggcacctcgggaggccgaggctggcagaccactcgcggtcaggagctggagaccagcccggccaactcggcgaaaccccgtctccaccaaaaaatacgaaaaccagtcaggtgtggcggtgcgcgcctgcaatcccaggcactcggcaggctgaggcaggggaatcaggcagggaggctgccgtgagccgagatggcggcagtacagtccagcctcggctcggcatcagagggagaccatgcaaaggggagacgaggaccgtgcaaaggggggagggagatggggagggagacagagagggggagggggaggggaaaagctgagtgattcttgcaaaaggtatatattatgcttccaggcatcatatgctcaagacctggggactatgtgggtataagtaactgattgtataacgccactggatgaaatccagtaatgtcctttttcactaaatgtggttatacacccttacagcatgttacaaagggaacacaaaaaaataagtttcacactggaccttgttcaggagcagtgttgacctatttcactgacctatcctcaactgccactaggtggccctcttttccagcttccaagggcctacattgggcctatgcggcctcagtatagcctcagatttcctgctatgaagcttaatgagcccagcactggctctagctatggtttgttcctttttgggtggagtggatgtgtggttcttggagaatctactactttcccgtgagtgcagtgggagactgcattagagaatctagctatcctgactgcctaaacagagcctaccataatttttcactcaaatctttagtgtaaatataattgtctttgctttctgtaataatatctttgaagaaatacggatttaaaaaaatcatttaatattctcagacctgcaacatgggaaaaatattattattattattatcatttttgcagttgagagggctgaaatctcgcagggtgattaagtttattagcctctctaaagtctcagtttcccactctgtaaaatggaagggtccctatctctttcctactgctttgtgagtatttaaggggatggaatttgggaagcgctcagcacccagtctactattggcacagggttttaaagccacccagaggccgaggcgtcaaccctccgtttccctcccggtgctccttccagcgcccggtgtggtcgatttggcgggggtggagcgccaggcgcgtgcagagccgggcggaccagcctctccggccaaggcgggaggcggagctcgtactcaagagccgcctcccgggcggctggggcggtccccgagctgctttccgcgttctcccctctccgcgggcagtgctagctcgccgcggccgcctccggggtgagtacgctggctccgccggcgcccgggaaatgcagttccctggacacgggcgccgtgcgagggtagccgggcgacggccggggtcagtcccagggctgtagcggggcgggcgtggggatgacgtggcggcgtccgtggggc

SEQ ID NO: 30282 - DNA, 2300 bp, Homo sapien
taacagggcttggcaatttctccattatttgcactcagaaaaggggctctttcagcctctctcttttgctgacaagatgatgaaatccacgtaagtcagatgaaagaatgaatgcaaaagtccttgctgaagtaaactgctaagcaaatgctaatagtgatcattatagtcccatatggagctgcttctctataaataaagggaggaacaagccattgtaccaaataccttatcagatactctccaagcagtttacaaaatgcttagaaattgctgccctaaaagtaggactggggagctattgaaaggttttcagcaaggcaggcaggcatataacaacagcaatccttcaagatgactcctcaagcttttaatacataggatggaggaagtggaggagattggactcaacaaatcccactaggagttactttaataattgaggagtggatggtcctcactgagtgggcctggaaaggaataaaccaagctgagaggcatggtgaagagctcatcgtctgggcgggactaccttgcaggtgggagaggaaggagacaaatgagtctgtggttacttgaagacatttcaccaagatgactggggcaaatgcttctcagtgtcactgagagatggaaaatgaaaaacaggaaagacaattcatagaggttgggctgcaaactcaagtggcagcagaggccaggcaggtgcaaaagggggaagacaggccgtggggtctgcaaaactgcaagagtcgtctctctaaagagggtgcctccaaggggcctgccacaactcagcatcagccgtccttgccatatgggaatgcacttgtggtgtaactagatcttccattttttcaagagaagccagaaattcagattttatgtgaaatctcttaactttttaatgctagctactaattttaaaacgtgttaaagcatggtgtctgccagccaagtacatctatgggccagatctggcagggtggctatcaagttgtgacctctgacatagagaaaatgtcaagggtcaaagttcatagactgttaaggttacatagagagacagtgactgtaaagggattcagtacctaaaatgctacggatgcagctttgccagcaatctgagctgtatgacatatgcccctatccttcaagcctgtatatggatttgaatttatacaggaagtttcatctaatcctcaaatggttaaatcacaagaatttgagtgctttctgtgtgctgagtacacagaagttaaagaatttaaaatctaactggagaagaaaaaaacatgccctcttgaaacaacttgaaacaaattatgaaagaacctgggagactgctttcttcacatttcatgtgtcagaggcatcttaaatcctggtttgtcccccccaaatcacttccatttagaaaactttgcagtagtgtgtgtgtgtgtcttgaatatgtaaccagaaatctgatttcctgggcagtggttacaaagctgcagcctctctttgcccaggggtatctttaccccagagtgggaggggagtgagctgaggtgggggtgcacgaacgctgcagaggaggttgggatgggagtggccggcgtgaagccactgcctgtcaggtttctccgctggagtcccctgtttgtctctgtcattactctttaagtatttgcgtagcagacaggcgggcaccgaaatagaaagtgtcaaagatacgatgacaatgaggataaaaccagggcagagggttctgaaagtcccaaccagcacggtccccgcagaatgccagcgcacctcctcccgccacttcaaagagccggctcggcggggcaggaagcggcggctgcggctgcgggtcctgcgagaagagcgcgatttcctccggggctgcccagttatctctggagtcgcagaactgctctcgggagaacgcgttctctaccccaaccccgtgctcctcaacccacccacctacttcctctagctccacacactcacaagcaccgagctgccaaaaatttccacccaccgcccccctccctagctaacttccttccagcatttcctgagctggatgatcctaggatttgtaagacaggaaaaaaaggaaggcgtgagggcgggcagcagcgacaggatgcttgtttttcgctctaccaaagtcgtctgaaggcgagacagcgggcccagggcgcaggacccaccgcagccccctgggcagtctcctcgccccgcgtccgcgtcgtctccggggcacttagtaaggggtggggagagcttgccctccctcttaagct

SEQ ID NO: 30283 - DNA, 2300 bp, Homo sapien
tttttgtgattatgtataatgctgctgtgaacattcacatacacgtttttgtttgaatatacgttttcaattctctttattatatatgtaggagtggctggcctttcttttttatttcaactctccagttatagatttttttcttttaaactatataaaaacctttttgaaagtaaaagagaagtaatatgcatacatttattcattcacccttttgagcccacaaaaaatttattggggatttactctacagcaggaactgttgtaggtattccacatgcagcatttcattgatttattacagcaaacatgataaagttgttatcaaccttattttatacatgaagaaccagagaaccagaatagcttagtaacttcccaaagccacctagtaagtaattcgctgcgtgtggactactgaacccaaatcttttagcccatgctctttccttaactctattctgcctctgtgaggaaaagaatatgaaaatagataactaaatcattgtggagaactagggtttttgggaaatgttcttctggacagcaaatcccatccatgactgttaatgttaaggctgttcctaattccaacctgaaaatgccttttctctttatggctattgccttaaccatctttttgtcctgcatattaaaatccagtttactctttagcctttaactcttcattgcctccagtgcttattattcacatacatttcatttaaaggttcttattataaattcttactgacttcaataaattgccatacttaatatttacacaaaatggaataagccctattctctggaattttagatttggacagagttctgcttcaaactgaaaagattttagaagttttcttagtccatttgggctgctataaaaaaaataccatgaactggttagcttataagcaataaacctatttctctcacttctggaggctgggaatttcaagatccaagggccggtagattcagtgtctggtgagggcccatacaccacagtcagcaccttctcactgtgttctcacatggggaaaggtgaaacaagctcccttgggcctcttttataagattactaatcccattcattagggctccaccctcatgacctaatcacctcctaaagacctcacctcttaattctattgcttttgtagggaccagccctacagggtcagtgggtctctccctgtgtgcggcgacgagagagtgtagaaataaagacacaagacaaagggataagagaaaagacagttgggcccgggggaccactaccaccaatgtgcggagaccagtagtggccccaaatgtcgggctgcgctgttatttattggatacaaggcagaaggagcagggtaaagaatgtgagtcacctccaacgataggtaaggtcacgtgggtcacgtgtccactggacagggggcccttccctgcctggcagctgagacagagaaggagaggagacagagagacagcttatgccattatttctgcatatcagggactattagtattttcactaatttactactgctatctagaaggcagagccaggtgtacaggatggaacatgaaggcagactaggagtgtgaccactgaagcacagcatcacagggagatggttaggcctccagataactgcgggcgagcctgactgatgtcaggccctccacaggaggtggaggagcagggtcttctctaaactcccccggggaaagggagacccccctttcccggtctgctaagtagtgggtgttgttccttgacaccttttgctaccgctggaccacagtccgcctggtaacgggcgtcttcccagacgctggcttcaccgctagaccaaggagcccttctgctggccctgtccgggcataacagaaggctcgcactcttgtcttctggtcacacctcactatgtcccctcagctcctatctctatatggcctggtttttcctaggctatgattatagagcgaggattattataatattggaataaaaagtaattgctacaaactaatgattaatgatattcatatataatcatatctaagatctatatctggtataactattcttgttttatattttattatactggaacagctcgtgtcctctgtctcttgcctcggtgcctgggtggcttgccgcccacagctttgaggattctattttaacatatgaattttgaggggacagaaacattcacagcatagcagaaggcattgaatccaatacttttatttgatagatgagaacactgaggccaaagagattgtgatatctc

SEQ ID NO: 30284 - DNA, 2300 bp, Homo sapien
atgcaaacacacacgtgtgtgtttgggtcaggcctatgcagggtcaggatcatcaatatcaccatctttcacctccacatcttgtccctctggaagatcttcagggtcaagaacacacatggaactgccatctcctaggataacaatgccttcttctggaataccttctgaaagacctgcctgaggttgttttacagttaactttcatttttttaaaataagtagaaggagtacaatctaaaataacaataaatgtatagtatagtaaatatataaaccagtaacaaagtaatttattatcattatttagtatgttatactgtacataattgtatgtgctatacttttatacaactggtagtgcaggtttgtgtacaccaggatacattgcactacaacataaagacagctacatcattaggcaataggagtttttcagttttattatactctcatgggctcaccatcatttatgtggtctttcattgaaacatcattatgggacacatgactgtatttaaaaatgaaaaaaaaaccagaatggttgtacgagtactggaagtacagtttctactgaatgagtgttggttttgcaccatcataaagttgaaaaattgtgagtcaaaccatcctaagttggagacttgtgtgtattcctaagtgacagctctgtggtacattaggacattaggaatatttgggaatattagcaactttactggtttcgatatcagtcattctggctctaaattctggttctggctcttattagccaggctattttcttttttttctattattattattattatttttgagacagggtctctctctgttgcccaggctggagtgcagtggcacaatctcggctcactgcaaacttgacctccagggctcaagtgatcctcccacctcagcctcccaagtagctgggactacaggtgtgagccaccatgcccgatttatttttttacttttttcatagagacaaggttccactatattgctcagggtggtctcaaactcttgggctcaagtgatcctcctgccttggcctcccagtgttggaattacagtcatgagccaccctgcctggccaggcaggctattttcaacaagctacttaacttctcttaacttcagtttcttctgtaaaataataaccatagtagaagctatcaaaatgtgagatttaaatgaaatgtgtaaagctactaatccagtgcctgacacaacaaaattcttaataaaggttaatcattcaatcaatacaaacaactttctattaaggagattaaaatctctggagtgaaagattacacaaatgctccttttgacactcttatcttcttctaataccaaactattgtcaattcctgaactcaagatgacgttgctcacagatctttacctttttatctgccacttctccaggaggactgccattctcccacaaagcccctatgcctttgtggagtcttggctgaaaccccaagctctctgcaaagcttttcttggtattgacatcaccaccatcccacagaattcgttagtgttacatgctatctctggaccttggacacacttttaatattgtaacaaatggtaattactgtattttcttagtgtcgcctctcttccactagactctgagcttttgtggtattcgctttgtaaccacagcatctgtctagttcttagcaaacaataagcgcagggttggatgctgacgcatgacttcatgacttgggctccctcacttagcagtaacgtgaccctaggtgacacctcctaatctacactcatctgtaaaatggcggtgataacttgtacatggttactacatggagtccaagagacagcaagaaggatcagtagcatggtgcccgcacctagcagccgctagctgactgaggccgaaagaggaaatgctttggccaacactggccggaaggggcgggaccgcgagttaagaggagaaggcgcgccccactgcgcaggtgcaaatggtaggggttgtcgtgccggctgattccggggacgcactcgcggctggggcagaccgcggtcgcgtagctgacgtcatcgccgtgcgctgccacgtctgctcagctccgcggtaatggaggctagggatgggtgctgaagtatcaggctctggctctagctttagctctggcactggaactgcgtcggagtctgggtctgagtctggcagcccgaagcctggacaccttttcttgattctctaggcgggggctgcctgcgtccaagcagctggtttgcagcgttccaacgct

SEQ ID NO: 30285 - DNA, 2300 bp, Homo sapien
gccctggtggaatatagaccaaatgcccatatgggtgtaatatgtgaccgatacggcccattcctaggtaatcaacattattttctcttccaccattccttaacgtgcatcctaaagcctccactactgtcaagctaaatttgatccccaccttctgcaaattatggctcccatatttttagtgactccagcacaatattccttaactgtaacgtttccttttcttcagtacaaaatatacccctcctacccctttctccagatttccacttcatattgatcttttcctccactgaaaccagtggcacttaactattgccttaaattgtaaactatctctaaggaagcatatttgtcttccctactagttctaaactcctgggagcacagatttgatcttgtacttccctgtatttccatatttccacaaggcttagggatataaccatgtacattttagaaaatagataaatattgctgggcgcagtggctcacgcctgcaatcccagcactttgggaggtcgaggctggtggatcaccggaggtcgggagttcgagaccagcctgacaaatatggagaaaccccatctctactaaaaatacaaaattagccgggtgtggtggcgcaagcctgtaatccacctactcaggaggctgaggcaggagaattgcttgaacccaggaggcggaggttgtggtgagccgatattgaaccattgcactccagcctgggcaacaagagcgaaactccatctcaaaaaaaaaaaaaaaaaagaaaatagataaatatttgtagttctatgattactaaatatatctacactgacctatatatacctgtataaagatatatacctgtactatactatatacctatattgtccagtatcatgttgcccactgtcaagaaacaaaatttcatcaaatttagtttaaagttcttggccaggcatggtggctcacgcctgtaatcccagcactttgggaggccgaggtgggcagatcacctgaggtcaggagtttgagaccaacctggccaacacggtgaaaccctgtctttactaaaaatacaaaaattacccgggcatggtgacacactcctgtaatcccagctactcgggagactgagacagaagaattgcttgaacccgggaggcagacgtcatagtgagccaagattgtgccactgcactccaggctgggcaacagagttagactgtcctctgtctcaaaaaaaaaaaaaaatcgaattggcttttattagtgattcatgaatcaggcagcatctcatctataaaacagaaaagtgttctaatgagctgagcagaaggggttgggcttataggcagaaaagggctgaagaaagcagaaataaggaacaaaaagcagattggtcattttgaagttactttcctcaaagagttacatcagaggggacttctttatcatgccagctcaggtatatgggccccttctcctatttgttggaaaactgaccccttttaaagctgagtttaattacgcagcacctaggacaagttgcctccattctggttttgtctgctctcttgaggcctagtgccagagttctgtccaaaacaacgacctcccataaactttatttaacaccattgatcttttttcctacgtctaagtcaccccaactgttataaattcctattacaaagggatccctgctatgctaattgcaacctttggggtctaaccgtgctgtacacacacacacacacacacacacacacacacacacatgctcaacaaatttatgctatttgataagaggcaatttgacgtcaagagaagaactgtttggcctaggctctatgccaagtcttggttgtgccactaaccgtgaaacataccctctctgaccttcagttttctggctgcagacctattttcccaggggtgccagggagggaggataggcaactggtccattcgtttatcctccccaccttcccggcgcagccttctcagggaaactccgcctcaaggctggggactggaggaagggtggtggggccacggtggccatctttgtgcggggcgacccgccgcccacgtgctgcggctcccgggccatctttgtgcggggccgcgcttccgccagcgccgcagcggggaatctgcagtaggtctgccggcgatggagtggtgggctagctcgccgcttcggctctggctgctgttgttcctcctgccctcagcgcagggccgccagaaggagtcaggtgggctccgggcagtgccgagcctgccccttgggctcggggtct

SEQ ID NO: 30286 - DNA, 2300 bp, Homo sapien
ctagcatgtcaatatatgataaatatctgtggagcagatgaatagaaaagaccatgaagggagcagggttttgtagttttagcaagtgagtccttgccagagattatactccctcttcaccctcctcttcacttcggagctagactttaggaggtaaatggattatccagctactatgtcctgtttcttaccaacttctctgattcttaaatcttgaagtcacaaattaacttggggaccatgtctggacttcaagagttttaggactcccttgaaattatgtgaggatatgtgcatttttctgggaaggagagagggttggttcatagttcttaacagattatcaaggaatccatgatgcctcacatgtcaagaccctctgctacttggaacatcactagaaattcttccacatacagtcgtcaggtttttaagccctttggtttttgtgcattttttttaaattaaatattatactgggctgtacagagcatacataacaaaggtcatgtagctgttttagtgagtcgtgactacctagcctcacagttatgagcaccagtgattatagaagccacatgaactttcctaaaagggaaatcattccctgggatttgactatagtgacctgaacaacatacccttcaagaccaaatgcaagcaaagaagggccaagtaccccccaaccctaaaggtacagaggggaccagccctggatgacctagatgctgcagtacccagtatacccctcctccgctgtcacgtcaccagtgaattgtccacttgtgcagagtcattgcattgggtcctagtcctgctcacctttcagggattgggaacagttttctaatacaggccacacagttttatgtcacgtgtttcttttataggacaagtccagaacgagatcctctcattcttctgtctcggaaaaacccaaaacttgttgatgcagaatacaccaaaaaccaggcctggaaatctatgaaagtaatcaccagtcatctgactagaactacagcagtgaacattctcactcaaagaacattgccacctgggtagaatttgagattaggtttcctgtcagtggtgaggtgaatgtaaagaaagttccatgaaccagcattagcatatatgtaaattctcctttttcaaacttacattgcttttctggccatattatgactagtatattgcactactttgaaggtttaaaccaggggtcacaaactttttccaggaagggccaaatagtaaatgttgtaggttttgcaggtcgtatggtctctattgcagttgccaacagacatgggcagtttgtaaatgaatgagcctggcagtgtttttattaaaactttattacggccaggcatggtggctcatgcctgtaatcctagcactttgggaggcgaggcgggtggatcacttgaggtcaggagttcaagaccagcctggccaacatggtgaaaccccgtctctactaaaaacacaaaaattagccgggcatggtggtatgtgccggtagtcccagctactggggaggctgaggcaggagaatcgcttgaacctgggaggcagagattgcagtgagccgagatcacgccattgcactccagcctggcgacagagcaagactccgtctcaaaaataagtaaataaaaataaaaataataaaaaataaaaactttatgggcactgaaatttgaatttcatgtaattttaagttgtcataaaatattattcttttgcctttttttttaaccatttgaaatgtaaaaatttcttagtccatgacaaaaacaagcagtgggtcaaatttggcctgtgggtcgtagtttgccaacccctggtttaaatcaatggtctcaaccctggctgtgcaatacaaccagagagcttaagaaaatgaatcaaatgagtcagaatctctgggaatggtgtccaggaatcttcatttgtttaaaacttttcaagtgattctaaggtgaagccagaaatgggaccgttggtttacagtccactctctcctcttaactctatggctttttgccttaatcaaagaaattaaagccctaaacttcctttatatgaaatttccatataccatatgaggatgctatgaggaaaagctttagacttcttgggagaaaactaagtaaatctgaggtgcatgtattatttcatacagttttaatcaggagcaagtgagcttaagaaactttgttgaataataaaaatatgaaaaaatgtgttcatttagaacaaaagttgttagcatctactgtgggaggctgcagaag

SEQ ID NO: 30287 - DNA, 2300 bp, Homo sapien
ataaaattctgggactaagaattagatgaacaggtaaaaccaggtctagaggagggcagtggtggtgggggtggctcagagttaggagtgctaatgacacgcagagtaggagctatatggtgaaagcaactctggttggcgacaggtgcgtgcataagaaatgctgagaagaagacagctttttttgttttttttttttcccctgtgggcaatctctgaaaattgattaggttttcctcattctcctctctacaccaggggtccccaaccccctgccatggtactggtctattaggaaccaggctgcatggcaggaggtgagcagtggggaagcgagcattaccgcctgagctctgccttctgtcagatcagccttggcattagattctcataggagcacaaactgtattgtgaactgtgtatgcaagggatcaaggttgcgtgctccttatgagaatctaactaatgcctgatgatctgaggtggaacagtttcatccaaaaccatctcccccacactacccatccatggaaaaattgtctcccatgaaactggtccctggtgccaaagaggttggggaccgctgctctatactttaagagaagagggtgatgtccaggaagcagtggagaccttcgaccagatggggtacactagaggaaaaacaaggctttgggaggccatgactagttagagacattaggcctagaaaagcttgtgaaatttttttcactcgttttattttatgtttaccattgaacatttattttctcagatatgttccaaatctacaagctgtcatttccttctgagccctgtatacactctacccggcacccagctcctgaccctatctagtgctgtctggagaaaatatcccctatttttcctcaccctgccattcccagaacaacctgtagtcctagccctggtaaagtggctgatagaaaccacttaggaacatattaatgtgtccttgaaaactcaaagtggaaagagaatggagaggaatcataaaaggaaagaaggggaggggagaataagcataaaaggtcatatttgtggcagcaggcatatagtatcaaatgtattttgttcttttttccccaggtatctgtttaattttcgaggcgtagctgcaagtttccggtttaaacacctcttcctgtgtggctcacttgttttccatgttggtgatgagtggctagaattcttctatccacagctgaagccatgggttcactatatcccagtcaaaacagatctctccaatgtccagtaagcagttatcccccaatgcagagtttctaaagacccttccaatctgcttttaaaaatgccttaatgccttaaaaccagtcatgtaagacatttagtcctacgatttttttccattgaaagctttttttcctcttggtttgcatatatagtattgcattattatccaagtaggctataagtggaatttaatttgaaaaagcgctttaatactggtttcaaatgaaacgttcagacaaaatgaagttaaaaagctctaatctctccaagactaaagatagggatattcaatcttattatattgtcaaaaggattttcagatacagcatgagaattgactcaagtgaagcttcagcaaatttcctttcatgacaggaggagctaggaagaagtatagagaagggccagagttatctgaatattgttatcatggtgatatctgtgtatatatattttttttctatatataaatatatttatatataaatatgtaaaataatataaatatctaatataatatataatataaatatacaaaatatatgtaaatatataaggtaacttctgtattttctcaaatatgtcccaaatctacaatagggtatctttaatcagtgtgtgggggtttttttttgttattattttgttcttgagagaaccctgatatctttgcttgaaggaaataatccaccatccacatacctaaaattatccatagacctcaatctatatcgtctttctgacttagtgccaatgaagttggtctatatttcacagtctaaaattcttttcattttagagagctgttacaatttgtaaaagcaaatgatgatgtagctcaagagattgctgaaaggtgagttctgttcattttcccttttccactttactttttgtcatccccattatgccctagccaaagttatctgaatattgttatcatggtgacatctgtattttatcctcattatatggagataattcagaactaaacctgtcctgggggaaaacatacacacatg

SEQ ID NO: 30288 - DNA, 2300 bp, Homo sapien
acagcctacagggctgggcttggtggctcacacctgtaatcccagcactttgggaggctgaggcaggcagatcacttggggccagaagtttgagaccatcctggccaacatggtgaaacaccatctttactaaaaatacaaaaattagccaggcttgtggcacatgcctgtaatcccagctactcaggaggctgaggcacaagaatcacttgaacttaggaggcagaggttgcagtgagccgaggtcttgccactgccctccagcctgggtgacgaagctaagactgtatcaaaaataaaataaaataagcagactacagaggagggtgagcatttcccttgttctaaaagaaggtaagccgtaagggattggggaagtaggaaatgtgggagggctcagatggaagagcagcaacagtgcgagcagtagccaaaggagaggggagttttttgagttatcaggtggcaaaaggaacattacaaatgagtcttccgttacccaaatgagaaacaagttatggaatttaaaatttgcctgttaatattacctcatctacaggctagtgaatcctggggcatttgagttgtacataagtgattgtgtcagtatcttcccaacacccacccaaaccctcctacccatttcaagtcctccttcaccccagaataattctggggtcatcttatgcatttagctttttctacatataggttagaaacagactgtacagccattttcttgggctttcaggccttggtaacttatcttggtgcccacttctacctaacatgggataagcagtaatccagagccagaagtcaggagatctgaattattcaacaaatatttactgagcacctactgcggttctaggtcctggagatacagagatgaatatatttggtctgtgatctcaaggatagtttattgagacagattaataggaaattatgatgcagtgttgtaagtgctacgatgagtgctgaatcaaatctcatatcccagagtagtcttcatggcgctgtcactaattgagctggtcactctagtcagtcacttctcagggacttatgtgtagcatttccagctatcaaattcctaagtccacttactgtattctactacagtgtggcagttttgattgacaactagaaaggaatcaaggaggtgaagggattggcaaaatgaataagggagtatgcttgttaacaaggattgaatgaaattacacgaatattgagaatattttaaatgcattcattttaatgaaaactgtacttcgaagcatatgttagcagaggttgtagtgacggcaaattatacaaacacttgatagaaattccagaaattctcctgccttttgagaagcagtaggcatatgaactaaagggagtgaaatccaccttaggaagacctgccaaaaagctgattcttcaaaaaagtgttctcgaaatcttagtgtaactggcaccaacacccatccccaatgcctcgttttttttccagcagaactgacaaggtacaaacggaccccgcccagcctggaaggcttctctaatgttggcagagtaggttggacttgtttttgcacaaatcgcctttccctctttccctactccacttgcactgaatattgcactttcttccttactgaagcgggattcctgccttttttttttttttttgagacagattttcgctcttgttgcccaggctgcagtgcagtggtgtgatctcggctcactgcaacctccgcctcccgggttcaagcgattctcctacctcagcctcccgagtagctaggattacaggcgcccgccaccatgcccggctaattcctggcattttaaatacgataaattacttcaacctatgaccacctcaagctgaatataagtagccgcagacaccgtttgcatgacccaggaaccacaaacacggagcgaaggcctgccgggaccacgctgagcttcactactggcagccaactcacttccgggggtgcactcagcacagcagtggcccaacccgccctcaaccggaagtcttttgggctccggcttcgccgtcgccccgccccctggcctttgccccggtcgggcgggacttcctgtgtcgtatttccaaggactccaaagcgaggccggggactgaaggtgtgggtgtcgagccctctggcagagggttaacctgggtcaaatgcacggattctcacctcgtacagttacgctctcccgcggcacgtccgcgaggacttgaagtcctgagcgctcaagtttgtccgtaggtcgagagaagg

SEQ ID NO: 30289 - DNA, 2300 bp, Homo sapien
gatttgctatacagattctttcatcacccaagtattaagcctagtatcttagttgtttttcctgatcctcaaacaacattttaatgaaaactttttaaaatacaaaactagaaataggcattaatagcgttagagcagccagattgtttcatttttaaatttgcaagcatttttacatgggtcttgtctacccacttttacttccttacttgctcctgctgttacgttctctgtcaattgttaaatgtgaaaaccaggccaggcacagtggctcacgcctgtaaccagcactttgggaggccaaggtgggcagatcgcttgagtataggagtttgagaacagcctgggcaacaaacatggcaagaccgtgtgtgtgcaaaaagttatctgggcatggtgattcatgcctgtaggctcagctactcaggaggctgaggtgggaggatggcatgagcccaggaggtcgaggctacagtgaggtgtgatcatgccacctcattccagcctgggcgacagagcgagaccctgtctcaaaaaaaaaaaaaaaactagaaaccaaggaatgatatggttctgctcttttttctctttccacttcttgtcctattaattatactcattaaatatatatggattctttcacttcttttttcccactgctactatcttatcgtccctgtttctaatcttgatgtgctctacctgtaacctagttacatttttgaaatatgaatatgattttgccacttttctgtttgaaattcttctatagtttcctgtcactttaatgtcaattcttgatctggcttccatgcgccactcttttgctttcactttacaatctcctcggatttcccaacatgttctttccttttgtgaatcagtccctcttcttgaatgcactttcccactaccacaattaattttgttcggctcctacttaaccttacctttcaaagtccagatcatttgtcagcctcagcttccctagagagttctccctagccattttctccctagccatgtttagttctatttagctgtctttcccttgtgttcacatacttcactgtttttttctttatctttgattttctgcagtttgaaaatgatatgcccaggtgtaattttgaggaacatttactgtgcttggtgttttctgaactttctggatctgtggtttgttgtctgacttaatttaggataaattctcagtgattgtttcaaagatttctttagctttctcttctccttctggtgttctagtacacttataccttttgtaattgtttcacagttcttggatattttattctgtgtttgtttgtttgtttgtttttggtggaggaggttcccatcttttttctctttgtctttcggtttgggaagtgtctgttgataatgtcttcaagctcagggattctttcctcagctgtgtccagtctactattcttcagttctgttacagtgggtttttaaatttgttttatcgctagcatttctttttgattctctcttcgaatttccatctctctgcttatattgcccatctattcttgcatgctatctactttatccattagagcccttagtgtattagtcatagttgctttaatctcttcatatggtaagtccagtatccccaccatatctgagtctggttttggtgcttactctcttagttttacttggtctcttcaaactgcttttgccttttaggatgccttgtaattttttttcttgatagctggacatgatgtacctgggtaaaaaaggaattatggtaaataggtctttagtaatttggtattaagatgtgggagagggaaagtgttttgcagtcctatgattaggttcttagtcttttagtgagcctgtgcttctgaactgttaacttcacaagtgcttttcagtttttttcctctcctttggtgggacaggatactacagtgggttggaatgggtatttcctttctcccacatgggaggctagagcagttgcatttggatattccccaggctggttaatctctgacaaaaccccaatagtttgggctgtgcaaaaccatttatcttgagggcaggccttagtgagaataacggaatgttctggcatatttcaaaatggttacttttcttcccccttgccagaagcctgaggggatttttctcagatctttactgggagaacttggtagagctcctggagtgtggggaccctctatgattggctcccctacagtttttaggtcttagacttttctacactgaacttccagcaatttatcatttatagtcaa

SEQ ID NO: 30290 - DNA, 2300 bp, Homo sapien
gcatgagccactgtgcccagcctccttttaaatcttttacttggttttgttttgttttgttttgttttccagtaatataggtattcgggttcggcttcctttgcccgtcttcatccatctcacctccagtgtccagaaatttaccttagaaatctgtggtccacaggtcatgctcctagacacattgtaggaggaagaggaattaaacacatcccattagtacataatcttggaagagaagccttctgaattttacaatcaggattggggaaactctgtaaagtaccttcctggtgttcctttcttccagcctctttgattaagtcacatcaaagcgctaatggcaaagttgtttaatgtgtgtttctccaaggcaggttaggatttcactgggattcttaaaatttgagggtgtctgtgatcgtcaaaatttgtattcatgtagtccctcatgaaatttctaaaactcggctgggtgcagtggctcatgcctgtaatcccagcactttgggaggccgaggagggtggatcacaaggtcaggagtttgagaccagcctggccaatatggtgaaaccccatctctactaaaaatttaaaaattagcctggcatggtggcacacgcctgtagtcccagctactcaggaggctgaggcagaagaattgcttgaacccaggaggcggaggttgcagtgagccaagattgcaccactgcactccagcctgggcggcagagaaagacttcatctaaaaaaaaaaaaagaaaataaatttctaaaactctgtatttctttgctcttttaagttgacatctataactttctattactttaaatacctggaaaaaaaatcacttccagtgcattgtaataatgtatcaagtagaagtggctaaaatcagtgaaaacatttctttgatctgaataaatgttcaagaaaatagaaaacatgaacttacctccaatctatgttccctttacttgaaaatgtaatgttgatctactagaggtaaggcaggaattgtcacatccatattccttgcaactattcaaaatatgcatctgagaccagaacaagacacaggtgaagaagggtgctcactaggccccttctgccaatacagaaggagacagtgcagtggagtcctttcatagcaagttctgccttcatgatttccaaagcttcagtattccaaatctcaggtgaatagggtggtatccactaagctctgccacaaacttgttgctgagatgaaggaagccgccgctgtagtcagtatttctcacccacacggtttgctctctttctggctggtgtgggaaggatggcgtcttttttttttttttttttttgagatggagtcttgctctgttacccaagctggattgtagtgttgtgatctcggctcactgcaacccatgcaaggtgctgtcaggttccacctgtgcaaacaagtacactggtccagcatgggtcagctgctcactcacaggggctccagaatcctacaaagggacacacaggggtgggtggcaacctagttggaaatgggagtgatgggcatgactaaagtcttcctcatcccaccagaggcgcactcaactgtggctagggtgaccagaattcactgtccagcgtggctggcaggagcccactctctgaagatggtgggattcagaggtgggagtagagttgggtggtcctgtgagctgagcactctcccaaaagtgtcccctacatatgaggttgacagcttattcctgcagggactcaggagtaactctgggtgctaaaacaaaacttgagaccagcacagaaacagccagcccatgaagctggcctcccatcacacagcaaggctagccagatgcccctcactcttctcgggcaccattcttctcctcccctaggccgcctggtgctcgtggtgtttcatgtttgttagtccatgcacggtggtgagggaggctgctgtgtgatttgccccagccacagcctctacaaaagcaactagaagaagacggcagcagagggcgcttcttcaaacaccctgtccaactcctggcactgacaagtactgagtgaactcaaaccctctgtaaagtaacagaagttagaaggggaaatgtcgcctctctgaagattacccaaagaaaaagtgatttgtcattgctttatagactgtaagaagagaacatctcagaagtggagtcttaccctgaaatcaaaggatttaaagaaaaagtggaatttttcttcagcaagtaagtacatttactattatcttactatgggatagct

SEQ ID NO: 30291 - DNA, 2300 bp, Homo sapien
gtttgtttttgtttgtttgtttgtgttttgagacagggtcttgctctgtcgtccaggctggagtgcagtggcacaatctcagctcactgcaacctctgcttcctgggctcaagcagtcctcccacctcagcctcctgagtagctcagaccacaggcgcatgcctggataatttttgtattttttgtagagaacaggtttcaccatgttgcccaggctggtctcgaactcctggtctcaagcaatctgtcccccttggcctcccaaagtactgggattacaggtatgaaccactgtgcccagccccagttattctttacatttaagtcaaaaacgaaaacaaaaaatcaccctttcccatggattctcacagaaagatcactacataatatgaacaatatcctcagcagacatcttaagctgaaactgtgttgagttttatcgggatgcttattattcaaaatgtctcttactacagaacttgctttgactgcatcctcagaggctgaaaatctttgacagttgaaagaatgaaggatgtgccatccccaaatatgccatataatatattgattactttgagttgaaaacattagagaaattatagtttcagaaagggtaaaactgagggctgacctgattaggcctgacacttaatttgccttgcttgcttttggtcacttgcttctagtcgattttaaaacctgcatagctaaaagtcatgtagctagacgatacataactaaattccacttgcctccttatagataacttctctgataggacaccatggaaaatattgcttaagttatttttcaggaacttagagtcagttcttgtccagttcaagccaccagcccttcatcttggcctgcgtgagtgtccaatgggtgaccttttgacatcagaaggcccaaaactccactctcagatcatgctaacgtcacgattttgtgaacatgtgttctatgaacagccatgaagattgactatgcttgctcagattaccgattgcctcacttttccttacctcatctttctctgaaccttggaccaccttcctcccctatcccataagcactcctaaaattccatctttggaaaggcacatttgaggcctgttctccagtctcctgtcttggctgccttgtgaatacaccctttctctactgcaaaacttgtgcgcctcagtgattggcatactgtgtgaaagacaaatgagcctggttccctgacaggagctgagctgtctcttcctgcatgcagccagcaataaagattcctctaggagaggtatgttctccacgccagagcgagaaaatagctctcatcaccagagatttggaactggaggtggcatttggactggagtaaacattcttgcaaagtaaccattatcttccacctgttttacaccccaccccccatatatctcctaggggctcccctagaaattttttaccaccctagccggattttctttgtcctgtcacttcttcttaaatttatcactctttttctaaaaagtataaaagcatcttgctttggacactttcttcaggattcagtctcttaacatccccatgtacatgtaaaattaataaaatttgtatacttttctcttgttaatctgcctagtgtcaatttggcttctagatgcagctgattagctcactaagagctagagggtgtagggggttggaggtgatctctgcctcccttattggtgaacttgatttttgtaaacactcaaaagtcacttaggctagagttggagatggagatggttattcactgggaaggccacaagagaatgttttaaagtgatggaaatatttcatatctcgattatggtgtaaggacatttcattatatataaattatatatcaattttttaaaaagctctcagaccaaggctagtcattacagcaagaaaataggcatagcaaatttaaaactttggagaaatatatagaatatttgcatatggtgattctgatttgctttaaaagtgacatgattaatgtatttagacaaaaatactcttcgtttttctttgcttttatttacgatcaggatacaagaattctacgctgctgccaaataaatgactagttaaaattaactaactgaatccttaacaaccattctaagaggcagatattattatcccactttatgcgtgagggcccagaaccctggcaagggcggcacactcagtacgctcttcaagcatctgggcacacccggtccactacagtcctacaaagtcggacgtgagcacgggcgaaggcgtcagcc

SEQ ID NO: 30292 - DNA, 2300 bp, Homo sapien
tagttcgggtacgagaatgtgacccgtgaaagttcagaggagttaagtaattacagcgttctgaaagcgaacgttaaagggaatttacaaccgaaaaaagatgccggtcttcttcccccatcccagcttgcaattcacagaagcacacattagggtggagccagaaggaattacggaaaggacaatgaggacattgagagggagggtatggggggttaaagttagtcctccgaggccaagaagcagagtgtcttggcctagtgtctgaaaatcgcagcgcaggacggaacttccgagagcctatacctccccacttccccctccagtttacagatgggcaaaccgctgtcccgggtgtctgtcaggtctagtagcccagaatctcagtgcctaggcttcactgtaaataataaactatgtaaataacatttacaaatatcctttgtgagctcagaaactcagcattaccagtaactgggtagtggaacgcatccatcttcgtcgtttactccttctccaggggctctccagcctgcattccatggccaacagcagtgcagctgcagaagcacttctggaagcctcctgacttgaactagaccttgggtaaatagggtttagataagtggaggggagggaaaagtttcacctgaggggagaatgagctagtctgccagacccttataaaagtattggcctggatgggatggagggctttgacctgaaagccacagggagaagggaaccctgaggaattggctgaaagaggggggttcttaggaaatgcaccaacagggaagccagcgctttaccagggatttcattcatggtgggtatattattaatagagattcgaattctctagaagctgatcatttctaagagaaacaatatttaaacattactgtcgaaggaaaggttgtggggagaaaatgttctagttctaaaacagaacacccattttccctggttgtatatgaataatacaaatatgtcaaaaatcaagcttactatgtgccaagcactctaagaactttttttttttttttttttttgagacagagtcttggtctgtcgcccaggctggagtgcagtggcacaatctcggctcactgcaacctctgcctcctgggttcaagcgattctcctgcctcagcctcctgagtagctgggactacaggcatgcaccaccatacccggctaatttttgtatttttagtagagatggggtttcaccctgttggccaggctggtctcgatctcctgacctcagatgagccacccacctcggcctcccaaagtgctgagattacaggcgtgagccaccgcgtccagccaactttatgaaatttaatttatttattcctaacaacaaatccaggaggttgttactttttaaaatcagtgccattttataaatgtggaggctgaggcaccaagaggttgcccaaggtaagaagatctggactgaggctgagtggtgtgataccaagcatcctggcttggctggaatcagatttgggttccagtacttccactcctcttgttttgtgaatttagcttatctgagccttcattttcttatctgtgaaatgcatactgtaatccctccctattagtgagacaatgaatgtgcaggtgctttgtgaactacacattgtgacactaataggaagtgtaaagccttgcacttctaaggccaaatcccagctaagaagagcaaatgatgagctgggtttgacttgcagaatttagtgggcttactactcaccaagaggcaagagatacagttgtagttatgatgatagactttggagtcagatggacctatgttgggatcccagccctgccacttattggctctgtgacctgagacaagtcactgaacatttctcaaactgcattatctccatggtcctccatttgttcatacataaaatgggctttatattcctcatagagcagtgatgaggattacatgagatgccactgatacaatgtctgcaagtagtgagtgctcaataaaacatagctagagtcgttgttttttctgattcttcttgctcctcatcctatttcctttgtcttaatttccccacaaagacaccctctccagagcccagcaattgtgagggactgatggagaagtatgtggctgctatggtgctgagtgcagctggagatgccctggggtactacaatgggaagtgggagttcctccaggatggggagaagatacaccggcagttggcccagctgggcggcttggatgccctagacgtgggaaggtggagagttag

SEQ ID NO: 30293 - DNA, 2300 bp, Homo sapien
gtattaacagaagactagtggttctagcatgcgtacgatcacccgaggagcctgctggaactgcagagtcctgggcccagttccaaagattctcattctgtgtgtctggggtggatccagcaatctgtcccaagtcaattggatggttgtgaggcagggggttctggaagggaccactctgaccccgcttggagagctctgtgctagatgttggatgtgaaagaaagtgaaagtgctctctcaatgtcagctgtattcatgccatgcacaagggcaccctggattaactatctctggccacggtgtgggtggctaggaaaacagccctcagttctcctgctgtagggaaaatgattgactgatggctccagctgctgtcttctgaatctacctctgtctttgtgctgaggctgacctcagctaatgactaagcaagatgtggctgctaatgcaggctcatttctacaaaacacatctgctgtcacaaaagactttggcctgaggagtccccattggcctggtcagaatattctagaaactgtgctgcagcctgagactcttcctatgtaatcctctctttcctgcccattctctttcacaggtatcagatgttcaccaccatctaaaggcgcttcctggcttctctagtacctcttattctttacaggtgttagctcgataaatctcttgcatatcttgtcttaccttggcatcttcttctccgaggacctgaactcatacacttggcttggtctctaatatcaagacagctttcagtagtgacctctgctgtgcactacttattgccacaccccttcctggttgcagcagcacttgagcagtgagatcatgtgcacaaggggatgtaagggctagcccctccaaaataattgtatcctgcgttcagccatgatgacatggtcccagagcctcttcaggagttgttgctgtagagtatcgttgctcagagcatggattctggggctggctcatcccgctttaaatcccagctctgcatgacctcaggcaaatgacttaaattctctgtgccctaccagctgtgtaaaacacaaatgtttgtatttaatacaaattacttctatcacagagaagtaatttgtacttatctgtgcttactaactgtgtaattgtcacagttaagtaatttgtatacaattataatacaaataagtaatttgttgtacaaattacttaacttctctgtgataatactcacctcagagagttattgtttggaaaagatgatcctggccctgccagtgggctgtctacctcacagcaatgtgttatgatttagggagtggggggcaagtgccctgccctctgcctctgccccattgacttgcctagaaatagctctttgtggtttctgccactctttggggtggagaggccatatggtgctggaaccatcttggttccaggcccggctctgccacttccaccaacgggatctctacaggtcattttctttttctaatatgcagtttctttgtgaattcaggaagttgaacatctccaaagttggacttgactcctagccccaagattctacaaaatgatagtactctccagaggaaactttttcttcccttcttccctttaaatggacacttaatatatagtattatctcagtcttgtgctaggcactgggtattcaaaaatgaaaagagaaagcctttgctctcaagtcactcagaatcttctagggagacacacatgtccacagataattccaacacaatgaggggtttctggccacccagagatgcaggacttctgccttggttattactaacatcctatcacgggaagtgggagaggtgcaggaaatagtttcctgatcatgtttggctcaaagagggacagtgtgtttcaatgcactctggttaacaaaaaagaaagtgtatttattttcattgagaagaagaaaccgaaaactctggcatttaaataaataaagaagaatttatttttccttttcaggtcatgaggctagttaatgattagtgaaatccacgtgggtgttttctgagaggctgggttatatgatctctttggctttagggaattactccataccagctctgagatttccagctcagcgatgcccccaggtccctgggagagctgcttctgggtggggggcctcattttgtggctcagcgttggaagttcaggtaagccagggctcaggccttgggaggaacttatttcagtcagtgatcatatttctccaactacttatgcagtactaacttttggaagatcccctaaa

SEQ ID NO: 30294 - DNA, 2300 bp, Homo sapien
caaaacctgaactttccctggttatccgactcatttttctaaagcccacataaaaaaaccctttctcaccttgcacaagccaggaccaactgtaagaaaataaaatttggttaattctaagatattcatttttcaccccataaatatccaccattccaagatatatttaattttaaaatttaggttttccaaactaataatgattttgtcactgagattgttagatgtcctttctaatccagcaacctaactcaagtggtttgtcatcctggctgggtgatgggaactagtccctgctaacctcagatgcccctgggaaaacttccctcagatgccaatttgcatttacctttcccccagtaaagaactgacccactgatccctcttgcctaacagaaaattaacctgctctactttgggttctcagaagttctcagaagactccttctcactatggtgaggtcacccttagaaaaatcccctccctctactcacaatagcaggctgcttttctgtcttctccgctggacatttaattctcattccctggctctagaatatgtcattgcttctgcctggggttgctcacatcacctttggattgatttctgttctttgcatctttcaagggggcttctgtattcctatctcccttgtactcattctttttctgctcagcacccctccctgctacaaagttccactgggtgactgcatgctctccttgcactcatgggtggtttttcagaggtgctgttgagctctgtatgtgctttctcctacctcaattagttgtccctaaaaggtgaggatttgaggcttctgtctcttttagcatagttagtgctgtgctctgtatagagcagatgtccagtgaatattgcagacattgatgcttagaggaggcaatgggctgagctgatggggaataggctctgtctgggtcgggctaacccagactggaatcctggctctgtttctttgtagctatgtgaccttgaggaagtggctttctttacctgtagctagagatgatccttaccagataggaatgctgtaaggactgaatgggatcatctgtgcacagggcctgacttttgcagttgcttattcctttgtgattttattattagcaaattgttgtctaggctgatggaagtggagggaacagggctgtcatgagccaccttggagagaaggtgggaggtatcacctaggagagctgtgggtcccgttctgagaagtgggcttggcaggcccactttgtccctgctcaggagccccaggcctccttaggggctggaaggcatttgctagttgtcctgatttgaaggttgaggagtgggaggactatagcaaattggcatcaaactctttttggaagctcatctgtcggtaagcctggggcctctgtcacacagataagagaagctcagaaattctgaaccagatagcagggttagggtcagcgcagaagctgatcaggttccagccacatatgtgggaatcattctagatgctctgggcaggaagtgggcttataataacatgttagcagggcctgggtatttccttgcctggtcttcttgcctttgtttgtctctggtgtctttcttttcacacttacccagtgaggcattctctatttcccatccgcttctcttcctttcccaccttaactgagtgtttcactgtcaacagcaacaatatttattaagttaatgttccttattcttacttttagtagtgctgtctcagaaattaagtgagttgatggataggcagagatagaagtgtgtgtgcgtgtgtgtgtgtgtgtggctgggagggatagaaatatgccaaagggaaaaggaaaaaggatgtaattgacttcagacagcctagatgaagtaggtggacagaaagaagatgccggatgcagagagctcaaggtaaaggaaaggaagagctcaaatgatcgggagggaggaggttcaggaggtatccaggtgcctgctgtcacacaagggcagtagctgacccacatgggcctcttggaagttcagcctccactcactttcctggctgtgtacccacacaatctttcatgacaaccccagtcacacctagtttttccttggactgtggagctttagattgttgagctccttgatcaacctggcccttgagcttccaggctggctcaggcgtcctctcctccaggtggatgcacaagtcttcctccatctggggtaggtggtctttctttgtgttctctcagtacctatgtttcctggtcacagatcttacatccctat

SEQ ID NO: 30295 - DNA, 2300 bp, Homo sapien
ccttctaggctgccaccatccttcaaagttaacttggttgttgtgcttcacatactgaactgcctttgttttttgaggtctctttaccctaacagggtgaaagtttctcttgaggatctttgatgcccaagggcttagctcataaaaggcactcaataaatatttgttgagtgaaaacatctccttctcaccatatttgacaattttgaatttctcataaattttcatcaagttatagcagtatagtaaaagtccttatgaattgagtccttgattagttctgggaggttactgagcaccccgcctgtacttcaggggcgataggagtaatgggagtaagtgctaacccagcagcagggaggaagaatcaaggagtcatttggaatccagagagtcacatttctttttctttctttctttctttctttctttctttctttctttctttctttctttctttctttctttctttctttctttccttccttccttccttccttccttccttctttccttctttcttctccttccttttttttttttttttgacagaatcttgctctgtcacccaggctagaatgcagtggcacaattttggctcaccacagcctctgactcccaggttcaagagattcttgtgcctcagcctccccagtagctgagactacaggtgcccgccaccacgcccagctaatttttatacttttagtagagacagggtttccaccatgttggccaggctggtctcgaactccagcctcactcaggtgatccacccgcctcagcctcccaaagtgctgcgattataggcgtaagccactgtgcccaactaacatttcttagcctaatgtttgcatactccagctttatctcttggcagcccaaagtagattcctaggttcaaccagaagttccttgaaaattgtcagacttcatagaagtgtggagttgggagtcatggatctagtactgtacttccacttactggcaaaccccttgggacagagtattaagtttgacagacttgggttcaaatcctggctctgccacttagaccatctgtgggagcttgttacctctctgagcctcagtttcttccagatctagaaggagaataatatttattttgaaggattgttgtcacaactaacttataagtgtataaaatgcctaatctaggtttggcacttcatgggtgtttaataggtgggaattataatttggaagcaccggagtgggtgggatgatgatctgggcaatgtattattatttgtttactattaccagatccagatatatgcaggggaaagccagcttagaattcaaaaagccactttacatagctacttttgttaaatggatgtcaaataaatacataatgatatttgcagtgtgacttaataaaggccttcagggggttttccagctttcactgttaggattttttctgataatagtcccatactttcctactctgatgtgtcctcactcagaagcactgtctggctctccccaaagggagctcgggacagtttcctgcctgaggtgttcaggtgaattctgtgctcacttttcctttctctctccttgtctgtctctctgaccctgaggtcttatcttgtcctctgggaggtatgttaagtgctctgccaggctgcctgtgcctggcctgttttttctcactgccagtacctcttggattccaattccaaacatggtatccatctggggtcaccctttcttccggtgccaagagagaacacattccaaatggaacacaaatgtgcctcccatgctggctctcctcattctgcttgggaaaaacagagagcaggatgtggccgcatcatcccacgctgctggacttttcagtcctgtagtgctactttcccttgggactatttaggtttttctgctaagaaccaaatttgaagactcccaagaaacatggaaccaaggaagcttgccagagctctgcagggagagccagagccttgctgagacagcgggggtggtggggaggagagagggggggagagggggagagagagagagagagagaaagaggtttttaaattctccatgaagtgtactatgttccatcattccttcccaaagccaccggaagcattccttctaggaaaggtggagtcggtagtgagaagccggaggtgagaagacccctgagcggatggattcattcattttctgaatttcctatgtgaggacagtattagagcccagtgaggctttgagaggccccaaagatgagcgccaacagcagcagagtgggccagctt

SEQ ID NO: 30296 - DNA, 2300 bp, Homo sapien
cttgcctgatttgtaagggaactgaaagcaccctttttggcctctgcaacacttaaaagtacatctcacaagaccctctgcccaccctttcctagtgcttaagtcttcccaaagatgaggtacagcatttcggtaataatgaaaagagatatcaccacagtcacttgaaaagtgaagaacttggcctcctagtgggtaacaaccacattctaatgcacctctttgctaagcccttgctcttcacaataatgacaactcaatacggatatattcacactattctctctagtcccccgtttgtctaaccttgaaatgtttgacttgaaggttgatgaaaacaggatcatatccttaagtaaggcctatcttgggaatactatgtctttcataggtctaatatgacctatgatgtgatggaaaaaccatggtccttattttacaggtgagtataggtgcttggagaggataaggaaatcaccctgatccaatagctggtaacctgcgaggtaagttgaagcccggtgttctttggtgtactagttatccagtataaacatcatgtatttgtagttataaattcacttaatgcatacttagtgaaggtctattatttgcagggaacagccctagtgttgataattcatgtgtgaatcagacacgtttttcaagatgagaggctatttgattcatcacttactgaggacatactatatgccaactatacagagtagtaaagagtagtaagacatagactctaccctcaaagagcttatagtctagtggatatatgtatataaaccgtagaaatataaagttgaatgctcagtggtatggtggatattccaagatgctttcctaaacagtgcatgtgtgattatgcccagcgtttatttctttaggtattaaaaactgctagatattccatctatgtcaattatggtgcttttgatagcaagtaatagaaaatcctcataaggaaaactcacatagctggaagtccagttagagtcagctctagatgtgatgatatcatagggtcactgatttcatccaagactcaagttattttcatctcagctttctcgtccaggactgatgaagcccgtcatgtgcttgcttgttaaagtccagcggaagagagagaaaccattccctgggcatggactcttagtcccctttttaaaggtctgattgagccaaattaggttatatgtatttttatggaccagtaatagttatcaacagaataccttatgctgattggcttacacaagatccgcccccttcatcccacccctgcttagatccatgtgcaggtttgatatctggacaaaacaaattccgtcacaattgaggaagaggtaaatggatattgaatagacaaccagatttccactacaccatcttgttcacctaacaggtcaccctgaacagtcaaattgagtttatggaggaattcctctcatagtttgctcaaactttagaaagaaaattattggtagagcaaaataattctgatgttcagtttttatagaatgtgacaattagcagatgttcagagaactgttccctgaagagttgtccttagtgagatctgaattaggatgctttcaactggaagcagtagaatacccaactacactgacacaagcaatacagaaaagtaatttacctccctgttaggaagtttggaaattaaaagctcctggtttgagatagtggctcagtggtgctttcaagaacttagtcttggctgggtgtggtggctcatgcctgtaatcccagcactttgggagactgaggccagaggattgcttgaatcctggagttcaagactggcctgggcaacatagtgagaacctgtctctacagaaaataaaaacattagctcggcatggtggtacatgcctgtagttcagttacttgggaggctggggtgagaagatcgcttgaacccagaggactgaggctgcagtgagccgtgattgtgccgctgcattccagcctggctgacagagcaaggccctgtcttaaaaaagcaagcaaacaaaaaaacctaggcttgttctatttttctgctctttacccttctcatccttaggcatatcctatctcatgactatggtaacttcaagcattacatcgtcacgcaactattcaagcctggatgaaaggtaggcctgctatctaccagggagtatactttttcccagaagctcccccacgtacttcctcttacatctcattgctcacaggtctacttttgtgccagtcgctatcaaggggaatgagatattgtg

SEQ ID NO: 30297 - DNA, 2300 bp, Homo sapien
tcaggattgccactttcaagttacgcagccttgaacaaatgtacacctctgaacttcaatttttccccaactataaatgtagataataattttgactgccatgaagattaaatgatggttcacaacctcgacagccctacatatatggaagatattgcgactgaaggtgacattgtttcaactgaatacatattctaagtgaacacattagttttttaacttttaaaatttttaaaaatatgtagatttcaaatattttctcccaattctatcatttatttgttaactttgtctatagtattgtatgtaaaaccccaagcctttattttgctgtaatgaatttcttcaatttttttgacatgcaatttgtacttttgaaatgtaacataagttattcccccatccctcagtattaaaatattctcctccacaatttgctattaatttcatatttcaatctttccaatctaggtctttaatgcatctagagctcttccttttaatgtagtgtttaattttctccagatggttagcctattttcttttccccaataatttgttgaaccacattttattgtatattaaggttacaagtgatgttgatattgctcatccaggaagcactgtttgattagcaagattctaaacaatgtgagttagcacctagttgaaagaattgataataatggatgagggtgaatttagaacatgagggtaatatgttgtattattaaaaatatcaatccagaaggaaataaaaatcatccttattgaaagttttcagatgacaaaatggggatggtcttagtaacctgaaaaatacacatatagaaattactcttatacagcaccagttcacagacacgcctgtaaattccctgagttaaatatctataatatagaaacaaactttgattaggtgatgctgaaagtttaagtacctaaaaatacctatcaccctgcagctattgaacagtgcctccaagtcctgctttaaaaaatgattttattggccaggcgcggtggctcatgcctataacctagcacttttggaggctgatgtgggcggatcacctgaggtcagagttcgagaccagcctggccagcatggcgaaaccccgtctctactaaaaaatgcaaaaattactcgggcgtggtggtgcacacctgtaatcccagctactcaggaggctgaggcaggagaattgcttgaacccaggaggtggaggttgcagtcagccaagatcgtgccacttcactccagcctgggcgacagagcaagaccctatctccaaaaaataaaataaaataaaataaaaaagagtttattgcctgtttccaacaatactctgcaggaaaaaaatccaatgattatatccatttcattgcgaataagacgggcaccagtttatctatgtacctgaggaaatgctatggaaatggtatttttcaattttattcatcagtatattaacgaatatatgactgaataattcatactgaattcagatcagttggaggggggctataaatgcaaattagctgaggatttaatgtgcgtaggaggtgtatagggggttataggaccttttaaattcccccaatagttgtggactcggtggttctatgtcttgctattcatttttaaataggtcaatgaaagagaggaaaggcctgcagtgtgtggggatcaggaagaaggcggataaaagaaaagggggaaactagtctgttattcaagggaactggctttcacttatggtttctcctgtttggcttgaacaaatcatttcaccatcttgggcttccgtttcgatattgggtggggaggagcgggtgttacgagatctctcagttgtcttgctgctttctttcttcgtgagccctccccaagttgatttaacaaatactctatgacctagagtcctagagtgtaaataccacagtccaggtgagcgttcagcgggcctccttgcgcatgcgctgaagggggcaccctctcgttaaggcccgaattttgcctcttctgcgcacgcgctccttttaaattccccacctgtcagagagaagcaggacttcctgtactttttagagcgactgccggaagtgactgcggacgaatcggcgtttgccgaggctggcatagatttggctgtctccgctcatagctgcttttggcgcgaaagatgccgggtctggttgactcaaaccctgccccgcctgagtctcaggagaagaagccgctgaagccctgctgcgcttgcccggagaccaagaaggcgcgcgatgcgtggtcagtg

SEQ ID NO: 30298 - DNA, 2300 bp, Homo sapien
ccaacctaagagaggagaccacccctcatattgtgttatgcccaatttctgcctccaaagaaagaagaatttaaaacaaaaaggcagaaatgaaatccacaggcagacagcccagcactgtgctctgggcctggtagttacagattgacccctgacctaaccgatatgttatctatagattccagacattgtatggaaaagcattgtgaaaatccctgtcctattctgttctgttccgattaccagtgcatgcagctcccagtcacatacccactacttgctcaatcgatcacgacccactcacgcagaccctcttagagttgtatgcccttaaaagggacaggaattgctcactccgggagctcggttttcgaagatgtgagtccgccaatgctcccagctgaataaagccctttccttccataactcggtgtctgagcggttcttgtctgtggctcgtccggctacaaacccacaagtggatagaaaataacctaatcctatgggacagaaaaaggaaaaggggaggagtcataaggggatataaacataagatacccaaaccagaaatggcaacccttccaggttcccttccaccacgtggaagctttactttcgctttccctttacttttgctttggctttaataaatcttgccaccgcacagtctttgggtccacgcatttctctagtgaagctgtaacacttgccactgtggtccacggcttcattccttgaagcctgtgagaccatgaacccttcgatcgagaaaaacctttgatcggaagaagacttctcgtctcaacattaaaggacaaagaagccaactctaaggcatgccattagctttaataatctgagtgtaataaataataatgatcataacggattaaaacatcagatctgtaaaaaatgcatgcattcataatgatatcaaacaaacaaaaactttgtggttaactctggagtttggtagggcaccaactcatgtctctgaaatttcataattaaaaagaacaaatccagcatttacccagtctttcctctatgagattatcctggttatctcaggataaccaatgagttggtatgaaaagattccttttatagaagaacctctggtaataatagagaattattgaaaggattagaaattcactgctctaggataaaagacttaagagacataccaaaatgcaacatgaggactttttttggatcttgactggaacaaaccaactataaaagataatttggactcaaacaggaaaattggaattatttatagtactaaggaattattgttaattttgttagatatgataacggtagttaaatttttaaaatctatgtcagtttgagatgcagactaatttaagggtaaaataatattatgtctaggatttctttaaaaaagaggggaaggaaactgaaacttgattggcaaaatgttgctaaatgttgattctgagggatgggttacttgagggtttgttattaaaagtagaatcacttttgcttatgtttaaaattttccattataaatagttttcaaaagcagagccagtgcctaccccacatcatcttctgttatttaatgcccaggactcagaaagggtcagcagtctcagatcaacagttactgatgtcctaacccatcctaaacactgatgctaatgagtgtggggcaaagttcacagcgtgctaaggagcaacatttaggaacctgactggattccgcagctctcgggacaagccccctggaaaagggctggggggaggggcggggaggcacccaattattctagaaggttctgagatctcccagggatttccgagaggctacgaggtgtaactggcaaatcaatgacttaagagtagctttctcccagcctccccgctggctctggagtatagagggaagccagccttttcctcccccatcctgcccctcccctctcttctcatcttcccctccactctcctcctgaccctggcctggccactcctgctttcacttctctccactcctcttcggccccgccccgcggcctcctccctcctccttgccccgccccctatccctgcgcgccggcggccgttaccatagcgacgtgcacgcagtagccaggcctgacccgctggtcccttgctggcgggaggaaagaggcggcaccatgagccacgcagtaaccatcgaggagccccaggcccagccgcaggtgtctcaaactcggtaccgggagaggtcgcgggctgggagccacatctcctccaatcgagcgtatgattttctgtac

SEQ ID NO: 30299 - DNA, 2300 bp, Homo sapien
taaagatatacataaacacacaggtacatatacagctatggatggaccatagtaaactttccacctctctactattacgtgactgagctaattgatccatatagatccaacttgcttcctgaataagagggtgggctctatgagagcatgaatattgtatattccctttgtgccttgcacaacacagtgtagatccctgtaactaataggcattcagcagatatattttggttggttagttgtttggttgatactgtattaaactggccattgagactctcccatagagaaggcatagggattgaaggttgatgttttacacataggtgtacagtatcatatactcagaattgtgccaaagtgccaatccacaaacaggtactgaattgttactgagtcccaggcattatctcagatacaaagctatatttagacatgaaacagaaaaatgccctacctctaaaaagctgataatctgttgaggagacagcatacatatacaggcaaaactaagtatgccacagttgatgcttaatctttctatatacatacacctgtaaagcgggcaaaactaaactactttgtttatggttacatacctaggtagcaaaattatagagaaaagaaagtgtttactatgaaagtgggaaggtgctgtggtaaaggaagaaaccatggtggccttctgagatactggcagttactataatacatggcttctgactttaccctaattcattacactgtacatttatgtgctctgtactttttattttgttttatttttctaatctctgagtttgcttgcaatgcacttttaaaatctgtatcctatttcatgatttcaagtaaactttaaaaagaagcagtcaagggctggtatgatagttcaataaattcattagagacccaggatccttctagctttctgctcttctgctcctaggtcgtaggccttctggcaatttaagatgattgctggtattccagcattatgtcctcatgaaaggagaaatgaagagagaaaaaaggaagccaggtctttccctttaagaatcctttctttggtcagaacgtggtcatatgggcaatccagctcctgtgggtgctgggaaatgtagtctttattctaggcacctgtttccctagctaaaatccaggggttctattatgtaagaggaaggagagaaaggacactgcagaatacctcctagtctgtgctacagttagatagtttgaccaagtcacgttgctggtaagaacaaagccaggatttgaaccagcgttattgactctgaagcccataatccttcagcagtgctgtcttgcctgcctgcccaataagatccataattctgaaatgggctaaatgggtgtgggctgcccagagtgagtaggtaggtggatgagaaacagactgatgagatgctaaagaaaatgaatgattagtgaagggactgttgacttattaaatgaaatatatgagctagaaaaagttaaccaatgtttgtgtatttttcttgtgttgtttacaacagcatacctgttttagtgagggtattattgttttttgcaggtggttaaagttcaccatagtactataagctcctacctagaagacataatactgaataccgaagcgaatactgcagaagaacaagccagggcagaaatagagaagatggctgagaaaatcaatgacattgcttatgaaatggaaagccggtgtgtatcaagagaacagattgtagaatggacagcccatttgctggtactcatatatattttttcaagagcttacaatttcaccaccaagtagaaacaaataactcatacttcagcgtccattgttttattaacattaactcttgagaagccaatatgtgtatgcctccgtatgtattctcagttatcctctgcaatctggattactctcattacttactttaagaatactcggaagcatgaaaacaatgtgaatacgtgtgtgcaacattactgggacttcatcccaaggttgctggcttctatgtataagctgtgtttccaacattcccttcctggcaggcagggtaactgaaggacagggtcaaatccaaatttttttgtggagttaaacaaacttgccaggaatgtgatatttcagatcacttaatcaaggaaaaggtgatggtggggtttgaatggagttgcttacacagcaggaaagcataaatcagcagctcaagtgaaaaaaccaaagaaataattcaatttgttttatattttttagccgaacctatcttcagtcagaggagatt

SEQ ID NO: 30300 - DNA, 2300 bp, Homo sapien
tgtcaccggtggcatgtttttaaagattgatgcttttagtcaatagagaaagagaaaatactatcttaaacagaaaaataagattcttccatagctctgaggctgctgatggcaggcttgatcctagacagaggggtgcaaccaggagaagaccagtatttaagtgaaatagcagctcagaagtattgaaaattataccggggaattccagatgggcttaagcagaaaaatgcttaacatttcaatttgctcaatcagggataaagaaatggtggagttctaacacatttggagaggacaaagaaatacctgatttttccattgcatggttgtagtgtaatttttaaaccagtaccccctaaggataagcatttagtttgtttccagtttgttttcctgttactaacagtgcttcaatcaatatattttacacatatcctgaccatgcttctgagagtacattcttaacagtgcaattgctgggatataaggtatatgtattttacattttgatagatagtaccaaatttccttacaaaaagattgttctaccaatttgatattaccaaattgccccacaaaatgattgttgacttgcatcaatagtgtatgatagtgcttatacaaaaaattaattttcagatcaagtaatatatttctgtgtcacattatgttataaaaggaccttatgttttctaggaccttaagaaaatatgcaactctgttccacttctcctgagttcaaagtgaggccagcctgcttcaaagccattacacccttggttgaattccaccctaggattgaaagagaggaggaaaactgggtttaatatttactagtttgtggccaggtgcagtggctgaagtctgtaatcccagcactttgggagtctggggcgggaagatcacttgaatccaggagttgagaccagcctgggtaacacagggagacccagttactacaaaaaatattttaaaattagctaggtgtggtggtatgcacctgtagtcccaactactcaggagactgaagtgggaggatcacttgagtgcaggaggtggaggctgcagtgagccgagattgtgccactgcattccagcctgaacacagaatgagaccctgtctaaaaaaaaaaagaaaatttactagtttgtgatcccctctcccatgttgggagtctgagttgaggatttggaggaagacttgagctaacggaatccagtggaacttatctatgggcaagttgaatgagtccttagcctcttccctttatatttttgccaaatcaaaaaagccatatgaacagggagcacactaggacctttttctctctgttcaaatgagaaccatatgtattatatatacactctttacccaaaattaagatgataatatatacagacgattttgaggtatatcactttttgaaaagccaatggatcagaaagaccttaaagatacctgtatatagatataaagtaatagtaactgccaaattttaaatgcatgctaagttccaagaagttcactgaacatttttaaatgtacactatctcaatttctttcaagagttgtaggtatattctcatttttcacttaatggaaattagctcttagagacatatgacttgcaaatttgaaccatggtctatgtgactccaaagcccccactttttcaaccatattactgtgaagtgctaaaaactgctgagtgaattaccctatctaaactacctgatacccaaacagcaaagaatccacagtacttcttgcggtcctttactagctatttgactttatgtaaattacctaatatctctgtgtccatgtttcttcttctgagaatgcggatattaaaatactatcttctaggaggattaaatgaataattacatgtgaactgcttaaaacagtacctggcacaaagtaaggacaaatgctaactgttaacatcatcatcatcactactcctttccaagggcttaggtgcttaccctgatagtgaatattcttagaatttggagctaggactatgttctaaagccatgagctcataaactcatcatcaatcagtaagtcccttccacattaagaactaaggctcaaagagaagtataagactaggtctttatatttgtaagttacttacactctagatatcaaacgaaatgtaactcacatgaagtgcttcaatgctgaataggttggtacaaactcaagtgcggtaagtggtaaatctgggctgatgtagtcagaggagacttcctggaggatcttggacatgagctttccaggtttt

SEQ ID NO: 30301 - DNA, 2300 bp, Homo sapien
gtggagcaaagaaacttgacagcaacagctgttgagagaaggtaactgtcatattaatatttctgggaagaggtattgcggtgttaccagattccagatttgcaccttttcccctcaatccctttatccctctcaaacattatagtgatttatgaaaatatatgtataattccaaataagttttagataattccatatataccaaatacccaattatctctttgctgtcaaagggtaatttatcctcatcatgacacttgccatcattacaagtttaaagcctaaaaatgaaaagaggtttcacacatttaagagctaactcatttaataataaatcaaaagtaagtatgagtttcatttagtagtagcatgagctagctgcagggaaggtcctctcaaggtggtcctttttcttctcttcaataaaggcagaactctattaaagcatattagtaaaaaccatatttaaaagaattactacactgaactgagcagccaccaaatgcaattggtaccaggtgatataagggcttctcctctcagggggcttataagcaactaaggcaggaagtcacagataccatattctgcagtgtaatttacaaatgaggtgaaaacaaagtgttccaaaattctaagagagacattggaattctgaccacaagtgtaatttatggagcctcagagtaattataggatctggaacagctggtgctcaaatttagtggtcctccagttgctggaatctgcgatttctgggaagttaaactttgtgtcactgcttctacttgtgataaaatgaaaccgctttcaaagagaagattcctattcctagcctttttgggtaacttctactacctccacttaaggatgaaaagggagaagtttcctccaagactgcctcatggggatcagagtgtcacctccatgctcctgccctaagtgcccctgagcacaccccagagggaggctaagagatttttgagaaagaccatgtgactggctgataaacacctattttcctcagattccacctgaatttatatcatcagtgcatcactcttttattttgttctctctgttcctctttttaaatattaatattctctggagaggggtaaaacattaaatgaattcacactgaggaaactggccaggtacaatggcttatgcctgtaatttcagcaatttgggaggccaaggcagacagattgcttgagccccagagtttgagaccagcttgggcaacataatgagacctcgtctctacaaaagaaaaacaaaaaaaaaaattagccaagcatggtggcacacacctgtagtctcaggtatttgggatgctgaggtgggaggattgctttagcccaggaggttgaggctgcagtgagccatgaccatgccactgcactccagcctgggtgacacagcaaaacactgtctcaaaaaaaaaaaagaaactcttcaggctgatcagatctgcttttctctgatgagtttcttaggagctctacatttctggttgctgcaataggcaaagtatagaatggaggtcaaggcctcaaatttctctgacttcccagctgggcttgagagtgactctggccctcaactgagggcattagtaagctgtccttaagaacgagagtgtattttctggctgtattcttaactcatttcactatagagccatgtctgatattaacagtgcagtgctagactagagaggcctggcactcctacagccttctcctgtcttctagctgggacttcacaccacagacccaaaggaaaagagacccaaagatccctgcagaaacctgagaatatttcctttacctcagtggtttcataatctgttcttagtttcctgtttctgctgtaaataattcactatatttttaagagagagaaggtcaggcccttgtgagccagaagggatttgagagatgatgaaagctacgtatgttacccataacctaaggacttctggcaaggtggcctacctgagctggagtcatgccttttttccctggacttggagatacctgtcagtgcagaaaggcctacttttgatcttggaaataagtttcctggggtgagttcttaaccctttccagctttcccaccctctttggctttagccatggccttctgatctgtgtttctcaggggacctgcaggccccagatatagccccatgctgtcctcctaccccagagcacactgttcaggctacttccactggtactgaaatccagtatttcacttactctttttctttccaatatcctcatgacatt

SEQ ID NO: 30302 - DNA, 2300 bp, Homo sapien
gcctcaaatttctctgacttcccagctgggcttgagagtgactctggccctcaactgagggcattagtaagctgtccttaagaacgagagtgtattttctggctgtattcttaactcatttcactatagagccatgtctgatattaacagtgcagtgctagactagagaggcctggcactcctacagccttctcctgtcttctagctgggacttcacaccacagacccaaaggaaaagagacccaaagatccctgcagaaacctgagaatatttcctttacctcagtggtttcataatctgttcttagtttcctgtttctgctgtaaataattcactatatttttaagagagagaaggtcaggcccttgtgagccagaagggatttgagagatgatgaaagctacgtatgttacccataacctaaggacttctggcaaggtggcctacctgagctggagtcatgccttttttccctggacttggagatacctgtcagtgcagaaaggcctacttttgatcttggaaataagtttcctggggtgagttcttaaccctttccagctttcccaccctctttggctttagccatggccttctgatctgtgtttctcaggggacctgcaggccccagatatagccccatgctgtcctcctaccccagagcacactgttcaggctacttccactggtactgaaatccagtatttcacttactctttttctttccaatatcctcatgacattcaatatttcacttactctaggtcctccctgcctaaggcccaagtcaactttctgtccagtgggatttgtaatccaatacctcctagccctagcagaatcccatgtggataatcagaaatgtgactggaaaaaggacagagctctatggctgtgggtcccagtccccactgctggcagtaagtccccagcagtgagctgtgtaagcaccttacattctgcgcttggttgaaaacagcaaggcaagcatccacttgagaaatgtcaacccctaggaaatcccagcctcaagtctttctcatcccttgggaagtgcaaattggatagagaagaaaccaattaaaaacaaaacaaacaaatcatacttagatattctggcttttctcaccagggctggattaaagcatgtacttcaaaataataacaacttaagtcaataaataaatgtaaggaagtccaaatgttcacctgaagacaactgtggtcattttttggcaatcccaggttctcttttctacctgtttgctcaatcgtggtctccctctccctctcttgttggggcccatgcccctgctttactgttgccagaggcttgtacttgtttgccttttaggtaggagcagttacttccactcccctcacctgccataaagcatctttataaacaaagcaagtagaagaaacacatcctggtatccaccacattcggcttttgttgattctgttcacttgggagcacctgctgctagggaataagaaggttgaggctgaagagtgaggactcttcagctcccctctggcaggacccgggagaggaaagagccctcagctggtccatcctccccactcctggtcagccttctgttctgagatcaaagtggtggggtcacattctcgagaactgtgctcagccccctcatctcacaccctttccctctccctgtgtgcctgcccccctcttacataaccatgctggtgattggcaccgtcataaatcaatactttgctcactttcacatcaagtaacactatccagggaggtggtttcaacaaaggaggaagtataaggagatctaggttcaaattaatgttgcccctagtggtaaaggacagagaccctcagactgatgaaatgcactcagaattacttagacaaagcggatatttgccactctcttccccttttcctgtgtttttgtagtgaagagacctgaaagaaaaaagtagggagaacataatgagaacaaatacggtaatctcttcatttgctagttcaagtgctggacttgggacttaggaggggcaatggagccgcttagtgcctacatctgacttggactgaaatataggtgagagacaagattgtctcatatccggggaaatcataacctatgactaggacgggaagaggaagcactgcctttacttcagtgggaatctcggcctcagcctgcaagccaagtgttcacagtgagaaaagcaagagaataagctaatactcctgtcctgaacaaggcagcggctccttggtaaagctactccttgatcgatcctttgc

SEQ ID NO: 30303 - DNA, 2300 bp, Homo sapien
ttcaggctacttccactggtactgaaatccagtatttcacttactctttttctttccaatatcctcatgacattcaatatttcacttactctaggtcctccctgcctaaggcccaagtcaactttctgtccagtgggatttgtaatccaatacctcctagccctagcagaatcccatgtggataatcagaaatgtgactggaaaaaggacagagctctatggctgtgggtcccagtccccactgctggcagtaagtccccagcagtgagctgtgtaagcaccttacattctgcgcttggttgaaaacagcaaggcaagcatccacttgagaaatgtcaacccctaggaaatcccagcctcaagtctttctcatcccttgggaagtgcaaattggatagagaagaaaccaattaaaaacaaaacaaacaaatcatacttagatattctggcttttctcaccagggctggattaaagcatgtacttcaaaataataacaacttaagtcaataaataaatgtaaggaagtccaaatgttcacctgaagacaactgtggtcattttttggcaatcccaggttctcttttctacctgtttgctcaatcgtggtctccctctccctctcttgttggggcccatgcccctgctttactgttgccagaggcttgtacttgtttgccttttaggtaggagcagttacttccactcccctcacctgccataaagcatctttataaacaaagcaagtagaagaaacacatcctggtatccaccacattcggcttttgttgattctgttcacttgggagcacctgctgctagggaataagaaggttgaggctgaagagtgaggactcttcagctcccctctggcaggacccgggagaggaaagagccctcagctggtccatcctccccactcctggtcagccttctgttctgagatcaaagtggtggggtcacattctcgagaactgtgctcagccccctcatctcacaccctttccctctccctgtgtgcctgcccccctcttacataaccatgctggtgattggcaccgtcataaatcaatactttgctcactttcacatcaagtaacactatccagggaggtggtttcaacaaaggaggaagtataaggagatctaggttcaaattaatgttgcccctagtggtaaaggacagagaccctcagactgatgaaatgcactcagaattacttagacaaagcggatatttgccactctcttccccttttcctgtgtttttgtagtgaagagacctgaaagaaaaaagtagggagaacataatgagaacaaatacggtaatctcttcatttgctagttcaagtgctggacttgggacttaggaggggcaatggagccgcttagtgcctacatctgacttggactgaaatataggtgagagacaagattgtctcatatccggggaaatcataacctatgactaggacgggaagaggaagcactgcctttacttcagtgggaatctcggcctcagcctgcaagccaagtgttcacagtgagaaaagcaagagaataagctaatactcctgtcctgaacaaggcagcggctccttggtaaagctactccttgatcgatcctttgcaccggattgttcaaagtggaccccaggggagaagtcggagcaaagaacttaccaccaagcaggtatggtttttctttctttctcttttgctgggggctgaccgcccttcagctccagccaaaagatgtgtgtgaacacaaatataccttctgtttgaggtcagcatcatagtgggtcgtgaatcatgttggccttgctgctgtctcctcatttctagggtggaaaaaaaaaagcatgaaaacaatcacttaatgttgagccccattactgatgctctctggtcctgcactagcctcctagaaaaatcaccacaggagaagccttaactactgcatgagttaccacaagtcacacatacaaccagctccctgttacagggctggagtccctggacccaggaaataccacctccaaggactgtgggagctggggactatgggaactgggatcaactcagtcctgattccttttggcctgctgggttagtgctggcagccccctgaggccaaggacagcagcatgacagtcaccaggactcaccacttcaaggaggggtccctcagagcacctgccatacccctgcacagtgctgcggctgagttggcttcaaaccagtgagttttctacctctactattgaaagggcaccttgtcccacagaaccgagtcttg

SEQ ID NO: 30304 - DNA, 2300 bp, Homo sapien
tgtgaagaacatgcccctgggctggtcactggtccgaggcccgaggcctccaagctcaaacctgccaggtcactgcgggcttggctcagcttcccaggcctgccctcggggacctctgcagccctacctggctgttccatgctcctgggccagccttccctcagtttccactctggaccagaatcagaggccagagccaagggagagattgtttctttccatccagctgtggagatggggaaagtaaaggtaggactgcactgaccgtgtcttttgtgggacaggcaggacttccgggctgggaggaggagatcttgtaccagagtctccaaaaggcatctgccccattgcctctctgcgcaccgcagagaggggtgtgcgggcccgtgggtcccgcctgcacgctctgctgttccaggcgctcgacctctttgccccctaggtcaacgaggggaatccactctgccatggggaagtcgctgccccgtagggtataagaacttccccatagttcaccccttcctccctggccgcccagtctggaaggggagctggagaaggcggcggggggtggggggaaggcgggggggaaggcgggggggtggggcgggcttctctggtttcttaccctcctggggtcaggtttcctcagctccctcccttaaggaggggaaatcgaggaagaggcccatctccatggaaactttctggtaacaaggctgtgaaagagaaggggacaggtgtttcaggaagaagggaaggcgctgaggatgggcctggagaggaagtgtccctgaaagtggttttggggctgcccgcgccagcgaaaagcacgtgtcccatttcctgccggaatggccagaaaaggtctcctccccggctctgccccctctagctgagtcctggacctctagggactcccacctacacccttcccataaagcctgacccagctgggacgcaaaggctagtgtccccctccccgagtcggtaggggctggggagggaggtggtatggcccggagccccaggccgagggcccgggcacccgtgcatccccccttctgctccccattctctcacaggagggccatgaaacgcaacgcccggctgaggtgccccttccggaagggcgcctgcgagatcacccggaagacccggcgacagtgccaggcctgccgcctgcgcaagtgcctggagagcggcatgaagaaggagagtgagcagtgggcgcgcgggcgggccggcgccggggtgcacggctctgagtaaggacgtgccgtgggtgtgggcatgcttgtgtggagatgcgcgccgagtgtgcgcgtgaacacacgtgcacatgtgagctggtgtccgtgtgcaacaggcagccacctgggggagcgcttgcagtcggccctctgggagatggagggagtcggtaatctctgccctgggatgtgtgctgggcagccctggacagggcgtgccctctgtctcccctcagttgctcctgcatcattctttttgtccccttcataattgttgtaatggtttgaaaccacatttgcgggtaggagtgtgaatctgggggagggaagcaggagccacatgggtgataggacccggggccttctaggtgctagccccatcagctgccccagacctggatctttataggggaactgtttgcagacaggtgacatgaggtgttctcattctacctatttaactttgatatatttgtgctcctaggtcactatgagattaaggctcatgcggaaaaggctaggtgtttctagtgcatatttgtctccatggaacacaaagggacccaaagctgcttctttcaaggacaagttctctaggctgctggcaggcattcttgatctctccccaccaaggacctcatagctttgttctacacacatgagtgggctccagaaatccacagaagaccctaaggctctgggctatataagaagtctctggagttgctatttcttgctaagctgtagcccagctctctagggtcttggagacccagacacctctgaagagtcttggtatataattcaccagaaaatgataattgtagatgccatttactgaacatctcttatgtaccaggaactatattaggcaccctacatgcaaggtctcatttaacagcggtgcgaggtaaacacggtttctccggatcacaaaggagaaacctggaggcaggagaggttaaggaggttgcttggggtcacaggtagtaagtggcaaagctttcatgcaaacccagcgcctttggattctgaagcccgtgctct

SEQ ID NO: 30305 - DNA, 2300 bp, Homo sapien
aggaagttcatccacagattaagaacaaatattatgtgtagtcatacaaacaagaaaaaaatgttgggagggtgggacatttaacgtctctattaagtatatcaaactatgataacccctgagacctaaaatattctctcattccaaattccaaaaattctgcaaatgtgcataatggtttagtaatcaaatcttgtccttctctttattctaaaggatgggcaagtaaacactgtcatcactactttaacgtggaaacactcgagcacttgatgaaactgactaccaacagcaagaaaagtacaagaaagcagtttgaaatcgaatcatccaaataaatatcatattatctcaattcaaggttaatgagaccgggggagggggtatgggaggagtaaaaagggagctgcttcatccttgactgaagataggttttgcccttttccattgcctgtttatcaggaggtctaataatttcagatcctggtatttcgaggtttcttattttaagggcgaggtggaaaaggggtgtaaaataaaaccaatactcactgctaactttcatgctgccaaaagctgaaggctgctgcaccggcttgcagctctccgcaaaggaggtggttctgggccgccctgacatgatcactctcttcgcgaatcaccttttccttccttcctccttttcttccttttgtctttatgttggggtgttaggttaacgataaatgcagcattaagttctcccacagaagaaaaagaaaaagacttcgtcctcttggcttttcactccttttgtatactataaaaaacaaaacaagcgatatatttctccttcaagacagatcggcacggatatttaacatatagatgatttaggacttgggaaaaaatacaattctttcccctccctttcctgggaggagagaaaagagagggcaaatcctaaaaaaatatgtatcacgtgaaacgggggcaaatacttgattgaaaatgagtacttcgaatattatattttcctcggggattttttttccgagtcaatgaagaagggaagcggcggaaggatcacgagtctcacgcttgaagagaaagggggatgggtaggagggagggagagggagggagggggtggctcggagatgcgacgggaaacgctgcagctccggcaagccgcgggatccggcgggctgacggcaggggcccggcgaactagagggcggcggagtcgcgagtcagtcagaggcgggcggtggcggtggcggcggctcctctcctcattgcgccaggagcagctgcaggcggcggctggatccagcggccatggcggtggcggaggcagctcccttcagaccccaggcagcggctcctcgactgttccccattcgccggggacatgggaacccggcaaccgcttccgtccctcggggccccctcccccgtccgcggcaacagctcggccgccctcccgcccctcggctctgctcggtgcccgctcaggaagtgtccgcgctttgccccagcccagagccctgtcagcggctgcggggccggctcctcctcgcttccttccttcctttgtcacttggcccgggcggcggcggcggcggcggcggcacaagcccgcattcgcccgggtcaggagctgctctgtgtgaggagcgctgtctgcgcagccgccttgcacttccccactcctcctcccccctcctactcgtcctccacctccttcctcccccacccagccttacaccgcccagcgccccgccgcccgcgtaacaggcgtctgggaatcgccggccgagccccacgctcgcccgcttcggctgggagccgaagcccgaacggagccaatcacggacgtcgtttgtttgcggctcctcccggaaaaagccgatcagcctgagaaaccaattagaaagtgacgctgggaagccacgcccaaagagcggaaaatgccgaaggtagccgaacggaaagggtgaattcgccttgttcggtggctggctggaggagacattcgacaatggcaacagtggccaatcagagtcgccggcccttacgaagaggcttgaagagttgaggacggtgaaacccagagacgctggtgaaactgcacggctgggcgccgccgccgctttgtgattggctggaaaactccgctgggagcgtacctccttcggtgattggtgaagagaagggggcttccgaggacagtctggccagtcaggacttcccctccctctccaaggtggggagaagaaagcgaagggagggcgtctataaagcgctgtctcattggc

SEQ ID NO: 30306 - DNA, 2300 bp, Homo sapien
cccgttttgcgctgggcagttgcgcccaaggagcgcgcgcatccagcatgagctcatttctcatgggcgtttccagaggcccggccgggccgcgcacaccaagcgcagcaagcctctgtatcaatggcccccgcggctgggcggggcgcggccgcccaaaggcgctgcctttctggaagctttgttcccattttagcgtctgagagcttgcagccggctgggaaggcccccttggtccgtctggccctttcggggaagaggccaacactcggcacacgcgatccacggcagaggggagccttgggcgcgcagaattggctgcgccccgccgagagcctcctgtgggtggggagagcccctccacccctctgctcgcttgagcgctcagagcccagggccgccgaccgcagcactttccgatttgctgcaccgagggcccgcggtccctgtgtgcggtttccaccgttgttggaggcggccgcaggcgaaccgtcgggtcgtcagccacgacccgagtcaggcatctccccgctcctgggaccggggccgaaggccaatcacactgcagctaggtcttgcgattggacggcagtgagagccgattggccgccgccgcgagtttcgggctccctccctctcccttttgccccaactccagcgcctaagcttcaggccaatgagacagcgctttatagacgccctcccttcgctttcttctccccaccttggagagggaggggaagtcctgactggccagactgtcctcggaagcccccttctcttcaccaatcaccgaaggaggtacgctcccagcggagttttccagccaatcacaaagcggcggcggcgcccagccgtgcagtttcaccagcgtctctgggtttcaccgtcctcaactcttcaagcctcttcgtaagggccggcgactctgattggccactgttgccattgtcgaatgtctcctccagccagccaccgaacaaggcgaattcaccctttccgttcggctaccttcggcattttccgctctttgggcgtggcttcccagcgtcactttctaattggtttctcaggctgatcggctttttccgggaggagccgcaaacaaacgacgtccgtgattggctccgttcgggcttcggctcccagccgaagcgggcgagcgtggggctcggccggcgattcccagacgcctgttacgcgggcggcggggcgctgggcggtgtaaggctgggtgggggaggaaggaggtggaggacgagtaggaggggggaggaggagtggggaagtgcaaggcggctgcgcagacagcgctcctcacacagagcagctcctgacccgggcgaatgcgggcttgtgccgccgccgccgccgccgccgcccgggccaagtgacaaaggaaggaaggaagcgaggaggagccggccccgcagccgctgacagggctctgggctggggcaaagcgcggacacttcctgagcgggcaccgagcagagccgaggggcgggagggcggccgagctgttgccgcggacgggggagggggccccgagggacggaagcggttgccgggttcccatgtccccggcgaatggggaacagtcgaggagccgctgcctggggtctgaagggagctgcctccgccaccgccatggccgctggatccagccgccgcctgcagctgctcctggcgcaatgaggagaggagccgccgccaccgccaccgcccgcctctgactgactcgcgactccgccgccctctagttcgccgggcccctgccgtcagcccgccggatcccgcggcttgccggagctgcagcgtttcccgtcgcatctccgagccaccccctccctccctctccctccctcctacccatccccctttctcttcaagcgtgagactcgtgatccttccgccgcttcccttcttcattgactcggaaaaaaaatccccgaggaaaatataatattcgaagtactcattttcaatcaagtatttgcccccgtttcacgtgatacatatttttttaggatttgccctctcttttctctcctcccaggaaagggaggggaaagaattgtattttttcccaagtcctaaatcatctatatgttaaatatccgtgccgatctgtcttgaaggagaaatatatcgcttgttttgttttttatagtatacaaaaggagtgaaaagccaagaggacgaagtctttttctttttcttctgtgggagaacttaatgctgcatttatcgttaacctaacaccccaacataaagacaaaaggaagaaaaggaggaag

SEQ ID NO: 30307 - DNA, 2300 bp, Homo sapien
ttaggttggcctgcagggtttgaaaatttggttaccaacatttaaaaatgcagagatttcacacaaaaatccaattttggggtttcttttgggaggaaaaaaattgaacatctgagaacactggacccacattcctgagggcaacaatctgctagagttgagcagctgttccttttagttatggcatggatattccaatttgccattttccctatcattccccattgtcttacacaaggccagtctcactcatttgctttacttgtctggcctctgtagccatttgaatctgcaaacactatctagacctttcctgtcttccatcaaagcttactttgttctgtcccaagtccttcatcagtgtttcaaagcaagagccaggtaatctgatcaaatataggtcctttaacatgtgctttctggagacagcatcttaacagaaagagatgactctgcaggtagaaattacaggcaccactggattacaatcaggatggcaactgtctgttctactttctctgttatcttgacgtagccatacctcactgttctaaagcagaccaaaggaactggttctatggtagaacaatggacgctggtcttatgtatgaaatcttctcaagctgcacttttatagatcaccctagttccaaaagatccaaagctaccacgggctcctctgacccccccatttcctcggaggcttcaggatatccggcctgacggcatttcccctcacctgctttcggggcccgttttgcgctgggcagttgcgcccaaggagcgcgcgcatccagcatgagctcatttctcatgggcgtttccagaggcccggccgggccgcgcacaccaagcgcagcaagcctctgtatcaatggcccccgcggctgggcggggcgcggccgcccaaaggcgctgcctttctggaagctttgttcccattttagcgtctgagagcttgcagccggctgggaaggcccccttggtccgtctggccctttcggggaagaggccaacactcggcacacgcgatccacggcagaggggagccttgggcgcgcagaattggctgcgccccgccgagagcctcctgtgggtggggagagcccctccacccctctgctcgcttgagcgctcagagcccagggccgccgaccgcagcactttccgatttgctgcaccgagggcccgcggtccctgtgtgcggtttccaccgttgttggaggcggccgcaggcgaaccgtcgggtcgtcagccacgacccgagtcaggcatctccccgctcctgggaccggggccgaaggccaatcacactgcagctaggtcttgcgattggacggcagtgagagccgattggccgccgccgcgagtttcgggctccctccctctcccttttgccccaactccagcgcctaagcttcaggccaatgagacagcgctttatagacgccctcccttcgctttcttctccccaccttggagagggaggggaagtcctgactggccagactgtcctcggaagcccccttctcttcaccaatcaccgaaggaggtacgctcccagcggagttttccagccaatcacaaagcggcggcggcgcccagccgtgcagtttcaccagcgtctctgggtttcaccgtcctcaactcttcaagcctcttcgtaagggccggcgactctgattggccactgttgccattgtcgaatgtctcctccagccagccaccgaacaaggcgaattcaccctttccgttcggctaccttcggcattttccgctctttgggcgtggcttcccagcgtcactttctaattggtttctcaggctgatcggctttttccgggaggagccgcaaacaaacgacgtccgtgattggctccgttcgggcttcggctcccagccgaagcgggcgagcgtggggctcggccggcgattcccagacgcctgttacgcgggcggcggggcgctgggcggtgtaaggctgggtgggggaggaaggaggtggaggacgagtaggaggggggaggaggagtggggaagtgcaaggcggctgcgcagacagcgctcctcacacagagcagctcctgacccgggcgaatgcgggcttgtgccgccgccgccgccgccgccgcccgggccaagtgacaaaggaaggaaggaagcgaggaggagccggccccgcagccgctgacagggctctgggctggggcaaagcgcggacacttcctgagcgggcaccgagcagagccgaggggcgggagggcggccgagctgttgccgcggacgggggagggggcccc

SEQ ID NO: 30308 - DNA, 2300 bp, Homo sapien
gtggagtgtatactgggatgacattgaccttggaatgtaaactcctgggattcttgcctctgcagatttggagcagggttttcttcttctctgcttttcagtttacttatttgaaaatgaggaatggtgtttacatcacaaaacactgtagtgaggacaaaatgaggttttatgtatatatacacccatacatatacatatacacttcttccaaatgatataataatatataaacattgaatgaataatggttcaaatataagtgtacttatttgccactatgattaaaagggcaatataggaaaaatacattttcttctaatccatcatgttgtaataatcctccctgtggttgcagtatggttctgtgctagaaggcacaataggaaatctctaactttaaaaaaaaagaaaagaaaaaatatctttctagcaattaaaatctcaactaaattagaatgcaaataggtttttatatttgcttcttaattttgcattcaataatctgactagaatatgcaataatttaaatgccttgatgggagatagtggcttttagttctcttgggatttcattgtaataaacctggtaaataattcaggaacatatgagaggccaatgaatggtcagcacctggtgctatattatttgtgcctaagcacacagactccaaagatggcactctccacctgtcactgttgttctggcttaaacatgggccctgtgttcagtggctattgagataatagtaatggatatttttgccttgtccaattttcctccacaatcaaagaaaactgtgctaagctgtttaaaaaatacaaagcagaagtggcagcctcttttagattaccactggtaaaatttcaaatctattttctctattaagggattgattgttttaaagaattagggatatggctatcttttctactggtgctaatttgagcctttttgcctttctgtctttgttccacaaggctgagcttctctttagatcacattattcatattgcaaggatcttctgagagaaataacaccatcctctggccagccactcactctgcaggagttcctagagctccccagtttctttccctattgcctgagtagtctatctcacgcctgttagtctcacagtttaaatacaaacacacaaagactcttgcaggcagcttgggtacctttctttgaccccagccgactggacatagagaacaagagctagagagaacaagagctagagtgaccgacagatcatgtgtggagacagcatggggcacctgagcccagcaccatccaggatcagacagaacttaagccatgagctgcctagaaagatcttgggagggcactgggtttcccagtatggaaaaaagaaaaatgtggctcacaagtctaagctaaggtctttacagtactgggccataaacaggatctgaaaagaaactgcagaaaatgttagatatgctttatctttgttttaaaaatattatttactataatggcttaaaatatgttgatttaaatatatgatatttgatacctttgtaatatatataataaagtgtataataaaatataactatataattaaaatagatgatattttaaaacctctctaataaaccatttacgtgtgtgtgtgtgtgtgtgtgtgtgtgtgtgtgtgtgtgtgtgtgtatacatgcctttgtttaacaggtttaattgctttcctttcttcaggaaccagagtgagggtactcgaacagtgactgccatctggtggttaaccagaatcatcaccttgtgtagcctgatggttactaagatgtccactcttgactcacatggcatgcactcgcagcaggggaccagttgaaggatgtctgactttggagggtcaccagttgaaggatgtctgatgaaggagcctagcgaaataaccctttgcttctacctgaatgggttgttcactctggattctgagcctgcagccagctccaaaatggggcctctgaagaaaagatttgagttgctcttgtgtcttagtcaaagatctacatccctaccagtgggtaaccaagactgtgaataagcacacaccaacaggggcatgtggtgacatggagcctgaaataaactgctctgaattgtgtgacagttttcctggccaggagctggatcggagaccccttcatgatctctgcaagacaacaattgtaagtgagcagccacaggatgccagggctgctcagatgtatgtggtggtggtggtgttggggaggaggaggtggagggaaagggggatgagga

SEQ ID NO: 30309 - DNA, 2300 bp, Homo sapien
tgacataccatgcagaacattgtaaaatattctttaacagaactaggtaaataactgtgtatctaatatccgatctcatggccctcttaacatttttttgtttaaatgtgcactcatcccttataagcacattacttttacacttaatggtaggccacaatcttcatcaatctgttcatcataagacagagtaagaatttttaacagaaaattctaaaagagatagaagctaggaaagcttctttatatcttgcattaaatgggtagggaaaaaatatgactctcacccatgtcatgtactggaccatctttctctactttttaaagaaaaactaatacaactagaaaaacatcacaacaagccaaataaaaatggagaaaaggagtcattgtccttatacctaatggaacagtttccagaactactttaactatggaagcatttttgaaaataaagtattaataaaatagaaaaaaattattaaatatattgtatccttaatgtatagcaggaaaatagtttcacaaattaattgctattagaaattaccaaatttttattaagtactttaatatgcaatacaaattgaataatagtacaactataagttgatataaagtaagtgcttactggtaatcattaaataactaataacatgacttgttggttaatgttaaacctacagtaagaaatgttatacagatcagataggcattagaacatcaggtgtaccttttctgatttctggcattcatggcacaccatttcttaaaagcagattgttgtataataacatatacatgtattagggtttttttcatatatattttttattttagaagaaactagcataattcagggtttatgtgtttatttgtatattaattcatgaaacatgagagtttcatgaactgcagatgtgaaacgctgctatagaatgaatcccttcacctttaccttgttataatgtagtaagattttgttttccttttgactcagaaattttctatgtctatagaggtaatctaatatgttcctactgcctagaagagtaatacataggtgattatatcataaaatagaggtataaagtctttgcttacttctccatgtgggccacagcaagctgcagactgtacagttatgaaaggtaaagatgacttaggctgtgcctaagtgacaaatgtaaaatgttttgtaaataagtgacttacctaagatacataagatattttcatagaaaataatgtattcatagtaaaatactcaaattgataggaccaattttttctggcctaaatgcttatgcctacttcctaatcaattaccagcttgacttaagtaactgcttgagtagtcttctaagagttagtcttcgtaaaataaatggataggtatgtaaatatataatcttacataccctttccagcttcctagaaaggtctactgcttcatcttttacagatgtaaataggtccaaccagagacagtttctggcctttgcatataagaatatagatgtataccacagtattatttcaacaaaatgttatggttctatgtatagttgaaaactctatgatcagcatacaactgtcttttggtaatttttaatgaagtctacatttagccgtcggttttatctttcttaaatctttgacctaaacttttgtaagagcagctaataatttctaagattttccctgtttctttttcctacctttccttttctcataactgattggagaaattaatcagaagtcaaatacaagggacttcataatctagaaaccagataatcagctcccaagtcatgtagctaactatgcatttaaaataagtctgtctctttagttcttaagtcatatatttgtttgttaattacagtaaatgaactttaattggggtttttaaaagacagaattagcgaagtctaatttttataatgaaataagtttttgatattgctctacttggacgattttagtgaccaaaactatggataaaactgcctaagcataacattaatatatttagaatggcattcttcagtgctagtatttgaaattggaattagtacattgtgcattcttagtagtctttatccctagaatcaattctctcagcatcaccaaactgaattggtgaaatagtgctaagattctgggcaataggaagattagtgaatatgatacattgattccagggtgccagggattggctgacattaaggaccagctggctatggtcctcaggctacggtcctcagtattctagtatttgagtagtggaggtaaat

SEQ ID NO: 30310 - DNA, 2300 bp, Homo sapien
gtgcattttacactgaaatttacagtttccttgccaatagcttcaatgaggcagaaacacagttttcaacttttagaaagcagtttctcagttatcttagctgctcaatggtctggttacatttatcctaaattcaacaaccaaatagttggagactttattaaattaaaagctcctagtacagcgttgcaagcagtaggttttcaaaatttgtcaggttactcatttctttacctacaccactttttttctacttcctttcctttattctatataatgtggagttcccatactaagtatttttttccaaactttctactaggaagcctcatttgctattattgaggttatctttttccctttaattccactgatttgtaatcttacctcttattttatttttcttgagacaaaaaaaaaaaaaagtgcagggcagtggcacaatcatggctctctgcaacctctacctcttaggctgaaacaatcctcccagcagcctgtgtagtagttggcaccacaggcgagcgccactaggcccggctaatttttgtattttttgtagagacggggtttccccatgttggccaggctggtctggaactcctgacctcagcgatctgctggcctgggccaaagcactgggattacaggcatgagccatggcacctggccaactcttatttctgaattatgtttgaatcctttctttttctcattttacattacgttcctatcactttttaaaatccaagataaatattttaaagcaaaaacaactattattttaaatatttgttattttcagatattaggactactgttagaatgctggcttgacccaaaataaggtctgttcttaaaaggactctttcaaaacagatgactcatcagttttaaaaagcattccaccattagcttaaacatacaaagtacgtccttctaggactaccactcaatcagaaattaaagtttgactgcagagtaaaggcatagtttctcatacaaataaatgactggcaagaaaaaaacgactttccttttttaaggaggaaagcaatttaatgtcgttgattatacacgaccacttaactttcttatgtataagctttgttaaaaaaaaaaaaagctaagcattttttctcatttctattcattacttttcaaaatcataaaatgtaatttcagaaaagattgagtttgggacaaggatgaaaaatacgttaattagaattactaaattagtaccagatcaggattttcccaaactgtagttttgacctgcagtacaaactctatgctttgagtttttaaactaactcattaatttgagctatctcaaatcatgcaaccgcctccatatctcccaaattcactcctagacacaacttacaccaaaagccacgtatgtgcttctacaattaaaacgggcaaaacgtccttacttgatacacatttctgccttaaaaaagaaaaaaataattctgtggggcaagtagtgcgggtgttacccatattttatgcatggggcaactgaaatcaaatccctgccctaggctatttaacagcggaacctccagtaagggtccgggggttctgaggtctagtccagctgcgttcacatttcgaggtcggctttgttaatcctcggactttaaattcctgcggttttctgtcatggagctaaatcaccactaaattactgtgtgctcacagagtcctgcagacacgggccccacttttaaactgaaaaacaagcgggggacggggggggcacgtgacgcgcgaaccctcaaggcgagataaccgaacatccttgggctgtttgccgaggcagtcttgtagccctggaataggtcaccaggctccagcgactataaagcgcggccgccgaaacccggtccggctcagatgacaatttggcagcctctgggtgtctgcctcagttctgcgcagcccatgctgcgctcttgccactccgcgccccgcgcctcgtgaggcagagcccgccccggagcggcgcgcgcaccccaggactcgcgtcgcgtgactcggccaaggcgcgcagggtttgcgcccgcccgcgccacttccgactcagccctcggttcaggttccggggcgccgcagagctcccggcctctggaccgcgcgcggcgctctggggaatccggcgccacgcgccgtgcggtggccaggatggaggaggccggagcagcggtggtcacggccggggaggccgaactgaactggtcccgcctcagcgtgtccaccgagacgctggagtctgagctggaggcgcg

SEQ ID NO: 30311 - DNA, 2300 bp, Homo sapien
ttctaccatgccaagctgttgtcagaaaagatatgaaggaagcaaacttgacgtggttcctgaaaacaaaacaaacaaacaaacccaagcattttagtagataagaggaagggaggaaagatgataccagattctgagagggtgcagtggatctgcaagggatgcaatgtattgtgcgttattcgagggcagaactttatccacaatagttcccttcaatccttgcacagtgaccaagacagagtatctggtgcggaacatctattccctaatcttattaccataacaagggagcaggagtaagttgtctgactggagagtttgaaagaactggggatgtgtcactctaccccctcaagtttggggagcaggcatgtcccaggaggcacatattttctgcttttccatgcagtttagtttttacacaggcaggttttccagctctgcttgtgactgagtggacatgttcaattctgggcccgctgtccctgcagatctaaagccatggctgccattccagcctttagcagagacaaagctgacattttgctctccataagtctgactcctgttgctatctcagtggattctgaacttacatggggaccatgggtattatcttgaagccccctaaagccacaacagtgggcactcaacaaaccttggcagcagagtgagtatgacaagttcagaggacaacgaggagatgggcctgctttgagcggaggaagtatgctgatgtagttgaagagaagttagatggacagggtgggcccagtaatgcagggcttataagaaaggcagagtttggatttgatgtgggtagaagaacgctgaagtttctgagtagaggaagaacatgaacacgaggaagacaatgtttaaaataagggaaagaatatgacaatggattgcagtggagactacaggggagagcctggagtcagaggacaacgaaaggaggtttccagaatttctgagtgagggaggatgaaggtctggcctaggaaagtggacatgtgaacggaggcgaggggatgcatatgagatctcagcggctaaactgccaggctatgggtacaagccggctctgagaaaaggagataggtttgaaggcaaccaccctgaaagaggtagataagcaggccctgaagctgggggaagtgaggcttagtcttgggcatgtgaaatctgagttgctaagtggatctgctctccttactagttatggcaggaaaggcgccttaattaggagcattttagggagttaaccctgtcaaagaggtagcacactttcgaaggccaagggctgggaagaaggtggtgaagatggcaatcctgaacacagaggctacttgggatgacagggatgggaggagggacacaggtgatgagtgagtgggcggaagagaggagggggacaccgctccccggcccgagggaaggaggggatgaggctgccggcaaacgctggactcaggatcttcccagcagagcagggcggccgccacctcacccgggacaatgcactgtagaacccacagcagccttccccacgccggccggtcttcccggccctgcgcccacttcccggtgccccgctgccctgctgccgtgaccccgggatgcggggtctcctctgcctccctgggcctcccccttcagccatggggggcggctccgcttcctaggccgcgggacgtcttttcctccaggttccagtcccggaccttcccgggccccccacggcaccgcccacctggccaccgccgcagcccgcccgggccgccgccagccagcagcccctcccggggtggggtttcccttccccctacccctttgtggcagggacccacgggacaccccctctgcctccgctccacgtccagggggccgaaggggcgccggacgagggaccgtgcggagagaggggttcggcggcgccaggactcccgcgggctccccggagcaggggtcggaaggagggggagcgggagccgcgggggccgctgcagcagaagggggaggagaatggggaggagctgggggggcaggcaggcggggaaggagaggtcttaaggggcggcgaggggaggtcgcatttcctccgaggctggcgatcggcggagctcccacctccgcttacagctcgctgccgccgtcctgccccgcgcccccaggagacctggaccagaccacggtgagcgcagggcgcacggcgcggaggccggactcttcgggcggccgggggtgcttgggcggccggagcgagcctgcgggacccgagcaagtttcccagg

SEQ ID NO: 30312 - DNA, 2300 bp, Homo sapien
gagacggagtctcgctctgtcgcccaggctggagtgcagtggcgcgatctcggttcactgcaagctccgcctccctggttcacaccattctcctgcctcagcctcccgagtagctaggactacaggcgcccgccaccacgcccagctaatttttttttgtatttttagtagcgacggggtttcaccgtgtaagccaggatggtcttgatcgcctgacctcgtgatccgcccgcctcggcctcccaaagtgctgggattacaggcgtgagccaccgcgcccggccaaactgccaaatgtgggtataaatgtgactcaaagctggcctgagctggtgctttctgcctatgaggtggccctgctctacaggagcagtcacggttgtgacaccaccaaagctgtaacactgcctcttcaataaaattgttttcttctacctccgggttgcccttgaattctttcctgggcaaagccaagttccctggttgcctaagccccactttggggctcgcctgccctgcatcagttcgtactcgctggactcattcctttatccttttattctttttacatgctctccttcctagatcagtgtctaatctatacaggttttggaaactttatgtagtctttagaattttataaactgctcttgcttttcatattgtattattttcttagtatttcaaaacacctttgaacaagtcagaatttcctttttttttctcctttaaaatcgagtctgagtaactcgtcttgtgttcattttttctacattctctcagcctgaatcctcatgagtccattttgctctatattcatctggacattagactactttgaaatattaccatttctgcctattctttctgtactgcctgattgtcagctcccgaaaggcaaacaccccatcttccattttgtctggatttcccccactgagcctagaagattgacttaacactgactagtgtgctgtgtgcttcacgcggtgggtgcttaataaatattttaaaacagtattaaaatgttgaataaatttgacagcagtgctgcttctcatcatttcaaatgccaacactttctaggtcccttttctagcaaccatttcccaacatacctacgcgcccccagacgtttcagccaagctggggctctcttttgatccatccttctttgcccgagttatggaaatattgtttacattttttcccctgaggagaaggggaacccaaagaccctgctgtgaaacttgaagttgtttttctccttggtaactggggagaaggaaggacagtagggacagagaaggttttgtttctgattacttcagttttcgccccagatcgtcttttacaataagatacatgcccctatgagtattttcatacctgtaaggatgtttttaattctttgcatctgaagagtgctaaggattttaggcaagaggttttagtattttaactaagatgttttctcatgagctttattcagtatctcattttcttcctgaccttctatagtcagtcaggcaacatttctcttataacatcatttttcctattaatcattatttcgtacctgtgaaaaataagcttacacttaatgttgtatgaatctagcatggtaaagtacagaaaagcttattctcttcttcttgggtagggaattctgttttgcaaagcactttgtgatctatttgttagcttatttaatcctcacaacaactttgctaggtggacaggagtcattatctccaggataaggaaaaggaaactcagagactttaagtgacttatccaaggtgacacagcacggttagacccacaatgaaaacccggacttctgactccacagccagtcccacacagctcaactttacataataagccctggttatgtcagtagagacaaggctgctaggaagaagcagcgcggtgacagatgagtaggtggggagcggcggtggggcagggcgcactgcgagaagagcacttcgcgcatgcgcatatcaccgagcgaacgcgccgtgttcgggaaggtaggagaaagaggcggagctccttgttaacgacatccccaacctctgctaacgcgcaggcgcacttcctgaagctgaaggtcagcatagacaaagggcctcagaatcgcgcaggcgcaattgtgccctggttcgccaagatgtcgttcccaaagtataagccgtcgagcctgcgcactctgcctgagaccctcgacccagccgaatacaacatatctccggaaacccggcgggcgcaagccgagcggttggccataagag

SEQ ID NO: 30313 - DNA, 2300 bp, Homo sapien
ttcctgggtataaatactctgctctgttactatagaaggaagcagcaggtaatgtttagtggtagaccagaacttcccctaaaaaatccagcagtgcttagctgtggcacttcctgatgttagggaaatatcctcccaggtcagtggttctcaactgggagaaaatttcccccaagtgatgtttggcaatttctggagacatttttggttgttacagcttggtggaatgtcactggaacctggtggaggcaggccatggatgatgctaagcatcccacaatgcacagaacacctccccacaacaaagaattatttcgtgtaaactgtcaatagtgccaagattgagaaaccatttcctagatccttgccctcaggtccccctattatacccctaagagataccatccttaatgaaattagtcctaaagcatttccttctttctgaagcatgatttcagcactgtttcccaaatcaacattttacatcctttttaagtatcttttaatgtgaccatcctgctttgcttttaagaaatgaaggctgctgcctgactgtgtgtgtcagagaggcagaataatcccaaggctgccttttccacttgctgcttcctttcccatctggctgcctccctgaaatacagaatgagctgagccctatgacctgatggaggccctgccaagcccaccttgaccaggtgctgcagccagtggagctagtcttcagggtgcgggtcgctccatgaaacgtggcagctgggcttatcagctgccagcctggataagtcaggcctgctgccaagttgattaataagcgctgggctgacacttcaagaagggcctaaacctgctgattttcctcccctcttccttagatcatttcattattaaattaaagattgttgtgatttaaactgaactgtcaggcagcctagggacaaacgtggggtttggtgaagcagctgaacctggtactgcatttaccaaatcagatctcagctgggtgctctttctttctcttaaaaaaacaatttagaactctaagggcttgaagtagaagtagaaccttcccctgcagtgtcaggagcccacacagggaggctggcatgccaggaaagggacctgattataaatagcatgaaaagcagcatcagtcaaaactcactgatgtgcctgggcaaaatgttaaaagaaacaaatagcttctaaaaaaggaagcaatggttttatttttataatctaaagtgctaaggaacaaaagcagtttatattcacatagttttaaacacacaaacatgtgtgtgcacgtgcacaaataacacacactaacagagtccctttaaggaaatgatggataatcattttaatataacaaaatcacaagtagagcctcacagagggggtagctgtcctttcttttctatgtaattgatgctatttatttagaaggtctatggtttacccttgtgaagtaatttttctgtatgtgtattttttttccagcttagatggaaaccatttgagattccaaaagcatctcagaagaaagtagactttgtgagtgtaagtcagtcccatccacaccctccctactgctctcctctcttctgtggtgagtgagccaaccatttgcagcctgaatgccaagcagaagcagccctatcaggaggcagcagagacaaaaccacctgcgtatgctttgggggctggcggagggatgtcttacttacagaaaccatatggcccctgacaccagagggtattcatgaactatttatatctcagaaaggccaatgacaattgaacattttcttacttaagttcctttcttttggctagaacgggggcttttaacctttttctcactttgatgtctgatgtctgatgatgtctttgtttataaatatataaaataaattatataaaattacaaagaagctaatgatattgaaatataacgataaaaatactattaaaaacaaatttgatttggtttatagtcattcatgtgctttcttgttaatgtgctaaatcataatatctatggaaaacatctaataattctggtatgagcataaatatactttgaggtatctataacaactataatgtgatatccatgatttttatcattgataaagttacaggcacctctaatactgctgtggttttttgcctacattcatattagttgaaagaaatgataaatttcactcagagattagcaaaagtaaatataaaatatttcccatccaagttcataaatctccctgaagtagatgcttgggctagaatggcgtcaa

SEQ ID NO: 30314 - DNA, 2300 bp, Homo sapien
ttagtgaaagatgtattcaactttaaatattttcaagcccctcaaagtaattttaatccagtcaaggaactgttaacactttcttaccccttcagaagtctctcataccttaggaaagaactgaaacacttcttaaatctgccttcacaactggttcaatggaagtaacatagaaagtttgttgaaaaataaggcagtaaagatttccctttgtcttttattagctcccatttgtttatctaatgaccaactgctaacttccaagatcaatagagattgaaggcccaaggtactcataaacttagatacacaggagatattttcttcgaattcagtttcagagtctgcatgttataggaatagtgaaaacttagcctcaataaagctagggcctccacctaccttcctcctaggtttgcatatgaattccagaatagtttatataatgccacaatgccatctgtctatgctgacatatgctgaggtttcctatcagctgcccggtccgtaggcatcagtccacatggtttgctaccagcatgtttcctatcaacatgtcccctttggtctggcccagtctgtgctagcacctcatacacaggcaataattctgctgctactgcagtatgctggagcctggggacccttggaggttgtttaagcccatttatctaaagcagagggtctcaaactagcagcctgtggccacttcaaatatgcacatgtttttcaacctgcatgattatatcagttatttatcactgcttaacaaaccaccccaaaatttagtagtgtgaaatacaccattctatttgttcccaattctgtggctcagcagttcgggccagatttaactggtggttcttctgctggtcttgcctgggatcacacatgttctgcagtcacctggcagccagactgcctcattcacatgtctggcagttcctgtggggcttgcagggctgttgcctggacctctggaggccagcccagcttctctgcactgtggtctcaggctgcaagaatgggccctgtcctaaggcacaggcatgtttcaaactctgtgtcatgtttgctactagccaaagaaaaagaccctacctcttgatgggaggaacagcaaagtcacattcaaaggggcacacatacaaggataggaggaattggagcattttttgccatctaccacagggtggtttctctgtctctctcactctaattaccaatggttaaaaattggagcttcatcttatcttgaaaaatcagctagcctactttattcacttacacttcctccctcatctgttggcatttgagttgtgataatgcctaatttacaagattgtttttgtgaagttagatatggaaaaatctgacaaaagcagaaactcaatatatgttttctcctttctgaacaccactagtcatgaagctgctacctgccaatgaccaaggagagcggccaagatgaagaacaagggagtcatagaggaggtggctggagaataatcccttggtctgttttagaagtatagaggcattaggaaacaaaactcttaaagaatttataagaaaactaaacgtactttaagaaattaaaaggagcagtaggaaacatatcagtttgctctaagtgaaatatctcaggctctgaatggttcacccaagaacctgagctcattcctgggaggcacctgcagaaaactggttctggtcctggtccctgtcttcaggtggctgtgtgtaaacatcttaccccagtgtacacatctgcagctggtaaatgcctgggggttttctcactgctctccaggagactcagcactgccctgttccttcctagcctgagtcaggactgagcagagaatcctccaccacacacagcaggcactatctgccacagttcctttccccgatagcttcaaattctctgccttttgaaataagcctacttttaactggaataaataattggtcaatctctacctcaggtgaagaggaaccaagcctctggaaacacttaggaacaaactgtaaaaaccaaaggcaattgtgtaaccggttaaataagcttgctggactttgtccctgtgtatgagttagacaattctttcagctagtttgagtgacgcactgaccagtgaagcgcagtgaagcagtgggaaccggaatatccaaagagtggtttgaaggagaaagaagcattgtggctttatatcctctgggcctgggtttcctgaagtcaccacacatagaggagagagaaaatggctgagttaaaggtaagaaaccatctgaca

SEQ ID NO: 30315 - DNA, 2300 bp, Homo sapien
tttattgaaaaacctatttctgtgttctttcaccttagctctggaacattcttcctggtagaagcactcaaagttctttattccatctactatccttagtttcctaagaaactgaacataaggatcactctatccaaatgcacagtccatattcttagcgataactttcttcccttaataccctacattcttccctctctaatagcctaggctagtaatccttcagaaggaaataatgaagtgtctttacttctctcccttaagattaagatatattatcatatcaccctgactcctttcatctcagccccaccttgattcttctagcacatgttctacaaagcaataactctcagcccaaatgaaagagaaagaataggggaaaagggtactcaaatgcccttaaaagctcaaaagtcttacctaaagatcctcagtaaagtcttccctgtccatctaatagccaacttaggcctttgtaattcttttactcccccgtccaaaattctcacccatagttttgccatatttatagcctggggaaaaggaaagggagaaaatatatgccagttttttgccctaaaatggagattttattctgcttaccaccagtctttactgtcagattacctgagtgcaaattctgacttaccatgtgcccaaggacaagttactctacttctctgaactttagttttctcttgtgtataaagataataataattcttcataggactgttctgaaaattaaattagataacacatgtaaagcacaatatttagtacattagtactgaataaatattagctgtagtctttaatggtggttctttattcctttttttaaatctgtgccactgatgctgattaaaacccctcattgaggaaggaagagtgggtacaattggatattagggcaagtgtcagatctctattagtttcagacaccagaagagatgcaggtttatctaagctggctggaacaagtcagctatagcttgtacaagccctttagttacacagatggctataaaaactgtagaagccagctaattctacctcttctgcttttctttttcaaattgacacataccacctcttgaagatggaggaatcattggtttcatgtcctattcacaatctgggtaatatagaaaagggttgggagtttgaaacctgtagtgttttgaccataaggtgatatcctaaattctagtgggcatcaaagtttttcctcttttgtctatatcttgctgtaataattaattccctgattttcctttctatctaggattttaattgattctcttcagttgtattttagtgtatttctgggcctcgttacattttgttatttttctcaatctatcaaaatccgtgcatgtactttctactatccatacttctttactatttaatgtctcacccactctcttatagtggcatatttcttttgctctaataactaaatctcttacaggtaggaagcttacataactaatcattattcaaagaactagaaaattagacatttgaatagattagtctcagatgatctacaggacactattttgtcagctaaagaatagcaattgtatcaaatcagtactattttagtagattttcattacctaatattacttttagtgagtataagtaatatatgtatgtactggtatctatggcagtactgtgtacagtgaagaaacaacataactttttgaatgaataatttcatatgtacttgaagtagttttgattctcttgattaataaagtggttctacaggtaggaacaggcatggagtaggcactcaggaagtgttgaatgaagtaaagatctgctaaaagtttaatgggatttcgtcagcccttgtaaaataaagagttataaaactgacagagaaaggtttatggctatttataaatatttgtagagaaaattttaaaataattgtctctgagttgttagtcatactagaatgctagattcattaagcaacctaatgcttctgtttactaagcttcatttggccaattgtgaaatgaagaggaattgttaagggattaacattgttttctctgattattttaggtattattttcgtacacgacttaacaaataagaagtcctcccaaaacttgcgtcgttggtcattggaagctctcaacagggatttggtgccaactggagtcttggtgacaaatgggtgagccaatttcacaattggtttgaaagattgtagcaatcacaggaatgtacttccctgaataacactttgtaaaatgtttgatttgcaa

SEQ ID NO: 30316 - DNA, 2300 bp, Homo sapien
aaagaaaggctgaggaagtgtaaaaagtgcattctaaactgtcagactgtgtacttttaaatcgcagttaaaaggagactgacaaaattaccttttaaaaagataaaaagacaataactaactttgcacataaaggttaacattagtgaatgtgtgacaacatcaatcactttcctggccatcacagctgtgtcttctgctttacaactaaaccataacaggggaggcgggcagtagggaagcttatcaattgcctgattacttttccacatttaatgtagctgctaattctatccctgttatatgacgcattaattccacagttataaccccagaacctaatacagtgcctgttggaaagaaaataaattgactagttgcaacagtttgtaatatgaagggattgttagatacaatagaaaatggaattataaaggacacaaaacacccacttaacgtatcatgaagaagtctgttagttctggattgtaaattctactcagtgatactcttgccaagtccctttaggccacaattactttatctgtaaaactgagtgattttattaaattaacttcggcaccacttcaagctacctgatagaaatgaagtcgacataaattgtgattatgttcattaagtttcaaaaggcaactttcttaggggaatattaaataatgctctctgtaaaatatttcataatgcaaataatcctcagggcaatgtgaaaacattcttaacctatatttgctgcccacaattttatttagtttctattaagttttcaagcctctccacctccaagcatctagcacaacgtctttgctcacaacacatgctcttaggccaactccagaggagcgcttctataaaatgcaaggtcagcatttattgaagttactaaggagagctgaattggggattatggaagaaaagataagggcagtgaggtgggagctggaaatccagacgccagctgtagttctcaaatgtcccaggtgtcaaaagaattctttttgcatccactgagattaaaaaaatatatatatatttaacactaggattaaattgggctcagcgttaaatcctagctgcttcagaataaaactcttactttaatttctctattgtacagtctaggacataataggttttcaatgaagatcaaacgagaaccaggaaattaagctcagttaagaataaaacaggaccactacccaatatgtcactgcataattataacttagcgtttaagttcgtggactccgcgttcaaaaggattctgtcatttacatctctctgcctcactactctcatctgtaaaatgggataacaggactgtctcagaattaaatgagttaatacatgcgaagcgcttgccagtgcacgtttctcagtgcacgtttctcagtgcacgtttgacttccttaatgaacaaaatctcttgaaggcacggtcctactaacttctgtacccttaacatagaaccccatacaatactcaatgcctgctttttttttttttttttttaataaaagaattgacaatacactctaggctggggtcgcctgggagaccgatgcggaaagccgcgaaggcaaaagacccgggctccgcgacccccacccgcgcgacgacgccgccgccaccgcgtcgtcacacggagcaaagtcccctgggaagtgtagtcttcaggccctgggagggacttcagccacgggccgaggagccaggaagttgagggaaggaagctaaggggagggttactgggtaactcaaaagtgtctggagccccagaggtagggtaagccgctcacctgagtctcccaacaccagtaccttcacccgatccagggacgccatcttgccactgccttccctgggttaacgcctgttcctggattgtaagccaatcagagttgggcatggagggcagagccttcaatttcattggccactcggagcgtgactgtcttgatcgaaggtttcactgaactcattggctggtctggtaaaaggtagcggggtgcttccccagctggtcgcaggaatagtgcgttttctttgtcgcgcaaggggcgtggttcatttaagccggtagttgaagcgctgggggcagctgtagtgggagtgttccaggattcgccttggtaaaccttgttccctgttccttgttcggagttccctggccgggcattgcatttcatgatttcttcttcctttcgctccctcttaactatcctcccctaatgaattaccctgttgccttggtcctcttggtcctccaaagaaccattgac

SEQ ID NO: 30317 - DNA, 2300 bp, Homo sapien
gacccaacaaaatatattggatacagaatatgagagtaggaaaaatcttaaatagctctctgttttgagccagcgtagctaggaaaagtactgccatgagaaataggtgacccctgacgaggagcaggaagaaatgaggaaatcacttttagaagtgtctttgaggaaataccataggatattcctctgaatatgcccagcaggtagctgaacaaatgaaactagagctcaggaatgaaatcaagctgtgccactttgttcaaaatctctgcattctaaaatcctccttcctgaccactaccttctctcctccatcacttcccactcacgctgaatctccttactcaatctctagaggtcttaggtaagagttctcaaactggcagccccccacgcattgtatcacccaaagaatgtttcaaaaattttctgaattagttgtcaacatttaaaaattgtaagagttcacataaatttcaacttccagctcctcttgcaaaattggaaatatctgaggaaaaagtgagcccatgttcccacatggaaacaataagctgaagccgaatagcagctggcgttattagggaaggagtatggctggtctctggagacttctgagcgtgggacctcctaggacctttgtttcttcctttgatctccatagtccatgagtcagatcccagcctcacctccctaccccagcccagacccacgtgtattttaatcatatcaacatttaaggactactgtgcaccaggcacggagccagagaaacaaagttgaaaagaaggcaccctctgccctctgtctaccctgtcagcctcataaccagccacaccagcatattctcaattccatgagccacatgtgctttccctgcatcccaaggctttgcacatgctgttccttctgcccctacagctaagcccaaacccccttctcctaatcatccttcaagtctcaaatgatatttcctcatggaggccttcccagactccccattaagtagcatacaatcatcccctttcacgtgttccatggctctttcccccttcttgtactttctccatgtctatctctaagaccagacttcatcttgttcaccaattaatttccagcatctagcatagccagacaagtacttccataaaactttccatatgtctcctaggcacgttttgttccaacatggctcatcttgccagcttccccctgcttcacttcctccactcttgtttccaaggtagaatcggacaggctactgggcactctcttcttaaatttaaaacagttttaagcgggaggtgcgtggatcaaattcaggatgttaaaagattgtactgactgcagagtggagaaaaaaacaagaaaagtggatgcgaagagaccagttagattacttcagtaaatcgccactccagttctagaacaacttgggattctacacatctaactgcggtgttgtgttaccacatttcatggcactttccacgccttcacacacacagcggcaaactaccgcgaaacctccggacccagctgccctccacgagacgcgttcggtgatatgcactcctccccaatgcgagactccgagaccccaaactccctcggactctcccagttgggtccagggccacactcggcgcagccaagcccgccctacccgaggtcgcacacgggccgctccggggtcaatggttctttggaggaccaagaggaccaaggcaacagggtaattcattaggggaggatagttaagagggagcgaaaggaagaagaaatcatgaaatgcaatgcccggccagggaactccgaacaaggaacagggaacaaggtttaccaaggcgaatcctggaacactcccactacagctgcccccagcgcttcaactaccggcttaaatgaaccacgccccttgcgcgacaaagaaaacgcactattcctgcgaccagctggggaagcaccccgctaccttttaccagaccagccaatgagttcagtgaaaccttcgatcaagacagtcacgctccgagtggccaatgaaattgaaggctctgccctccatgcccaactctgattggcttacaatccaggaacaggcgttaacccagggaaggcagtggcaagatggcgtccctggatcgggtgaaggtactggtgttgggagactcaggtgagcggcttaccctacctctggggctccagacacttttgagttacccagtaaccctccccttagcttccttccctcaacttcctggctcctcggcccgtggctgaagtccctcccagggcct

SEQ ID NO: 30318 - DNA, 2300 bp, Homo sapien
tttgtaaaaggtgtaaggaagggatccagtttcagctttctccatgtggctagccagttttcccagcaccatttattaaatagggaatcctttccccattgcttgtttttctcaggtttgtcaaagatcagatagttgtagatatgcagcgttatttctgagggctctgttgtgttccattggtctatatctctgttttggtaccagtaccatgctgttttggttactgtagccttgtagtatagtttgaagtcaggtagcgtgatgcctccagctttgtccttttggcttaggattgacttggcagtgtgggctcttttttggttccatatgaactttaaagtagttttttccaattctgtgaagaaagtcattggtagcttcatggggatggcattgaatctataaattaccttgggcagtatggccattttcacgatattgattcttcctacccatgagcatggaatgttcttccatttgtttgtatcctctttaagttcattgagcagtggtttgtagttgtccttgaagaggtccttcacatcccttgtaagttggattcctaggtattttattctctttgaagcaattgtgaatgggagttcactcatgatttggctctctttttgtctgttattggtgtataagaatgcttgtgatttttgtacattgattttgtgtcctgagactttttgctgaagttgcttatcagtttaaggagattttgggctgagacaatggggttttctagatatacaatcatgtcatctgcaaacagagacaatttgacttcctcttttcctaattgaataccctttatttccttctcctgcctgattgccctggccagaacttccaacactatgttgaataggagtggtaagagagggcatccctgtcttgtgccagttttcaaagggaatgcttccaggttttgcccattcagtatgatattggctgtgggtttgtcatagatagctcttattattttgagatacgtcccatcaatacctaacttattgagagtttttagcatgaagagttgttgaattttgtcaaaggccttttctgcatctattgagataatcatgtggtttttgtctttggttctgtttatatgctggattacatttattgatttgcgtatattgaaccagccttgcatcccagggatgaagcccacttgatcatggtggataataagctttttgatgtgctgctggattcggtttgccagtattttattgaggatttttgcatcaatgttcatcaaggatattggtctaaaattctcctttttggttgtgtctctgcccgaagcccaggtttttaaagtaaactatatgccaatgtgggctttgagaagacagctttctgggtcatggtacggaaatgagatacacttagtttctgctttgtcaagggatccagtatttaagaatattttgggctgctctccctccctcattttctacctttttaaggactggatggtctttccttgattatcagattcaatttttcaaggttggtaaaactgtctggatctaagtattactttctttcagttttacaacagttaatgattttgtcaaacaccccaggtggtgattactcatgtgtttattggtttgttgtgattttattgtgaaagcatgactatgtaaaacatcctagaatcttggtagaaaaattttactcaagaaaggaaacaaagacacttttaggaaatgcgaactgctagttttctcagggtttccagcattcccaaagaatagtgagcatttcatgtagctttttttgtgtttctcttctgaagtaaagtagacttgacgtaatatattgttttataaataaaaagttactttttaatcaaacacactatagatcataaaagtagccatttaagaaatatgtaaagctttttgggtgtaatcttttgtgcattctagaggaaaatcttgttctgctctgttaaatgcttaggtattagaaatctttttaaacactttgggtacttttctggcactgcaaggatagtggatatgattaccatgttcttatacctggctaattttctgtttttttttgaattcagtatatttaaagttggagttcgttgctaaagatggcagacccagatgtcctcactgaagttccagcagcattgaagcggttagccaagtatgtgatccggggattttatggcattgagcatgccttggccttggacatcttgatcaggaactcctgtgtgaaagaggaggatatgctggagctgctcaagtttgatcgga

SEQ ID NO: 30319 - DNA, 2300 bp, Homo sapien
aatgaaaagccttaaaacactcttcatcacatagttttattgagttaatgctggcatatttgtctcctatcaaggttagatccaattgaagcattcatttaccaaatatttattgaacacctacaacatgccatgcatatttaaatacttatttaaatcagcatcctctttatttaatatcaaactaaccaaacatagttcttgtgtccttttagaatttatagcctaatgagtatacgaaaaataaaatagatatgaggccgggtgcagtggctcagggctgtaatctcagcactttgggaggccaaggtgggtggatcacctgaggtcaggaggttgagaccagcctggccaacatggcaaaaccccatctctactaaaaattaaaaaattagccaggtatggtggcgcacacctgtaatcccagcactttgagaggctgaggcggtggatcacccgaggtcaggagttcgagaccagcctggccaacatggcgaaaacttgtttctactaaaaattagctgggcatggtggtgcatgcctgtaatcccagctactttggagactgagacaggagaattgcctgaacccaggaggcggaggttgcaattagccaagattgtgctactgcactccagcctgagggacagagcaagactctgtctcaaataaataaataaataaaatagatatgaataaaaataagatatgaataagtatacaagtaccattagtgattaggcagaaaacaaacagaataacgtatctgagcatagtggaacaagaaggaagaaacatcttagagggtcaaggagtctggaaggtgatgtttaagttgaaatataaatgatgagaagaaaccagctatgtaaaacgcagaggggaaagtgttaggaggaaacagcatatgcataggccagtgcagtctgtgaatcgtgagttaacttttcacattttaatttattttttcattgacaagtcacaattgcatgtatttatggtatacaatatgatgctttgatgcacgtatacattgtggaatggctaaatcaagctgtttgaatatgcattaccttacagatgtatcttttgtggtcaaaacacaaaatttagcaattttcaagtgtacaatgtattattattaaccacagtcaccatgatatacaatagatctctttaacttattccttctctctaactgaaattttgtgtcctttgactaaaatctccccaatcccccaaatcctagcctctggtaatcaccatttttctctgtttctgagtttgattttcttttaattccacataataagtgagatcgcaaactatttgtctttacatgcctaggttatttcactcaacataatgtccttcaggttcatccatgttgttgcaaatgacagaattttttcttttttaaggctgaataatattcctttgtgtatatataccatattttctttatccattcatctgttcatagatacttgggtcaacttttaaagaaatgcatatttcctttcagtttattttgaatatacagtacacggtttggatttttcaactcttttaaagaggagcaagaacagtcagcttgtttgtagtaaatcttgtacagatgtgagaaggtcctgattgctctatgccaagaatttgtttgactacaggtctgtggattagaacgggaaaatggggatagggacaggagtccaaattaagtgtcagaaaataatcagtttaatggcatgctcaggcagttgacaaaggcatagcataaacacaggcaaggtccaaagtactagtcaggaaccagaactgaagtcaaataatattggcaaggtagcattctaaaacatctaaaaggctgttgtcaagccaacagagtttcctgattcctcacctcctttgaggaggaaaaacagtggcttgggcagtttggagtaggaaaaggaccagagtagaaattcagagtcagaatagccaagaagtgagagggtgataaggaggctgggtcagatactggacagcaaccaagaagtgaggtcacaaagccagagaagcagggagaaaccataaggtaacagatacaaggcacccagaagaatgtagaactttcataacagaaagaaaagattttaggcatctattttaccatctcagaggaagatagctgcagttgtgtaaaacaggtaccaggattttaaaaaccttaatctttgtaacttctttatgtttataatttatactataagtatagtaaaaattgttttggcaaaacaacttgaaggaaaatccttaaa

SEQ ID NO: 30320 - DNA, 2300 bp, Homo sapien
gacttggcttttctcccacttcctatacctatttgttgtcccatctaactcaggcagtccattgaattctctccagggtcctcaagaaggatctctgtcaatcttttgtgtacttttttcctcagctctcccccaatttttagaataaagaccatcatttagtttgtgataatatggtgctagtgatgatcagtttaagaggttttgtttgcaaacattacatctcactttgctgaattggggctattctccttcttcgctcccatcaaaatgtcaaaccactacttgctataggcttgctttcatttattagaaaaatgaaaactcagccactttattataaccctccttgcctctgtttttaaaaagaaaagacagacataaaacaaggaaagcaaactctttatccttaactagcgtccatactttgaggtgagcaatgggccaggaagaagagaagaaaaaaggtggaaaagagtaaaaagatacctgttgttagggacccaatacagaatttggaaccctaccaagatctagtttgtgtcagacatatcacttatttccaccattatttttacccctttcaaacattatgtaattgggtaccaactcatatatctttaataaaaaatattaataaaccaactcttcagaaccctttacgtgcctattttaagtgaaatattgtgcctggtgctaaataatctaggagaaatatacaattccatgcttgccttcaagaaggttactgtctagctgtggcaatgagagactaccagcagtgtagggagtcccaaaaggagtgaaatagtcattcaggacagaaagattcaacgttgagctgaggatctgaaaaactgagctctatttcatctttaccatttctttgctatgtccttggacaagtcatcatccttcaagtctcctgcttcctccttcccactctctcccttgattgagagaaaagagagagagagaagaggagaggtgaaaaagaagaaaaagaagaaaagaaaaaaagaggtcaaagattgtaagatgtaagacaatatttgaaatgatcactaatgagttctgttgtgatgcccaaattgaagtctcagttagctgtgacccgctgaactgccattcatttcgcaaagacatcggggtccaaattttcccgaagtcaatagcaggtgagggctcagaaccaaatctatcctgatacagtttttttttctgcactgaataatacatctttcaaaatgattattgtgactcacagaaatagcttaaaatatattcttgatacggtttacagagtgagaaatatttctttaaagaaattaaatatctttgtatatgtgaggatgatggggaaggagtaattctacttactagagagcaaggtaagcaatcaattccttaggctctagaaggctatatattctgaaactgttgaaatacaattctccttggcagatacgaaccattaagccattattggtaacagcaggggttaatcacagatacaagttgagtgcaggtagcaggagagtgatgggagccagatagatgctcctgaagaccgggaagaggctcgcagaagtgaaaaggtgcaaaacacttgctcagttcaccatactgtccagagccatacctaaggtaagcaacgcttcccgcatcctcagactccaggcgtccaaattcgcacgcttgcaggcattctattgattcacacttgagtccttcaacaggtagcgccaattacatcccccagagcacgacccccagcatactggccaataccgctgtcaatcaaatacctcacctacttctctaaattcccccctcccactgtcattggctttaccttcggcctatccacagatttcttctgccctggagaccacagaacttaccctatcgaatctaggattggcgccgaagctactcccgccctttgacgtccccgggcaccccgcccccttcacctcccagctttgccggggaagaagcagggcggggcaagctaggggccggcccgggggcggggcctgcctcccacggcgggagggcggagcctgctctggagcctgactgctcggttaggacctcggagagcgccaggcgccgcgaccagagggcccagagaagcggccggagcccgcctacctcggccccctcagcttcccgggctggcaggcggctagaggcgtctgaggaaggtgcctaagtcctgggtcagatagtcatccctctgggacgccgccgccgctgccgccgtccagctgtggctccctcgcacctgtgtgtgt

SEQ ID NO: 30321 - DNA, 2300 bp, Homo sapien
catgtcctgcatcctgggaacattggtgcaaggggtgggctcccaaggccttggcagtcctgtccccatgtttttgctgtgcacagcccatgtggctttcatatgttggagttgaatgcctgaggcttttccagactgaggttgcacactgctggcggctctgcctatgtggcaggtttcagcatgggcacccaggctttttgatatatcctctgatatctagggggcagctgccaagcctccatggctcttgtgttctgggtgcctgcagacttaacaccatgtggatgccaccaaagctatggcttgtgccctctggagcagcaaccccagcagtagctgggtccatttgagccatagtgggagctggagttgtagggatgtgaggaacagtgacccaaaggggcacagggcagtggtgccctaggcctgtcccccaaaaccattctgttctcctaggctcctgtgattgtgatgggatgggtggcctcaaagatttctgaaatgccttttgtccattgtcttgactattaataccttgctctcttactggtcatgctaatctctttaggaagtagttgcttagattcctctcctgaaaacactcttttctttactaccacatggccaggctgcaaatttttcaaatgttaatgctcgtgtcccttttaattatagattcttcctttaggtgattccattgtggacataatttagtgtaagctgttaaaagtaacaatgccacttcttgagcactttgctgcttagaatttttttcttccagatactctaggtcatcgctcttaagattagccttccataatgcagccaaattctctgctacagtgcaacaatgcagccaggttctttgctacagtgcaacaatggggatatttgctccagttccaataagttcctaatttctgtctgagacctcattagcatagccttttctgcccatatttctgtcagtattttggtcacaactacttaaccaatctctaagaagttccaaactttccctcatctttttatcttctgagctctccaaactcttccaacctctacccatcactcatttctaaagtgcttccacaatttcagttatctttatagcaacaccgcgctccttagtactaattttctgtcttagtctgttttgtgttactaaaaggaatacctgaagctagtaatttattttttttcaaaaaaaatgtttattttgtttacaagattgggcatctgtatgtggtgagaacctgagctgttttcactcatggtgaaaggtgaagcggggctgagctggtgtgtgcagagattacatgatgaaagaagaaacaagtgagaaggagaaggctccaggctctttttaacaaccagctctcacaggaacaaaaagggagaactcattcacctccaagacaggacattaatcaattcatgaaggatctgccccataagccaaacacctctcattaggctccacctccaacactggggactaaatttcaagatgaggtttggaggggacaaacatccaaaccatagcactcccattgaaagaaagtcaaaatttacttatattttaatatttataaggatactaaataaatatttaccaatgtatataggtaaagtgcttggtttatttttaatgaattaactaagtaaacttgttatataatagtttcagattaatagaattcattgtatctatattagcaaagcaatgccactgtggaatgttagaattatgagaagtaaattttgagcttgagtaaaattttactagtattaatattacattttataaattactattacaaaaagagcatttttgttcatacaattcttgttttatggtacttaaaaaacaagcaaaatttatagtgatgtttagagacattttagggcttactttatcaaaattattttctgtttttttctttgtaaaataacactgatatattgtctttatctattagttttccaatctttgaaaatccatatcccatggacattcatgaatcaccagttacatgcacagcatactttgcagattgtcctccggatttgattctagtactgtattctataggagtcaagcataaaaaacaaggatacagtaataaggtaaaagtagaaattataaataactttttttgtattcatatcacatgatcatacttttttccattactttattttcttacattccatataggaggacttaactaaattctttttaagttataagccaacatctattaaatacataacttcttaaattcaaattttct

SEQ ID NO: 30322 - DNA, 2300 bp, Homo sapien
gcctcccacagtgctggaattacaggcatgagccaccatgcctggcctcttttttttttttttttttttttgagatggagtttcactcttgttgcccaggctggagtgcagtggcacaatctcggctcactgcaacctccacctccagggctcaagcgattctcctgcctcagcctcccaagtagctgagattacaggaatgtgccatcatgcctggctaattttgtatttctagtagagacggggtttcaccatgttggttaggctggtctcgaactcctgacctaagtgagccacactccttggcctcccaaaatgctgggattacaggcataagccactgggcctggcagttttggggttttcacaaaggtgttcttgtctgcagatagaagctagttgaagcttctggggaggggggtagtaaagcctcctaaaccaccatcttgctgacatcttgttttcctttttttttttttttttttttttttttgagatagagtctctctctgttgccaggctggagtgcagtggcgtgatctcagctcactgcaacctctgcctcctgggttcaagtgattctcgtgcctcagcctcctgagtagctgggactacaggtgcgtgccaccatgcccagctaatttttgtatttttagtagaggcggggtttcaccatgttggccaggctggtctccatctcttgacctcgtgatctgccctcctcggcctcccaaagtgctgggattaaaggtgtgagccaccgcgcctggctgttttgcttttttaatggtgcctatctttataatcatttctgggataaacagccattgataatcaagtttataatcccttcactttatcctatcttgattctcagtttggcaattgggaaggataatctgtaccttctctttgcctcgggtggtaaggatattccagcactgtgccagttttatttaaaaaaaaaagtattcttcatttgtctttttgaacctcttacctgctttctttcccacagtattggattcatttttgaagaaaaattatgattctctctagtcataattgttgcaataatagtttgtatttgttcaaattgtatagttgtatatggctttaacatataagtgctttcatgtatttttgttcatttggttctcacaataaagcatttagattagtaaatgttgtaatataaattttgggtatctacaagtatttttgaatttattttatcatataactggtaacaatttacatttgcattttactttataggtttgaaagtacctctattaattacttcattattcaataataatggttaatcctgtaggggaagaaaaagacttttcctctactttcttaggttctgcagttgggacctgctaattaaattgacagattaacaggagaaaaggcatataaactttatttgatgctaatattttaatttttatgtacatggaagcctttatagaaaaggattgaagacctgagaaactgtttaacctggggtcttatataacattttaacaatgggcagtaaattgtggagaagcaacaagaaaaaggaaaaggtatctgggcttctaggggcaacaaattgtgagaaggtaaatatatggggcaaactaatggaagatagaagttattttagtaggtagagtttgtttgtgcagacccatctcagtgctgacctgtctccagtgataagggttgttgtcctgtgtgggagagggaatggaaaacatcatcacaaagggaaaaatttattcttgcttttaggcagatagggagaggacaaagagttctttctgtgtttgctgcttcccaatggccttcagctcaaaataatccttatgctgaagtggcatattttggagtggcatattctgatccccttctgtccaaagttcaaaaaatagccataattttattaccataacaaccactatcatctcttgtctgcttttaagcaaagtaaggcaacttaaaatctctttagcagatatcttatggaactatattgggattttgcaaatgtgtatcttttggttataggcgagagtatcttaatttgtaagaactctgagaaatcaaaaggcatagctctccttcagggttctctaaagcctgttcgcagctgtctgcaaagacgagaaggagaagaagtaactggcagcatgatacgagctattctggaggtaagagagaatttactaaattaccatttgctcttttatgcctaaattagtaaaatgttagtatatgaaaatcttagctttatttatttattt

SEQ ID NO: 30323 - DNA, 2300 bp, Homo sapien
gatcatagttcacctaataataaaaacagaatagctttgtaagagatttttctagtttagccttttcccagcaaaatgctgaatttaaattgggggctatattagaacatctaaatattttctctgaatagtatttattatgtgccggcactattctaagtactttacacatattgacttactcagtcctcaaaataaccaaataggttgttacaattattatctctatcatacagatgaggacatggaggcacaaaagggttacgctgtaatcccagcactttgggaggcggaggtggacgggtcatttgaggtcaggagttcgagaccagcttgaccaacatggtgaaaccctgtctgtactaaaaatacaaaaattagccaggtgtggtggtgcaggcctgtaatcccagctacttgggaggctgaggcaggagaaacgcttgaacctgggaggcagaggttgcagtcagcagagatcaagccactgcactccagcctgggcgacagagtgggacactccgtctcaaaacaaacaaacaaacaaaaaatgggttaagcaagttgcccaagatctcacagctactaagtttcaaacctagactgactgactccagagttgcactgttaacccttaagttacactgcatctgagaaagttctttcttggctgcaatctaggggtctctctctcttttttttttttttctttttttgagacggagtctttctttgtcgcacaggttggagtgcagtggtgcgatctcggctcactacaaccaccgcctcccaggttcaagcaattctcccgcctcagcctccagagtagctgggattacaggcacccgccatcatacccggctaattttttgtatttttgtagagacggggtttcaccatgttggccaggctggtctagagctcctgacctcaggtgatgcactcatctcggcctcccaaagtgctgggattacaggcgtgagccaccacggccggcgagatctcttttatttctttaatagtactcttcatttctgcccaagcatatggcacacttcattaactgacttgtttaatgtctgccttattctctagactctttctctttgagagcaggaaccattttatgccatttcactgccatttacccagtggctagcttacagtagatactcagtaaatagttgttgattgcgtaaaaggccaagagaaaaatgtttcattcacggagtaatgtcgccatctcgtggaactttagaatattgtcatttaaatcaaaaaaatgttttcacggaaggaattgatggttcgaatgctattttccagattgtattcgagtgttttttttttttttaattggactggaccttttgagatttttagtgctctagaactgcacagcctcttcaggtcaggcttagggcctactagttttgcttggtgaaatgaattatgcaactaggtaatgaatggtcaccgttttacgttcagaactcgttcgcttctacctttacaaaagggacaacacagatgcattactaagctcttggctcataacgatccctggggtatattcagagccccttcctcgcggcgttcatatagtgtctcaggggtctgtcagccagcaatccccaattcctcattacatattcctcacaatgcatgctggctaaaatggaaattgtgttcagaaatagccctgccctaccatcatatactaggagaaaggaggaaattatgctctattagaaaccctaggctatcttgcataatgcttctcaatctgaaataattttttacagaataccaatacgttaagaagagctacttccctgatctacctattatgggcagcccattttatgaagttagcatggccttcctattcaaaccagaaatggacaaaaggagaaggaaggcttttaggtcagtatggttataactgtagattctgtattcttcctctttaatctatctctcatattaaccaaccaggaggttggaggccggaagtcttagacgccagcgagagccgctccttccccacgagtctatggctttcgggttacttaagccacggagaactctatggttccggggcgggccgggaggtttgagtttgaagactggcgggaagatgtccgcagctgttgccaggccagggttctcccgagagggaggacgctgggactgtggcttgccctgatcggccgagaagagtttgccatgaatcttctgcgtcggagtgggaaacggcggcgttcagaatcaggctcagattcgttctcgggaagcgg

SEQ ID NO: 30324 - DNA, 2300 bp, Homo sapien
cttgtttttttttttttttttaaaaaaaacaagtactgagtataatacaatataaaacaatatgagagggtctctctcttcccaatatgagagggtctctctcttccctcagtgtgatcctggctcactgcaacctctacctcctagattcaagccattctcctgccttagccttccaagtagctgggaccacaggtgcaccactaggcctggctaatttttgtatttttagtagagatggggtttcaccatgttggccaggctggtctcgaactcctaacctcaaatgattcggcctgccttggcctcccaaagtgctgggattacaggtgtgagccactgcaccctgcctccttgaggaattatcacagacaaaattccaaggaacacgagtttagacacaatacagatggaaaatgcttctggtattttaatattagttattatgataactgttagcataaacatctttaatatttttgagaaatagccttctattctccattttcagagtttttctgaaaaaattagaaatgttgaacatttaaaataaattatatattttaaaatattctctaggcttttggtaggatgacataaaactttcaattcctttctaattatttttctgatttgatcatagttcacctaataataaaaacagaatagctttgtaagagatttttctagtttagccttttcccagcaaaatgctgaatttaaattgggggctatattagaacatctaaatattttctctgaatagtatttattatgtgccggcactattctaagtactttacacatattgacttactcagtcctcaaaataaccaaataggttgttacaattattatctctatcatacagatgaggacatggaggcacaaaagggttacgctgtaatcccagcactttgggaggcggaggtggacgggtcatttgaggtcaggagttcgagaccagcttgaccaacatggtgaaaccctgtctgtactaaaaatacaaaaattagccaggtgtggtggtgcaggcctgtaatcccagctacttgggaggctgaggcaggagaaacgcttgaacctgggaggcagaggttgcagtcagcagagatcaagccactgcactccagcctgggcgacagagtgggacactccgtctcaaaacaaacaaacaaacaaaaaatgggttaagcaagttgcccaagatctcacagctactaagtttcaaacctagactgactgactccagagttgcactgttaacccttaagttacactgcatctgagaaagttctttcttggctgcaatctaggggtctctctctcttttttttttttttctttttttgagacggagtctttctttgtcgcacaggttggagtgcagtggtgcgatctcggctcactacaaccaccgcctcccaggttcaagcaattctcccgcctcagcctccagagtagctgggattacaggcacccgccatcatacccggctaattttttgtatttttgtagagacggggtttcaccatgttggccaggctggtctagagctcctgacctcaggtgatgcactcatctcggcctcccaaagtgctgggattacaggcgtgagccaccacggccggcgagatctcttttatttctttaatagtactcttcatttctgcccaagcatatggcacacttcattaactgacttgtttaatgtctgccttattctctagactctttctctttgagagcaggaaccattttatgccatttcactgccatttacccagtggctagcttacagtagatactcagtaaatagttgttgattgcgtaaaaggccaagagaaaaatgtttcattcacggagtaatgtcgccatctcgtggaactttagaatattgtcatttaaatcaaaaaaatgttttcacggaaggaattgatggttcgaatgctattttccagattgtattcgagtgttttttttttttttaattggactggaccttttgagatttttagtgctctagaactgcacagcctcttcaggtcaggcttagggcctactagttttgcttggtgaaatgaattatgcaactaggtaatgaatggtcaccgttttacgttcagaactcgttcgcttctacctttacaaaagggacaacacagatgcattactaagctcttggctcataacgatccctggggtatattcagagccccttcctcgcggcgttcatatagtgtctcaggggtctgtcagccagcaatccccaattcctcattacatattcctcacaatgc

SEQ ID NO: 30325 - DNA, 2300 bp, Homo sapien
atatatgtgtgtatatatatagctgggacatggtggctagcgcctgtaatctcagctagtcaggaggctgaggcaggagaattgcttgaacctgggaggcagaggttgcagtgagccgagattgtgccactgcactccagcctgggtgacagagcaagactccatcttagaaaaataaaataaaataaaataaaagcaactagagagtagagaacaattacctgcaaaggaataaaagtttggatgttagcagacttctcaaataaatggcttctgtactcacctaacctattatgcaagaatgataacgtaataaagatattttagacaaagaaagtttgaaaatgtttacagttaaaagaactatttttgattctacatcagaaaaaataaaactgtgcccaaaagaaagaggatgaaagaagcaatgatgatcaaagtacttgataaacatatggttaaatctaaataaatatttatgacaaaaataataatgaccacttttaggaacataaaagcaaacttaggctggacgtagtgattcatgcctgtaatcccagcattttggggggccaaggcaggaggatcacttgggcccaggagttctagaccagcctgggcaacctagcaacaccccatctttacaaaaaaaaattttttttaattagctgggggtggtggtgcatatctgtagtcccagctactggggaggctgaagtgagagaatcattctagcccaggaggtcaaggctgcagtgagccatgatggcaccactgcagtccagcttgggtgacagagtgaataccatctctaaacaaagaataaagaaataaaaataatgtaactttaaatcttgcatataacttacataccatttgagagggggagaaaataaaaggcaaccattctaacagaaggctggaaaagttaaaaacacacaaagattgtaagaaattaggtagaaataagtagtgatccccccattatccatggggatacattccaggatcctcggtttcttcctatacgactgcattgtataggccaggtagcttatacagcatggatacactggacaaagggatgattcacatcctgggcggagcagtacagccaatttaaaatttgagcatttaaaaaaaaagggctggacacggtggcttacgcctgtaatcccagcactctgggaggccaaggcgggcggatcacttgaggtcagaagttcaagacagcctgatcaacatggtgaaaccccgtctctactaaaaaaaatacaaaaacagctggtgggttgcacatgcctctaatcgtagctacttgggaggctgaggcaggagaatcgcttgaaccggggaggtggatattgcagtgagccgagatgatgccattgcactccagcctgggcaacaagagtgaaactccgtctcaaaaagaaaagaaaagaaatgaaaactaacacattttttatttatggaagtttccatttaatatttttgggtggcagttgactgaaaccacagaaagcaaaactgtggataaggtgggattactgtgttcttatcctatcaaacataaatggattattccataagaaaattcttagatcagatcactattttaaagatacactcctaaaactttacttttatttttttgagatagggtcttgctgtctcgctctgttgcccagactggagtagactggtgcaattagggctcactgcagcctcaacctcccaggcccaagtgatccttccacctcagcctcccgaataactcagaccacaggcgtgtgttaccacgcctagaggaattttacacctaaaactttgaacaacgcaagtgtaaaagtaaaaaggtggttgcatcaaaaagcacaggagtcgccttgaagggttgtcaaaggtaggaagtttgagtataaaaaaagaataattactattttcagcaacagttacactatgctctaagcatacttatattgaatgaacaaatgaatgaatgaagggtgggacatcagggtgtgtctgggtggtgcaggggcaggaggaggtctgattgtataaaaattacatttaaatacagggtcttctgcatgaggacacactaaggaaactgcatttccagagagagacacaccacgtaggactgaaaatggttactctaaggggattcgtgacaggtaagcatgggggagcggggagggtagccagaatgtggggctttaagtgctcaaagaggatttgaaaaatcaaaggagcaatattaaaggatgcaaaccactcagcccattcacatt

SEQ ID NO: 30326 - DNA, 2300 bp, Homo sapien
aaacacaactcatttatgtttcatatacaccttatatacatagcctgaaggtaattgcacaatattttaagtaactctgtggatgaaacaaagtttcgagtgcgttttgactatgacccaccatatgaggccaagtgtggaactttcctcttgtggtgtcacatcagcactcaaataattttggattttaaagcattttggaattcagatttcagattggggatactcaacctgtaatacctcttctgaatatagacgcaaaaatcctcaataagatccttttgtagttcatgaatgtgatgattgggcattcacgtggatgtgtgagtgctaccctcgaagcttgtttcaacattggcacattatgcatctgacttgaaaaaacaaattctcaataaaatactaacaaactaaatttagcaacatataaaaaggatagataccatgaccaagtagggtttattcaggaatggaagattgattcaacataaaaaaattcatcaatgtaatacacgatattaatagaataaaggacaaaaaccacatgatcatcttgctgggcacagaaaaagcatttgatgaagatccacactctttcttgattcactcaacaaactagaacaaactatcaaactcctctccttcaacttgataaaggccatctacaaaaatccacaggtaacattgtacttattggtggaagactgaatgcttcccccctaagatcaggaacaagtgaagtgtggccactctcaccactcttgttaaacatagtgctggaagttctaggcagggaaaaacagcaagaaaaggaagttaaaggcatccaaatcgcaaagaaagaagttaaaatatttttgttaacagatggcatggtcttgaaaatcctaaggaatccacaagaaaactattagaactaataaaccagttcagcaaagtttcaagatacaagatcagtgtagaaattttttacaattttcaactgctatttgctcattccaaataagtttacctccaaggacatatatgtatgaagaatccaggggaaaggttaattcgatggctgttaatcacagccaaatttagcacatctgctgttagtcaaaatacattcaaatacattcaaataacagctggcattgtggagcacttggcatgtggtacatatcattcatgtgccttatgtgtactgacacagttacctgtggtcgcaccaagtatcatcgccatttcacaatggggaaaactgaaatagaaaatggttaagtaaatttgtcaaaatcacatacctaatcccagcactttgggaggctgaggtgggaggatcatgaggtcaggatttcgagaccagcgtgacaaacatggtgaaaccccgtctctgctaaaaatacaaaaattagccaggtatggtggtacgtgcctgtaatcccagatactcaggaggctgaggcaggagaatcacttgaagccaggaggtggaggttgcagtgagccgagatcacgccactgcactctatcctgggcaacagagcgagactctgtctcaaaaaaaaaaaaaagaaaaagaaaacaccaaagccgggattctatatttttttcactcacaagatcctgaatgagtttatctgaagatgataagataaagaacgctagactgagagttaaacaagctctctggggctttcctctggctcttccactaacgagatgtgtgaccttggatgagcaatttcccttttctgaatctctgtctcctcatctgtaaaaagagggagctggactaaatgacagctaaagcctcctacaacctctaattctctcacactggatttactctacacctggtatctgaattacaaactctcccttttccaggaaagatgaaaggaccaggggaggacagacacttacttgtcacgacaagagataggagaaactgaagcaggacaccatgtcatttgcacaagttgctgcttcagccagtgatgggtttaggtgaggagcatggttataattagagcagcagccagtcctgaaggctgtgccagcctccttcagcacagctgggcctgccgactgcacatgcaggaatctgagaggctgttctggccttgaaaatgatccttcttaaaaggattttcctccttcctcaagggaaagaaaacctattgatataaaacttcacttcccattcagtttcccctgctaaatgccactccagtagagactgagtgttgataaatacaggggaaggaaaaagtcgtaagctgagcctggtcacattgccccttgtgatatcg

SEQ ID NO: 30327 - DNA, 2300 bp, Homo sapien
atataatatatattatatatttttatttataaatatatataaaatatatataaatatataaaatatataaaaatataaataatatatttaatattatattattatatattaattataagatatattatatatatacttatatatagtatctgttatatataagtatatattatatataagtatataattaatatattatatattaatacaagtatataattaatatattatatattaatacattatatattatatacttatataattatttataaatatatttataaatatatattattaatatatgttacataattataagtaaatgtaaatatataaatttatattatgtatattttaatatattataattatatgatataacatatttatattataaatatatagtttattcataaatatatagtatataatatttaagtatatttaaaaattttgctaaaacacccagatacttttgttctagatcaaaatatatattttttgactcattcattggttcatgagttaaaactcattcaaaagtacagtagtcatttggtctaaaatataatgtccacatattatttgtatcaaatttttctgatctcaacacataagatatacatggcagaaaataagaaccaagatattagaactgctggcctgttgtagccccaaccacattgtaactcctagaccaagaagacagggagcacaagtggagaaggaaaaaatatgttttaaaattatttgctgcatttaaatgtttatgtattatgtctatgttgcaacttctctttattattttatttactgtgtatttagtgattttttttgtatacatgtcctacattacatggtgtataaagctcagagttcacttctgaactttgatggccatacaggagcaaagatctagaacaaaatcattggctctcctagtgaaatattccatcccggctatggcgtccggtcagtccccttggtctctcctccacactaccccacactacactctgttctgctgcacaatgctcttgtttcagctctttttgtttctggtttaaacactgctctgtctaccttgtctctatcccctggttcccagcccatcctatgggagtgttcagaatgaaggattcctaatggtattagagaagaacagggatgagcaggtctccagaaaaagtcatcttgctctcccatcgcgtattccttggcaccactgtcagaggctatagatctgacccagaatggaatttcttacatgcctacatcccactccatatctgtatttatttttttaaggtcatttttatcttttcactcactccatccttgatttttctcagagtgcagtgggccatgagtatgttgccgaggtggagaagcactcttctcagacggatgctgccaaaggctttgggggcaagtacggagttgagagggacagggcagacaaggtaagtgaccactctctctcccaaccacccacctccagtcctgtgaaaattgcccacgatcacccctggatggaggcacatgcttctttgttgaaagacaggacagtggatgctgtgaggacctgacaccgtcacagggatacctccctcagcaagttccttggtgccaatgttggaagccacatgctgagctgaaagacagtgattcaaataggagaagactctcaaactgtgtgtttgaatgaataattcctcaagccactggtttttattatactcatatgcatgaagatagaacagagaatcatctaagctcttcttttggcttaacatcaaaaccttataaatactcatgccgtttaggaaaacagattcatcagtttaaatattattgccatagcagcagataatcaagttaaacaactaattagggttactatttacagaatttagcatcaatctatgaagtccagatatctttaaagactcctttgtacaaaacaaaacaaaatgttgttttaaagagaaaaaaaagtaccgtatgattacagcatcatatcgttgacaggagagtaagattgataactcatcgatgtttttagttccacgccttattaggtcggattctttgaactcattttttatggtgcagaatggtgtctcctgccctgcagctgcacacagagagaggacagctccttcacagttagctgagattttttctttgtttttaccaacagttgttaattaggtggacatgcatccttaaagctaaggattggaagctaaggcagctaagttctagaaaattaattgtttgcatcatggggggta

SEQ ID NO: 30328 - DNA, 2300 bp, Homo sapien
atgaatgcagtgaggaaattctatcctaatactgaaccaaataagctgggccttagggcatgaaattgatgcaggtccatgcatggtcctgggagaactcttgtctggcacatagtgaaaacattaggcccctagggatccctctgggtgggaatgggagaagagaagcttaatagcatgtagcaggttagataggcattattatgttttgttttgttttgttgggttttttttgagaccgagtttcactctttcgctcaggctggagtgcagtggcacaatctcaactcactgcaccttccgccttccagtttcaagcgattctcctgcctcagtctcccaaatagctgggattacaggcacctgccaccatgcccggctaatctttgcacttttagtagagatggagtttcactgtgttggccagtctggtctcaaactcctgaccttgtgatccacccgcctcagcctcccaaagtgctgggattagaggtgtgagccaccgtgcccagctattatggatttttatattaagttgctgcttgagagaagatagctcactttctcaaagtacaataagtggtttaattgaaccaagtctgtctggcttcaaggcccattctttttctgtgtgatacacctcactacctcatcagtaatgaacttgtgacatttgctaaggaaagatgggacttcttggtgtcatctctgattaatttctatattttctctagagaactatgtacctggatggtgtgtcacatcatctagtctaaatcgtattttgacactacatgaggattccaagtgatttttctcttgtacaaacgtactcttccttatcataactttggtaccaccatgataaataggtaataaagtagaaggaataaataaagctcccccaggcatagaatccttagatttggaagtgacagaggcttcatattcctaatgcagaaaagtgcctgtatcatgggccagtttcatccagtcctgcttaaactccttggaggatgcaccgttgtgaacaaatcaagaagtccacaatcaagattaggaaaggctaggtcagatacaataacagacaccctcaaattctcagtagccaaaacaaaggactattttttagtgaaagactccaattcccccacatggtggatggggctccacttgtgttctttctcactcagggacccagtctgctggaggagccaatatggagaattgcaggttgccttgggcagtggtgaaagcatggcaaagcttgcagtggtcttacggcctccgccagaaagtggtatctgtcactggccaaaacaagtcacctgagtaagtctgacttcaagagggaagggaggggcagcaagtcttgacacgcagtaaaacaggataccacaaagaccttcttccatcagctgaccagcacctggttctttcagaattcttcctacgctctagagccaaatctttagtttgttagctcagactccacagtgccccaaacaagctaggaaactctccttccatgtcttgccttttccctcatgagttattctcttctggcattcaattggtcgacgtttatttgaacatctatatgaaaactccacttttaagtgctgtgggtaatataggggtgagtttctttttaagtcttatgcttcaaaacccacatataaatcacttttcccataaagcctttcttgatgaatacacccaataccaaatgctctgaattcctttactgtctcaaatgtaactgccaccctatttaggacacaatgctgttctacagcattctctaatgtgttttctggttgaatgtttgtttctctcactggattacaaactcagagtcaaagcagcattttctatgactgctctatgacccccattgtcaaaaccttgcaaaagaccaggcacagaaacatttaatccttttaaaatttaagtgtctaaagcagaaggaactgactcaaatttcaggaagtagctgtgaggatggggtggcaggaaatgacgaaaacctgaatacggaactgaagcagcagctcagtttctcactccgaagtggcagcagccagagagggagtcggtgtggacgcgaggagccgggcgcttagaacagaggcttgcacaggtggaggtgggtactctgagccatgggacagttgggaaacacagagtaagagttgaggaggaacctacctggctcttagtccttggtgatgggcaaggtcaccactagtaggcttttatccttttatggccagaaggcctggttgtgagtggttgta

SEQ ID NO: 30329 - DNA, 2300 bp, Homo sapien
tatatatatggatgttacataacaaaacatgttatgtatggatgttacataacaaaacaaaaatccatgtgtgtatatatatatgtatatatgtatatatgtatatatatgtgtatatatgtatatatgtatatatgtgtatatacgtatatatgtatatatatgtgtatatacgtatatatacgtatatgtctatatacgtatatatatacatatatacgtatatatatgtatatatatacatatatacacatggatgttatataacaaaacactacagcagtgttttgatggctaatgactgaaaatctaaatgtccatcaatggggacaggctaaatactatttttatatttttacaaaggactgctgtgtagccatggaaaggatgaggtagttttatacccatggatattgaaagtgcctaatatacagtactaaatggcaaaagcatgtgtattaggattccacttgtgggaaagacagaagggggtatatattatcatgtgctttattatgatcagaaagtttcttaaatataaccaagaaattatttacagtgcttacttctgggaagtggggaatggagatgggtagatcagtagatagaaaagaaaaagactttttttacattgtatccttctgtattaaatttccttttatcaaaagcatatagctgattttaaaatagcttaattaaaaatacagcaatatagagcttagtctccttttacataatggtttctaaccacagactggtatgtaatgatcagtggtattcctaatagtaattaacctagagaaattaatgaatgatttattttataaacaaggataaagtcaacatccctttaattaatccattaatcaaagggagaaaaagaaagggggcctataaaactcaagcagaaggttgaaaaaaatcttctaaagatcatgtttaagaaaggctgcatcccagagtctggatgccagaaatgccaacgaccttcttgaaaaacaaggaagtatctttacgtgattgtcaaattgggttgggaggtcccaaggtgtggacaaggctttttaaaaacttcattcttttacgtttatacttttgcatatttcatattatacacaacatatttacagtggtagtcatacactataaataattaaacacacaacatttggggagatgcatgctcaaaaatgttttactgatagggagtgcaattaaaaggtttggaagctgctgaggtagtaaaaaatattgatgcagtgaaaagaaaaacattaaatggtcattctgtggtcaagggatgagaagtaaaagctatgaagcagttaatgtacaatgcctgcaacttttgagtactcttcaactttttcctgcatctattccaaaaccaaatcctgccatttttccaataggatatttcctgagtttgccccttcataaccattctgaccatctaaatcttatcaattcacgcttttggaaaggcctctggcccttatgtaaagagccctccacttgcttgcatcttgcacagaactgtaaaaaggtcctttaaatgctcagacagcttccaactatctccaaaagtgaaagtacttacccatgattgtaaatatccctgtcccactctcaaactgtccgctccccatagaccaactggagctctttaaataagtcagacaaatatattcctcattcctcaaaggactcaccctccctttcacattccggttgtgcagattaaacatactccacaccatcaaaccaagttatttttcctcgagaactctcttagaggttcctttttctctaacagcctgcccacctctgattcctgggattttcgtgttgacgggatcgttgggatctttcctctcttctcatctttccagtaacccattagcattagcaggattattggacaggcctccgtttgcattaatatctccaatgattctgtgatctccgccctaaagacctttgatttcttttggtcgcgcctccccttcgggacaccaagtttgtttagggcctgagcacaggggcccagcaggttctttccgacgtcagcggctgcgtacggaggccgacttaggcaggccgctccaggaacaaggccgtgcggacaggactgacctaggcgcttttccccgtcgctcccagaggagaaacgtaccggggaggggacagaccgtgagcaagtggtccaagtctgcgcagggtgaccccgaaggcccaccggagaggccgaggcttgtgggctactagaactaggcctggtaggtgaaggaggcgggtga

SEQ ID NO: 30330 - DNA, 2300 bp, Homo sapien
gagtacaataggactctcagtgatggcttctattttctctaagatagaagcaagttcatctgctaggagtgtgaagtgtagacacggggttgggacttaaagaggatgttaaaggtttgaataattgtggcaaataggagaggaagctgaagacaagaaggatttgggagtgtgctgaagatggagttcagctggaaactgaatgtgcagtggtcaggacattgatgtcactgatgacattgtcctgatgtctcctgcagcattttgctccccaaaggtagaagtagagaccaatggttggactgatgcaggtttaggactttgctgggtggatacaatcagggatataagaatatgatgtattcattaagtactgcagcattcaaattctgtctctgcccctcaccatgtgaccttgtgcaaattatttaaccttctgaagtcttattgtctcacatttaagataaggataatcatatatactttattaatttaacagatattgagtgccctcctctatacttttctgggacctggagataaagctgagatcaaaattactaccttcctggagcttataatctaatgagaagagagataccagataaatgaaatatatagtactttagatggcaaaatgcttaggggaaaaagaagcaaagaagaagtatatagtgcatgcaggaaattgcaattttatttatgtttgtattgatacatatttgtacatatttatggggtgtggtagtttgatatatgcatacaatgtgtaatgatcaaatcagggtgtttaggatatctatcacctcaaacatttatcatttttgtgtttggaacatttctaatctcctagttattttgaaatatataacatattgttaactatagtcaccctactgtgctatcaaacacttgaacttattccttctatctacgtttgtacccattaaccaatctcttccctccctcccccaactccaccttcccagcctctggtacttatctctactccatgagatcaactttttaagctcccacatgagtgagaccatgggatatttgtctttctgtgccagacttatttcacttagaataatgacctccagttccgtaagatgggcagccaggaaaggccttacttagctgatgtttgaattgtgaagttatgtaatcattaagatgagtatacatacaatgggccagctgagtgcacagcaagattcaataaattcaaactaacattactcttattgccaagagagtgcctgaaatgacagctcattggaaactggctactttccttccctttccttaggggtttaaggaaagcatgagtgatttcagtcttttgctggagctcctcactgacactcattgcagagcctgagccctcaactctcaatctttgcttaggtcctggcttaggctccactttgtaagaggcaccttcctagtattcactactctctctctcacaatcatgtccttacagacattgctgatcctctttcatactgacaccgggttctagtccgagttccatcactaagtcgctgtttgactttgggcaagttacttctgtggttaattatttttcatcaacaaaatcaaaaggtgaaactagacgaacaactaagaggctccagtattttttcaatctaagagtcccatatcccccactcccttctcacagctcattcaacaatcctaatggcagcgggtgcccgcagtctcaagtctctgccgaagcccaagccgctgtctcggtcagtcacaaccgacgaagaggaggaattggaggaagccagcataaccacttcacactgagaacatctgacctttcccagaacgcccgcccactcgacacttcctgtccctccccagatcttgttccggggcacctactcgcgtctaatcactcccctcattcactctttagggtccattggctgtttctttgaggaagcggagcatcttctgtcgttgattggtttccgtcattgttgataggttggtaacaaacaaggtgtgcctggtctccctggtaacgtcctgccgatagtcctgattggtcggtgtcttaatcccatcttccgtcccaactgctagtggctgagtccctggcggggcgcggcggtggaaggtgtcgcgtacgggcttcccgagctgacgtggcttgaattgggaggggggcagctggagcctcaggcggcagcgcttctaggtgagtaggggacgctacccaactcttccctctgcgagtccaataacggtcacccccgccagaggggccgcgggag

SEQ ID NO: 30331 - DNA, 2300 bp, Homo sapien
agcttcatgagggcaacctacctatcccttagagatgattaaatgagttaatacatgaaagcaattggaacaattcctggcacatagtaagagctctccaaatggttattattaaagcccagttctaccatcatactacattttaagaccatctttgctggctgccttcttatatctttggttcacaactgtattcccagtggctagactagtacctggcacgtactaggatttgctaaatacaggttgaaagtatgagtaaatgcacaaacctcaggcattctgagcctcaatttcttgactttctgtttttctcttgttacaatagagaaagctcagatttatagttggaagcctctctaacgtaaaataggctcaaaacagtttgtgccctcctggctaccgtaataaaacatcactaaatcattattgtcatcaacaaatatgtgcagagcagtatggtagatgcaggggatgcaaagattctacacaagacatactctctgctattgttctggttgggaaagaaaagtatgtttatgtacatgtgtacacacacacagatacaaaaaaatatacttaagaatatcagatatatgttaaatgctaaatagatgacacagataagaatacaggccataaagtcagaggactgggcttctctgaaccatttttcttgctgtaaacaaaatagcaattcctacctcctagaatgattctatttagaagagaaggcagccaccaagatggtcttaaaatgtagtataagtgtagagctgggccttaaataaccatttggagacctcttatcatgctccaggaattgttctaattgctttcatgtattaactcatttaatcattccaacaactctaaggaacagatactattatttttttcccaatttgaacaatgagcatacttaaactctggagaatgtaattagctggcacaaagtcacactgttaagtataaagcaggggttcaaactagagccaccatctgccttaaagcatttaactacgatatgaaacagcttcggcacaccttcaaagggtaggatttacacagacaggttgaaggagacataaccacctaccccaaaatcaattgacaaatgtgcctaaggcagaaggtgagggagtgcagttggattgcgtaattaccctgaaaaaccacctgttatggaaaccatctgtaaactttctcgagtgtttctcctataattcaacacttctcccatctttacattaaattcatgaaatttgacacaaaaagacaattatttatctattttaaggctactaccctgttgccaggccaccgggtccggcccagccttgattcttcgggaatcacttctccctcgccgcgcctgttactgcctccacggatcactgtgaggaaaataaatgaaaaggaaattcagtgcgatcctgttgcggctgatcctaaatgtctgcagttgctatctccgaatcctctttctcctccccactacacatccccttctccagtcctaggaccacaagaaacttcctctggtacaaaaaggtcagaaaacgattactgaggtaacagcgtcgcttcaagtctaaggaccgagattctggggcctctgggctcctttactccagattctagacccggctttcgcgctaccaggccttggataagacactaggccctgtgcctggacactgcacctccccaggcctcagtttccacaccagatctctacagagtgggcgtgagggcaggccgattctcccgttaagagctcttacaagccggctgacttcgtccaggagcctggggtcctggcctcctggtaggcgccctggggccctctccctccccagccaccacctcagataagttacctcatcctcgcttcgcgttcttccactaaagaacctggggctcccacgccgcactacagcgccgcggccttccggggcagcgtgcgtcgcgacgcgggaaggggcctggaggcgggactaggagcctcggagtcaaggggcggagcgccctttgctaataagccaatcagaacgtgagacgctccggtggggcggtgcgcgtcgagcgcggggtggagtctgggtgacttggctggcgggatcaagtgcagctgcttcaggctgaggtggcagatagtgagcgctggtggcggagttaaagtcaaagcaggagagtaattatgaatagcgcagcgggattctcacacctagaccgtcgcgagcgggttctcaagttaggggagagtttcgagaagcagccgcgctgcgccttccaca

SEQ ID NO: 30332 - DNA, 2300 bp, Homo sapien
aacaataaaagaaaataaggactgaaaacttttctaatagttctgtcttccacaggactaagtgtgtattcaaacatgtatgtttgtttatttattattgtcattattgttgttttgcttatttttgtttattttcattctggtagctggatcatctgatcctctgactttcaagatactggcattttcagaacctttataaatgaaaggctgtgaaggacctgcaagattattttcaaaggcaattttttattcatttaaattgggatttgtgccctacataagagaatatatacccaaatcatatagaaatatattcttaagcaaatttttataatcttaagcccttgtaacttgaaaaattaatattaagactattgcatacctgagaaggaagagaaaaggagagagtagatactatttgagaaaaaggcatggaaaaaccagataaagacgcatatcacacttccggaaaatgggactgaagagagagaaactgcagagccagcacagcaccatctcatcgtggggagctctggatgagaaagtatatgataaagaagaataaacaagggacactgttgaagagtttctgttcacaaatatctcacccatttattctaccaattggatgttaattttgctttaaaaaaacccttttagtaaatatattcttgcagggttaaaaccagtggttcttcatacctttactttgagtaactataactaaattgtctacaacttaaataaacttttgggagaatgtatgctttaattagttgttttgattgaaccatggaacatttcagagtaaaaaccataaaggtctctaaacaacccgagaacagaatgactgagaaaggcggaatgatgagatattaaggaagggcaaggctggggaaaggaagtgaaaaaatacttacagttttaccacagaaaaatgagaagttataattcagtgatcttgaagtttccttcccgctctacaattctatgacagttgttatgcaaaaaacgaatgtcttacacataaaaacttatatgctatattttccttcctggaatctatatcatccaactgctaaagcaaaagagctcctttttctactccaacaacataaaagagaataatttattaaaactagttccagaggacataaagaaaaccaaagggtagaaatcatagggaggtaagcatcttccaaataaagaaattaataacacaccctcgaatactttgataatcagtatttgataactgagtgaaatctggggtccaaagagatatacagatcattgggatggttgagaatttctccctttgcaaagaacacaccaaataagaaccctcatctgccagaggtgagaaaaagtgatgaaaagagagaatattgccccaccagcctcaaggcattcaagttccccggcattcggtccttagtcccttcccatttgtcaccttattattttcctgtccacccctgcatcatccacctgtcacgtctgtctccacagtcacctctacagacttttttcacactttcccttcctgtctgctggtctcaacgctctctgtccagggtttacccacatttgctctactccgattccttccaccgaccccctaagactccgagcaggttagaggatcgcgctgcctcccccctccccgccccgtagtctccaacagtgtaaggggtactgtgggaacaaaacccagaggggtttgtgcctcttcacccccatcccgggaggctccccctctatccccggatggtcctcactcacagcgcacagtgtggaaggcgcagcgcggctgcttctcgaaactctcccctaacttgagaacccgctcgcgacggtctaggtgtgagaatcccgctgcgctattcataattactctcctgctttgactttaactccgccaccagcgctcactatctgccacctcagcctgaagcagctgcacttgatcccgccagccaagtcacccagactccaccccgcgctcgacgcgcaccgccccaccggagcgtctcacgttctgattggcttattagcaaagggcgctccgccccttgactccgaggctcctagtcccgcctccaggccccttcccgcgtcgcgacgcacgctgccccggaaggccgcggcgctgtagtgcggcgtgggagccccaggttctttagtggaagaacgcgaagcgaggatgaggtaacttatctgaggtggtggctggggagggagagggccccagggcgcctaccaggaggccaggaccccaggctcctggacgaagt

SEQ ID NO: 30333 - DNA, 2300 bp, Homo sapien
taattattaatgccacagtcagaaatgaagctggactcttctttgggtaaaggttggtgggagacagtagaaatgaggggtgtaatagaagctgagaagatatggtcaaagtctgagttaaagtttagagaggaaaagacagtttatcctggccctatttgtcaataaattatttgaatagttaaagtaaaaattttgtgagggatagagttataggttttctctcttgtattttcaaataaaataattcattctgatgttgcctgaccttgttgatttagtcttcatttttcttatttcttttatagctctctagcctttcttttcccttttcttttgacaaacaactagaggggcaccatgctcttttcttatccttttacttctttggcttgacaaaaataacacagcataaaatgcacctagcattatgatgtttgttcttgttcctcttctgataaggactaaatgtataattaaggaaaatggtgttcacaacagtacctagaaagtaactggttcacaatttttgctcaaattaaattttatttattaaatgaaagaatagattaatcttgaagtgagaaaatgaaaatataaggagtgactttagcaaagaagaacaatggttcccaaatgtatatcaccaatccttttctctcattttctttagccccacctctttaattgcttataggctatttctagctgaacttttatgatgttgaaaacaaaagtctccttccttccttcctttcttttcttttctttctttcctttctttcccttcttttctttctttctttcctttctttcccttcttttctttctttctttcaagtcttgctccgtcgcccaggctggagtgcagtggtggggtctcggctcactgcaacctctgcctcttgggttcaaacgattctcctgcctcagcctcctgagtagctgggactacaggcgcgtgccaccacacccagctaatttttgtatttttagtagagatggggtttcactatgttggccaggctaatcttgaactcctgagctgtgatcagcccacctcggcctcccaaagtgttgggattacaggcgtaagcctctgcacccagccaaaactcaccatctttcttatcttccaaactcagttttatgatgactttccttctccaatgcattttaatcctctgcattcctacattccatttatgtaacctccatacctgaataatgactgacactaactccacttttcccagctgtcatggcatagtgaaaattccagatctgccacttagtggacaggtactttgaacaaatttcttaacctctgggaacattactttctataaaatggggatagtaatatgaattagaataaatatatatgttatagatatacaacatagatgtaattcatatatattaacctttcaatagtagatgttcaataaattacagctattgttaccctgaaatcagtttttctttttttttttttttggaaatggagtttcgctcttgttgcccaggctggagtgcaatggtgcaatctcagctcaccgcaacctccgcctcccaggttcaagtgattcttctgccttagcctcctgagtagctgggattataggcgcccgccaccacacccagctaattttttttttgtatttttagtagagacggggtttcaccatgtgggccaggctgctgacctaaaacgatccgcctgcctgggccttccaaagtgctaggattatatgcgtgaaccaccgcgcctgaccatggaatcagtttttcaatctgtgctcgaggtgttgtgttcttaactatcttctactcctttgcaaagataatctttcttaaacatagactttctaatcagttctctagcattgtttcattctgtctttggcatgttttcactttgctgtgctgtacttttacacattctttttaactatagcttcctgctttgctctggatcaggaagctattgaagctgacacccacagagttaaactgagttgctgaagccaccagctccccctcccagtccttcttttcagagtaggctggcagctgtcctaactgcctactaaagccaaatgcttgaggagagagagagagtaaggagccagccatgaatcctttccagaaaaatgagtccaaggaaactcttttttcacctgtctccattgaagaggtaccacctcgaccacctagccctccaaagaagccatctccggtgagtccttagattcaatcctgcctctgagaggaatggcctccctcttttggctctc

SEQ ID NO: 30334 - DNA, 2300 bp, Homo sapien
ttatgtttggtttacagcaccagtatttcccaaaataagttctgtggagcatctgccctaaaccatatgtgagaaaaaagggttttgtggctgaatgactttgggggaatgctgagtgccatatttctttctatattcaaatgtacattaacactctaaggtttaatatgtcctgaaaaattgtttcatttagtttaatccagcatttcttgaattgacttaataatagagcccttttttcatatactgtgtattaacattccggggaactactgttcaacggaacaaacatgggagaaatgctggcttagatgaatattaaaatggcctttataccaaagcgggggctgaggggtatgggggggaggtatgggaaagacagggctcacatgtctttttagactggaattgagcacttgccgaagactattcacaaacccggaaactatgcaaatccctcaggatcacagacatccaaacatacacagtgttgctgggagcatgtacagggtctttagagggggttgagggacctgaccctcaaccctcacactgcagcttcctcctgctgctgctgctgctgctgctgctgtgctaggatccctccacggaagacctatgaggctcctaaacattttaccatctatctttggccacttacttcctgaatttactctctggaagagaagaggcccactggggaaaagagaagtcagatccaggagggaaccggaagaaggaaagacagggagaagagactgggttaagatcccgcatcagatctaggacaaggatgctcctctgggtagaggcgaaatgaaagatatcagcaacgcagggtaaggggccccctcacagcagagcagggcatgacatgcgctcaggagaaaaaatatcgacttctaaggttagtgaccagaatgggagcttcctgaaactgtgtttaatgaatttaatgaatttttattcatttatttttcttgaagaaaaatgtgatggctggtgggcttcctgccgtggaaggagagactgagattacatgctacgtggcctggtgcaaagagacctaaagtctttgcaaagcaaaaggtcaaaaccttgatctggcaaggtcaaaaccttggtgggggttgaggtctgtgagtggcttctcagtgacaatgaaggataagaaaaaataaaataaatatgtacctacttataatatttttataagaaaaaataaataaacattagaatattagaataaataatagaataaataaataaatatacctacttgaacagtgcctagctatggaaagctgcagcaggatttttttaaactcccataactttttatttttctataatattttacttttatagttgtagaaacttgagtcaacttctctagtttatctctaccttctagaaacaaatatttatttatttatttatttatttatttatttatttatttattttcgagaccgagtttcgctctgtcgcccaggctggagtgcagtggcgccatctccgctcacttcaacctccgcctcccaggttcaagtaactctcgggcctcagcgtcccgagtagctgagatttcaggggcgtgccaccacgcacggctgttttgtatttttattagacagggtttcgccatgtaggccaggctggtctcgaactcctgacctcggatgatccacccgcctcggcctcccaaagtgctgggattacaggcgtgagccactgcgcctggcctagatacgaatctttatttcctagaaaatctgaacagacattacgtgtaaacttcatattactgtgtttttagtaaaacaatgttttgcaagtatttataagggaatggaaatataacgcaggaaacacaccctagaaagttatatccacataattctagaaggagagggggatacatttgcaggggatgagatttcccgagaacttctggaggaaagtgggaatcttctccgtcagcggggtgggggacggtgtttcagcgagcaggaggcggcagcaggtagggaaggtggccgcagtcccccgggaggcgggggcggagcaggaaacggcggcgcgcggggcgggaggcggagccgtggggagcgccgcaggtggggacgagccgggcggcacctgccccgggaccagagcggacgctccctccccgctgcgccgagggaggggaaacccgaggggttccttggagaaggtggtgcgtcctggggcggcagctgaggaagaaagacgcagtgccccgaagcccctgagctgaaaagggccagaaagggggc

SEQ ID NO: 30335 - DNA, 2300 bp, Homo sapien
ttcaactcttttgcctactttttaattgtttgttgtttcttctgcaaagttgtaggagtttttttaatcatatattctggatatcaatccctaaacatttattgttttaaggaaataaattttgagataatttgttatacagcaatggataactaataaatactaaaaactcctaaatgtatatactaaatatattaattagaaaattgtaatataaaaatactaaaagctaaaactgtctgatattaggaagataattttactacaatatataccttttttgtgtgtatgagacaaggtctcattatgttgcccaagatgttctcaaactcctgggttcaagcaatcttcccacctcagcctcctgagtagccaggattacaggtatgtgccattacagccagctttcacagtgtatacttgatgtactattaatgtactatttaatgactactaaaaagtttatgataacaggagaaaatgcttatgctatcttaaataaaaatttgagtgtatgcattgataccaagaaatggaaatttgagtgtgtacactgctaccaagaaactgaaaaatgacatcccatacctttaatatttaatatttataacaaatgaggtttacatggatttttttatctcatcttatttctgatgtgttatgtagttataaatactattttatttgcactcctgctctgcaataattttgaagatagataacttatattattgctgtcttcattttttaaaattctcaaatccagatgaaattatcaaagttgataaaataatcattgttctatcttcttatttgaagattaataattgtgttgattttgcttccttgctctagttagcagtgatgtcatctgctatttttaaacttccttgaaataatatatgtaatctacttctaataagtttttcttatttagcattttggtctaaactaatttataattatttagccttatttctccatgtttaacttgctttaaagctcagcactggtgttttcagccatggcttctccattttaaggctattttaattcatttattattctggaatatatccttaaataatttatttaggaaggctgtcttggtggtggtatttctgttgcagttgttgttttcttgcctgcttggtgacatatttctattgacttgacacttaactggcatcttatctaggtagataatgctaattcaaaattctgcagatattgttctgttgttttttgccatttagggttgagtaagatgccaagttgttttttgtttctctgtagtcattctgttttcattttgtttttagctttgcctttggaatttaaaatgttcaaaatgatttgtctggatgagaatcgattttcataacttttgctttgatacactaaacagtttgagtttctagatgatgcccattttaattcatacgaggaaatatcttctagtatagtttctgcttgattaattctatgtttgtctcttagggacatctattaattttataatgctgcctttttttcagacttctgtttcagaatattcgctttcatcaatgtaatccttggctatagtaggaatgaaataataaaagcagtagcttctgtctgccctccttggttatgcagtccttacagaacatctccccatctcccatccccccaccccagctcagtgaaactctccacactttggttgtggaaattggcagggttaggtggctactcactcccaatccacatccacaataaatcactttttattatcttatcaaaatctgtagaatgcctctttattctattttgttgctgcggaggtttgttttctctttctaattattttattttctaggttttttgagggaatttcaagaggggagattttttattcaggctcatcttaacgtcatgtctggaactcaagctactgaattatatattctttaatacatatagacctacgtcaatgagtttaaactgcaaggaaagggttaaatttcttcctcaagtgtggtcaaaatctgtagagaaaagaggaacagcttctcttaaagaaagttagctgggtaggtatacagtcattgccgaggaaggcttgcacagggtgaaagctttgcttctctgctgctgtaacagggactagcacagacacacggatgagtggggtcatttccagatattaggtcacagcagaagcagccaaaatggatccccagtggtgagtaataattcttattctttgcagagaagttatgagttgtgactgcagtgaaaggctgaggttgaag

SEQ ID NO: 30336 - DNA, 2300 bp, Homo sapien
aataggaactgaaataagtagattaaagaagtgctatggaagggaaaacaataaaacaacttgttttttaagagcctactattgccaggatctgtgctaagcaccatatatatgccatgttatttaaccgtcatgacatgcctatgagatatttagtattacttctgtgaggaagccaaagctcagagaggttaaataactgccccaagaacacacaggcattaagtagtggagcagggtttgaacacaggtctctatgactccaaagtgcagtgtgatatgttatttttactgatctgtttatggaaaatgatactgctttctaatttagtattaacacaaagatttttttctaaatagatttacttaaagtatgttataaaaatactatataaataatgaaacagattttacatgagtatgaagtggtactagtagctagaatgatgaaagtttggggaatactactccaaatattttgatagctagcctttcaatttagcctgtcttatatttggactgctgagtacaaggaaaagaaggaaacatgaaaattaagtgaaatatgagttacttcccctgtgctctgataggtgggtaattgatcatatgtcacaataagaaaatcaaatgaaccctttcaaacaacagcaaaatctgtgattgtaaaatccagaggaaaaccccaggtgggatctatctgtatgaaggatgaaatttccaaggtctgaacatagaatggctgagaggaagtgatgaccctgtgagtcaagaccctggaccctgggggagccctgtgggtttgagaagccctgggtgaaaggtgaagggttttacaggcctgtttacagacctctgtagtgacagaagggagatctttgtgcaaaggtcaaagtaagaattgggaaagtctgaaaagaaaacaggaaagtaataatgaagatgaaataactacttggcatactctgccacatgatttacaggcaaggtttcctttgtttttcacaacaatgcagcaaagaagtgattatgagtcacatttcataagtgagaagactgacattcaaacatgttcaataactggcccagggtccagtggtcaagccaggactggacttcggaccaccagttccaaacccacaccccttcccttgcaccacacgcttttgtgtggatgagcctccccaaccctgtcaacaacaaactgtcactttgtcacttttaatgtctcctgcttcacaggacacagctagcctccaagagatcagggaggcatgcccagagggtgctgcttctctcttttgaagctcaagtgccacagacctcagaggcacataaatgtcccccacactgagcagaggactttgcagtgcctgatcagggcagaaaaaggaggcatgcacctgggggaggatcacatacgagtgaaacctgtccccgctgaagcactaggtttggagaaatctactgggcatttacacacctttcccacttctgcttatgacttgtagccaaactcaagagtaccacccacttccaggaatagtgtaccaaggtaacagaaacattctagattcatacaattggggttagattaggatcatctgaaaatgaaggttgtgtatgtcaattgccttctaacaggatgggtggagagatgtacttaatgaatgattttggggaagggctagaagtgaagcacatggcctctctgccctcactcattgaaggctgtcttctgaagccccgtggagctcagtgcctgtcacatggttgcccacatttgttgaactgaactgcattttcatctatgggcttcaaaggctgtgtgtactctgggatctctgggaatctgtcagggaaggtgtctttgtcatgtttgtggatggggctccctttgggggtttcccagggctttacactcatgctccgagggtacgtttgtagtcattctcatcagtggaaatgcccacctgccggcagaagttatttggaaccaagcaagagcactgtccctggctgtggtgttgtttctctagtcagttcccctttctgtatttgagttctaccgtcagtcctggcattatttctctctctacaaggagccttaggaggtacggggagctcgcaaatactccttttggtttattcttaccaccttgcttctgtgttccttgggaatgctgctgtgcttatgcatctggtctctttttggagctacagtggacaggcatttgtgacaggtatgtttgtggaggctcagacgcctagggagtggcatgagataaagctgcaagctg

SEQ ID NO: 30337 - DNA, 2300 bp, Homo sapien
gtagtggattgaatggcagcctccaaaaagattgaatggctgacataaatggaaatgaagaagagacactaaaacactgactcaagaagcttaataaagcccaaacaacataaataaaaagaaatccatatctacacacattatcatgtaactttagaatttcaaagacaaagagaagattttaaaagaagccagaggccaggcgtggtggctcacacctgtaatcccaacatgttgggaggctgagacaggcagaacacgaagtcaagagatcaagatcatcctggccaacatggtgaaaccccatctctactaaaaatacaaaaattagctgggcgtggcagcgcatgcctgtagtcccagctacttgagaggctgaggcaggagagttgcttgaaacggggaggcagaggctgcagtgagccaagattgcaccactgcactccagcctgggtgacagagcgagactccatctcataaaaaaaaaaacagagggtggagccaagatggccgaataggaacagctccagtctacagctcccagcgtgagcaatgcagaagacgggtgatttctgcatttccaactgaggtaacgggttcatctcactggggagtgccggacagtgggtgcagtgcatcgtgcatgagccgaagcagggtgaggcattgcctgtcccgggaagtgcaaggggtcagggaattccctttcctagtcaaagaaaggggtgacagactgcacctggaaaattgggtcactcccaccctaatactgggcttttccaatgggcttaacaaacggcacaccaggagattatatcccgcacctggctcggagggtcctacacccacggagccttgctcattgctagctcagcagtctgagatcaaactgcaaggtggcagcgaggctgggggaggggtgcccaccattgcttagtcttgagtaggtaaacaaagtggccaggaagcttgaactaggtggagcccaccacagctcaaggaggcctgcctgcctctgtaggctccacctctggggcagggcacagacaaacaaaaagaccgcagtaacctctgcagacttaaatgtccctgtctgacagctttgaagagagtagtggttctcccagcatgcagcttgagatctgagaacgggcagactgcctcctcaactgggtccctgacccccgagtagcctaactgggaggcaccccccagtaggggcggactgacaccccacatggccgggtactcctctgagacaaaacttccagaggaacgatcaggcagcagcatttgcggttcaccaatatccactgttctgcagccatcgctgctgatacccaggcaaacagggtctggagtggacctccagtaaactccaacagacctgcagctgagagtcctgactgtgagaaggaaaaccagcaaacagaaaggacatccacaccaaaaaacccatccctatgtcaccatcatcaaagaccacaagtagatacaatcacaaagacggggaaaaaaacagagcagaaaaaccggaaactaaaaatcagagcacctctcctcctccaaaggaatgcagctcctcaccagcaatggaacaaagctggacagagaatgactttgacgagctgagagaggaaggcttcagaagatcaaactactccaagctgaaggaggaagttcgaaccaatgtcaaagaagttaaaaactttgaaaaaaaaattagacgaatggataactagaataattaatgcacagaagtccttaaaggacctgatggagctgaaaaccacggcacgagaactacgtgacgaatgcacaagcctcagtaaccgatgcgatcaactggaagaaagggtatcagcgatggaagatgaaatgaatgaaatgaagtgtgaagagaagtttagagaaaaaagaataaaaagaaacaaacaaagcctccaagaaatatgggactatgtgaaaagaccaaatctacgtctaattggtgtacctgaaagtgacggggagaatggaaccaagttggaaaacactctgcaagatattatccaggagaacgtccccaatctagcaaagcaggccaacattcaaattcaggaaatacagagaacgccacaaagatactcctcgagaagagcaactccaagacacataatgtcagattcaccaaagttgaaatgaaggaaaaaatgttaagggcagccaaagagaaaggtcgggttacccacaaagggaagcccatcagactaacagctgatctcttggcagaaactctacaagccagaagagagtggggg

SEQ ID NO: 30338 - DNA, 2300 bp, Homo sapien
tattgttctgagcttacttggaaccctttttttggatctgtccaaaaggagtgaatgtaacttgctccaaaatctgtgtttctagaggttagatacctgagaagccctgctgtcaagaatcccagattctcctggttggcaggaactttaaagcttctagccacagcgtttgagctcccaaggctgtccttcagcatcttcccaggcagccctgattcattgtggactgaaacctttctgtcattccttctatccactggtcataatagagtatgggcttgtatttccaaaatttaaacatcactggtcctattagttcttttagatctttctttcaagttgctcatttttctcatataagaaaatttaccttaaatggaaaccacatcactttgtcagtggaaaactatgtcaattggaacttaactgcataaggaataataacagatggaagagaaaacaatgatattaaattctacttaggagctgttgcctagcaaaggttctgagtgagaggcaacctctgtctttgttaaaacaggagattagcaagtgttacagaggggtgcaaagacaaatactacaaaaatgatactccttccttgacataatccataggaacaaaagaagtaaaaagggcatatcttttttcaccttgtgatccactgttatctaattgtattgtctgtgtaccacccaataccatgcttccaatctctactggaagatgtacacactgggacacactggtaaagtgatcaagcaccaggactgtaagtcaagctgatcaggttcagctcttggctctgccaactcctagccacccaaccctaaatacctgaaactgtatgcatcagtttcttcgtctttaaaatggaagcaataatagatcttcagagtaatactttcttaaagatagtgcccaaatttggacattatgcccaggtgtaatccgaccagtgaagagcatcagttcagcctaagattgcagcctcattcgggttttgaactgaactcgttcagcctttgggtgttcacaaagctgtgcttgtagccaactaaaataaaatctaaggtattttgataggcaccactactgagccacatcctccattacttacattgctgggtgtttcggcctgagggaggacttcacatttattcctattaaccagattttgcccccttcactggtgctttagcatttgctcagctccttctcctaccctgtatttgagggaaaggaagccaaatgggcagaacttggccataatgaggatgtgtttgacatgctggatttgagtctgtgttccattgaagaaaagaaatggaaactttgttgagtatccattctatacagggcactttccttgactatttcatttaacactccaaggaccccctgaggtagatgttatcgccattttgcagagaagaaatctgcatttttatttgaagttcttaaacatggtaaacgacccaattttctgctttttgcttaacagtattttgcaaacattttatcatgttacttcatgttttcctattttttttttgctttataaataaatacatactccctccttattctaaaaagaatttgaagcacttctgtcttgatgtttatcattttaatggttgtataatgtcccattaagtcaccctaatttattcaacaaatttcctactgttgacagtttggctctgtttgctttttgtggtttttaaaattattttctgtaacaaatgatcctgctaaaaaaaaaatctccgcacgaatattattttgttctggaaatttccgcaagggtggaatactgcattaaaggggataatatttttggtgtttctttatagagcctagcaaattgcccacccaaaggagtatgctttatttgagagtaaaaagccaaaaacaaacaaacacatacaaaaaaactggttttctacaaaagaaattaattttccacttattcataaaatattctagtgctgtgatgggtggcaggcaccgtgccaggggctagggacaaggataagcaaggccaggtccgggcctccaagcagcgcgctgtggagtcgggtagagtagaccaagtgcaacaggcacctggctgcagccaggaaggaccgcacgccctttcgcgcaggagagtggaaggagggagctgtttgccagcaccgaggtcttgcggcacaggcaacgcttgacctgagtcttgcagaatgagtaagagtttgggcacgcgatttgtatttattttactgtgaatctctggccttatatcagaaaaaaaaaa

SEQ ID NO: 30339 - DNA, 2300 bp, Homo sapien
caccttgtgatccactgttatctaattgtattgtctgtgtaccacccaataccatgcttccaatctctactggaagatgtacacactgggacacactggtaaagtgatcaagcaccaggactgtaagtcaagctgatcaggttcagctcttggctctgccaactcctagccacccaaccctaaatacctgaaactgtatgcatcagtttcttcgtctttaaaatggaagcaataatagatcttcagagtaatactttcttaaagatagtgcccaaatttggacattatgcccaggtgtaatccgaccagtgaagagcatcagttcagcctaagattgcagcctcattcgggttttgaactgaactcgttcagcctttgggtgttcacaaagctgtgcttgtagccaactaaaataaaatctaaggtattttgataggcaccactactgagccacatcctccattacttacattgctgggtgtttcggcctgagggaggacttcacatttattcctattaaccagattttgcccccttcactggtgctttagcatttgctcagctccttctcctaccctgtatttgagggaaaggaagccaaatgggcagaacttggccataatgaggatgtgtttgacatgctggatttgagtctgtgttccattgaagaaaagaaatggaaactttgttgagtatccattctatacagggcactttccttgactatttcatttaacactccaaggaccccctgaggtagatgttatcgccattttgcagagaagaaatctgcatttttatttgaagttcttaaacatggtaaacgacccaattttctgctttttgcttaacagtattttgcaaacattttatcatgttacttcatgttttcctattttttttttgctttataaataaatacatactccctccttattctaaaaagaatttgaagcacttctgtcttgatgtttatcattttaatggttgtataatgtcccattaagtcaccctaatttattcaacaaatttcctactgttgacagtttggctctgtttgctttttgtggtttttaaaattattttctgtaacaaatgatcctgctaaaaaaaaaatctccgcacgaatattattttgttctggaaatttccgcaagggtggaatactgcattaaaggggataatatttttggtgtttctttatagagcctagcaaattgcccacccaaaggagtatgctttatttgagagtaaaaagccaaaaacaaacaaacacatacaaaaaaactggttttctacaaaagaaattaattttccacttattcataaaatattctagtgctgtgatgggtggcaggcaccgtgccaggggctagggacaaggataagcaaggccaggtccgggcctccaagcagcgcgctgtggagtcgggtagagtagaccaagtgcaacaggcacctggctgcagccaggaaggaccgcacgccctttcgcgcaggagagtggaaggagggagctgtttgccagcaccgaggtcttgcggcacaggcaacgcttgacctgagtcttgcagaatgagtaagagtttgggcacgcgatttgtatttattttactgtgaatctctggccttatatcagaaaaaaaaaaattgtgccaccctcggcacagagaacgttggtggcgtcgtaagcgccctaagcttctttccatcgccaaggagtaggggtcagggaagaggacagcgggaacaggatttgagagccgggaacccctggctcggcacgggagagggcaggagaggacctaagcgcggggctcgccgtctgctggggacccgagccggcctgtggccctcggggaaccgaagacgcgccctcagcgaccctgaagagtcagctaagctctctgcgggctaaggagacggtgaaggaaccgggactaactggggtaggggttagaaggcagcccgcgagtgggctacgaggggagctgggctcggcagttggggaccccgagggggcaagcgggcggggagcaggagaggggcggagctccggggccggggccggggccgcagcggccgcccagagggtctgcgggggctgctgtggccggacccgaaggcgggcgccgggagcgcagcgagccagacgcgcctctccaagaccgtgaccttggcatagggagcggggctgcgcgcagtcctgagatcagaccagagctcatcctcgtggagacccacggccgaggggccggagctgcctctgtgcgagggagccctggccgcggcgcaggtag

SEQ ID NO: 30340 - DNA, 2300 bp, Homo sapien
ccctagaaagagaagggtagacttgtggtttaccatatctcttaccactggggagattcaataaggatggcctggactaggatgtcagcagacaactaaaaatgggcttcaggcttggaaaaacgtcaggggccttaatatgaaaggacttgacttggggaggtcacatgaagatgagtagaaccagtggcctatgaaagctgagccaaagtcttcagatgacctgtggcctcttgagggagcaccttgtcatccacattcgctgttcttcttaatccacagggtaaaggcattctatggagagatacttgtgtagcaccccttagtttagcctgtaagacactcacttagctccaagagtttgccaagcacccaccaaacatcattataaagaaacaagcacctccctgtattgtgatatagaacagtctccaaaatatattgttaggaataaaacaaaaagtataataatttatgtaggataccatttttataaaagaaaacctatatagatgaatatgtatctatgtgtgtgtgtgcgtgtgtgtgtagccaattttttttttttttttttttttgagacacagtattgctctgtcaccaggctggagtgcagtggcgcgatcttggctcactgcaacctctgcctcccaggttcaagcgattgtcctgcctcagcctcctgagcagctgggactacaggcgcacgcaaccacgcccagctaatttttgtatttttagtagagatggggtttcaccatgttggccaggatggtctcaatctcttgaccttgtgatccacccacctcggcttcccaaagtgctgggatcacaggcgtgagtcaccgtgcccagcctccaattatttttatatttgtatgtgtaaagaatgtctctgaaggatacagaagaagttggtgccaataattgtctctggagagtagaagggtgtctgaggaattaagtgagtgaataattccttatattgtaaagcctggttccttccaaacatttttatcctgtgtatgtattatatattcccaaaattgaataaaataatatacataaatattcacacaatgtggccattttgcttctagataagttgtctgcagaagccctcactcatgtaaaaaggagaaaaaatgcaacgttgtttgtaagaatgaaacaccagaaacaacgaaaatcgtcatcaatagagaaatgagtatgtaaaatatgaactagaatatagcaattagataggtagactaaatagataggtctagcataaaatagcatatcacagttaaaggaaatgaacaggattgatctatctgtggattgatctatgtgtatatcaacatagaaaggctcaaaaacatgttgaatagaaaaaggaacataacatagaatatatttagcatacaatttaagtgaaattttaaagacacaccaagtaagacatattttaattttaaagacacacatataaaaatggcctggaaggatattaattcaccatgtactttgccttctggaaggcaaggttgcgtggggtgtggggcttcctccatatctgtaatattttatttcctaaaaataactacaaaaataaaaaacagcaagcaaatatgacaaaagggttaaaagttttaattctgagtgatagaaatatagatgtttgttattttattctttgtgttttaccgtatgttaaacatttccagatatttaaataagagtaaagaagacacatccagccaaggtcctccagatagatccttttgctttctttctaaagtcaagtaaattctaaactaaccttgacattattagtaagttttgctttaaaaaaaataaaattttgtgttagaagttttaaaacatttggaaattctagttgcggcttcagatttcataattcagatgatgcaacaggatggaaccattgtcaaagagaatgcagggacgtttgatgcttgttaggacatgactcctgtacttgcccatttgttcatcctccaacccctctttcttccaaattccatgtagcatattctctccaggaagcaagaagacttgcctggcggcatactcattttccccatgcctctttgctgtttgtggaaaataaagcattctataggcggagctagtgaacgcctcttttaaaacacgagtctccacacttccctgttcactttggttccagcatcctgtccagcaaagaagcaatcagccaaaatgatacctggaggcttatctgaggccaaacccgccactccagaaatccaggagattgttgataaggtgag

SEQ ID NO: 30341 - DNA, 2300 bp, Homo sapien
aatgggattctaggcactcgattttaaacactcttttctggattttatttcaatttggaaataggatattttacagaagtactaaatctaatttttataatgaaaaaataagagttgcaaaaattttaaacactttaggccgggcgtggtgactcacgcctgtaatcccaacactttgggaggacgaggcaagaggattatttggtgagacactctcgctacaaaatttcttttaaaaaattacccgggcgtggtgacacgtgcctgtagtcctagctacagggaggctgaggcagtattcaagaataccactaccttcaaaccgttcaaagtacaaagcttactacagataggtcaatttttcagtatcttgggttagttaataatgcaatacatatttaagatcatgattttggaattcaactttgtaactaaacagaagcacatttatgactgaattggaacagataactttaatggcaacttggtcaaaaccagatccctattcttgcattcaggtgttaataattagccctaggtctctgatatttgaacataaaaaggcaaaacctctaaatattacatcttctctaatgggcaatgacactagagcaggtactataattaatcctccctccaagcttccatacgtcctgtcccacaaaaatagtaaattgcaccaagtatgttttatcaactaaatagctcttctgcaccttcttctctcccacaaaaactctacttacaaaagtaggagaggaatggcagaagctggaaactgagttcagggaactgctacaagattgttacaatccttatccacgcatcccgagctttaccacagcagattacccagagcttcccagacaaggccggagagccgcggagagaactatgacccccctcctccctcctcctacagagcagcctcgctccctaaggccaaacccgcgccccccatgacctccaatggctcgagaaaagagctttgaattgcccgctttttccaaagctggttcatactccctcgcaaagcagggaatagggtctggggacaaaaggaggcacatgcctgccacatgaggaaaaccccatcacctggaactcggcgaactcctcacagttcacaccgccactgggcgccgccatattggacaaacacgaggaccccgctgcaggccaatcaccgcggagcaaaggtgaccgcggagtcgcctgacaaaaaatatagtacgaggggaatccttaggaaagctgagtgcaaggcttgagttcaacgtggtccgcatccacctcggaacctgtcaccctgctgtcccaacccttttaacatgtcctcctggaactgggccagatacatggatcaaagattgtcagaccttgaagggactgtttactccaatcccatcttttcacaaaagggaaacaatttccttgtggttcccctaccaggtcgttgaaggaaatctaggcaagtgaggcctttctaatacctctcactccagtgcctaacctcctccccggaccctggagcaggggggtctttgttaagaatttgggaccactaagaaacgtcaagaaaaaacggcatttctggcagtgtgggtgggtatgagtaaagtgtttaggatggagatgatcaaatgtttttagaaaataggtaaatagaaaacaaattgaaaacatacatgttaatttctcagattagcctgagggatgctccaacaagagatagggccactgagcagagtccaattatgtgttttctgataaaagcatatgttcattgaaaacactggaagagcggcatactggaatactggtttatctggtgtatttcgggagtttacagatcacgaaagttgcacatttcctttctatttcacacaggtactcccatgggtacatatccgctagggcaagggcccacggcgccacactccacaggaccatctccgaggctggctcaggatgcggcgccaggggcactaggctggcgccgcgggtctccagcgcgtggcgcacgtcctacacgccccgcactggcgcaggcctgtacaccgcgtcgcgcacgccccgccccccggcgccgcctgcgtccttcccactccaacgctgggtgacattgagctcaccagcgccaccgtccccggcgaagttctgcgctggtcggcggagtagcaagtggccatggggagcctcagcggtctgcgcctggcagcaggtgagacgccggtcgggatatgggaggtaggggagctggcccggccgctgcgggtgggggaatcctgaagccttcc

SEQ ID NO: 30342 - DNA, 2300 bp, Homo sapien
taatactctctagtttgagacatgttttccagtccattctctaccggaacactagataagctgtgtaaaggataatcttgaggtggggaaggttatgtatcaaacttgtgaaactatgcaacattcactctttttttttgcattacttcatttacattacaatatatatttatattatttgaatagccaagtttggggctatttttcctttaaaaatttaattaacaactttttaataatgtagtgtgtgccattgaacaaaagatctctggtacccagaaaagagtcaaaatgcaagccctctgatttctcaacccctactatgccaaggctctgctggttctcccaaaaaaaaagaattaagctttcattacctaagtccaaaatagtcatcacacaaatgtctaccaccaaaacaaactgcagatccttcaattacacacttcctccaagaaattcgaatcaattaattgtataagtgtttaaaagtaatgtatcctccattttaagaaaacaattattattaatctctaagacctaaatccttggcctaatcagacatttaatgagtggggaaacttcagactggaggttttctgggataaactccagagaggaaggagcagggggaagagggaagactcaaggagagcaatagataggggaggttagggtggaaagctgaatgcatgggtaaaggggaggtctagggatagtaggtgctttacagactgagctcaggggaggctgaggacgggggtggggagaagggtaggcgcgtgggcagttaagttggtgggagctgggtggatggagatgagggtaattcacgggcagtctccaatgcctatcagcagctgctcacctagttccctcccacatggctactaagtaggtaggattctgaggaaccgagaaagtgcgtcatggaatggagccactccggggcccaggaaggcttcaggattcccccacccgcagcggccgggccagctcccctacctcccatatcccgaccggcgtctcacctgctgccaggcgcagaccgctgaggctccccatggccacttgctactccgccgaccagcgcagaacttcgccggggacggtggcgctggtgagctcaatgtcacccagcgttggagtgggaaggacgcaggcggcgccggggggcggggcgtgcgcgacgcggtgtacaggcctgcgccagtgcggggcgtgtaggacgtgcgccacgcgctggagacccgcggcgccagcctagtgcccctggcgccgcatcctgagccagcctcggagatggtcctgtggagtgtggcgccgtgggcccttgccctagcggatatgtacccatgggagtacctgtgtgaaatagaaaggaaatgtgcaactttcgtgatctgtaaactcccgaaatacaccagataaaccagtattccagtatgccgctcttccagtgttttcaatgaacatatgcttttatcagaaaacacataattggactctgctcagtggccctatctcttgttggagcatccctcaggctaatctgagaaattaacatgtatgttttcaatttgttttctatttacctattttctaaaaacatttgatcatctccatcctaaacactttactcatacccacccacactgccagaaatgccgttttttcttgacgtttcttagtggtcccaaattcttaacaaagacccccctgctccagggtccggggaggaggttaggcactggagtgagaggtattagaaaggcctcacttgcctagatttccttcaacgacctggtaggggaaccacaaggaaattgtttcccttttgtgaaaagatgggattggagtaaacagtcccttcaaggtctgacaatctttgatccatgtatctggcccagttccaggaggacatgttaaaagggttgggacagcagggtgacaggttccgaggtggatgcggaccacgttgaactcaagccttgcactcagctttcctaaggattcccctcgtactatattttttgtcaggcgactccgcggtcacctttgctccgcggtgattggcctgcagcggggtcctcgtgtttgtccaatatggcggcgcccagtggcggtgtgaactgtgaggagttcgccgagttccaggtgatggggttttcctcatgtggcaggcatgtgcctccttttgtccccagaccctattccctgctttgcgagggagtatgaaccagctttggaaaaagcgggcaattcaaagctcttttctcgagccattggaggtcatggggggc

SEQ ID NO: 30343 - DNA, 2300 bp, Homo sapien
tgtggtgggctaaatatattccagcactaataccctatcctagccttcatgtcaagtgttcacgattcttaaattttactcttctagtgcatacaacagttactggaaaatgcagatttaaattatttgaaacaatgattaaattctgctcctgtgctccaaggggcttttacgttaccttttattgagttaataaaaatggaaatagttttcaattggtgcagtttctaaacttctcagcaaaaatcactaatccaggctaatgggaagagaaaagcagcagcagggtttagttagaactgaactttaagatatgctgaaggaaaaaaaatttctaaaagtgttaacaaggggaggtccatggagaccttaatagctaaaaaccgttgtaatttaatgtatagaaataaatactctaaaccattttagagtcttcattctcaggactacctcactgtgtttatacagttaatatgcactagctaagactaaagtatttgtccaattcttatttaaatttccccctagactggtagggtcttaaagtaatgatattttaactacagtcggtttattacaggtgacctaacggtgcctgttgtgccttataaaggccaagactttcaattatccctaataagtatacaataggatacccattgtttccaagtgcttttaaattcttgacgctgatgagacatttgcatcgtgaccagccaccagtaaaatcttttaagccacgttttttctgcttttcttgggcactctttttttttttttttttgagacggagtctcactgttgcccaggctggagtgcactggtggaatctcagcttactgcaccctccacctcctggttcatgccattctcccacctcagcctcctgagtagctgggactacaggcgtgcgccatcacgcgcagctaatttttgtatttttagcagtattggttgcgccatgttggtcaggctggtctcggacacccgacctaaagtgtcccgcccgactgggcctcccaaagtgctgggattacaggcgtgagtgctcggcctcgggcactctttactgagcaacaacaggttggagaaactagtagggcttccagttttttggtaaacctattgtttaaaagtctgcctggtcatcagattccagtcgtcttgtttctgcctcagatgataaaactctaaaattataggatgtgagatctggaaaatgtttgaaaacactaaaggggcacagtaattatgtctttcgttgcaacttcaatagcatgtatattttacacactttcatgaccattaatcatctcctaaaactggggaaagctctctaaaacctccttaagagtaaccttatccgttaccctattccaccaacctctttgtccttttctgtttcaagcaactttgagataccgacttctctatggaagcttaagccgtagatgctaaaacaaacgtttgctcgttactcccagcagagcaccggcttttaaaggacctcaacagacacgtttcttaacctttacgaaacttttccaggggaaacttaaaccaggaattttacaatctggcataaattctgtcacccgccccgtgactccatcgccacacatgccacctggctccacaccacaacaaacaggagggagcggaacccatgcaaagcaggagcttcccccgtttccggcgtctgggtggatctacgttagctgccgtttaggcagcttacgcgtcaggtgtgggcctaagcctgcagctaaggtaggcatccgcaaatctagtccttctctgtgacaatttccaaaaagaaatggtttttgaaacaacgatccactgcttcccacactatccagttaggtccgggacagaccctacccagctaatgcactcacccaagaaggcagtcgctttcgcatttgaagggcggggcgaaaaagaccggaaatgaacattggcgacttttttgcgcaggcgcagatggccgtctcccattggtcatctcggctcggtagtggtaggagggacttcctttgcacatgcgccaggctgcttttccggctttgttggagattgacgcggcagtgcacacctgctggtacgagcaaaagtagccgacaggccagagtttccagtttcggtggcttcgtaggcttttagcttctgaaatccgctaaaagcggcggttcattcatcttcaagtacctagcctgactggtagggctgctcagcattccgaaacatttcgacctggggaggggggcggcggtgaaagaatactttctgtagagagt

SEQ ID NO: 30344 - DNA, 2300 bp, Homo sapien
gtgatctaattgccatttttctggcattgccacacgcatattgtcagtaactttgtcagtctctggctgaagttattaatctgattgtctatgacatttccctcctatttgccttataagtttttattgagtgacatcatttataggatactgtattatcatgaatgaaagtgagactaagttggcaagtcaatcttcgtgaattcttgctagctcctacaggtacaaaattaaattctgcaggcctattgagaatcttgtaatgcaattccttaagatgatttacaacagacaagagcagttagacttaaaactcatgtacaggaaacaggctagaaggaagtataccagaacacttaacaatggtcttttgaggggttttttgccccctgctttttaggttttctaaaaagtggaggcagtaatttaatttttaagaatttttcccatcctttattctcatattgagacttgtcttcattgtgaaacatttcagactaccctgtcctcaaagtgataaacccaatttgacatttcatttgttttaggtagatttccagcatgagagatggtaaatggagggagggatgttaagaagttttgagctgttaagttcttgcattgaaatcaaaggattttttttttcttttattttatggggaaacagaacctaaccctcctattgatgaagttatcagcacaccaggagtagtggccaggtttgtggagttcctcaaacgaaaagagaattgtacactgcaggtgcgaataatttttatttattgcctcataacttaattccttttgaaaatttttattttgtacacaaatttgttactaatttttatctgtatgaagaattaagtttgtttataatgatattcctgacaactacattgcaagctgctttcatagctttgttaacatgtaggccttcgttatactctttattattattataatttttaatcatttaaaatgtttatgattgtggataatacttctctaatagggaaatgtttacagcagaggagccattacagccaggaacttatgtgtgggctacataaaatttggtgttgagggagttttagatgatacttggtggctttctcaggatggtgtaacatgggctagatcagagtcttattaattcccaaatctgttcctaattaattcttcctccaccccacaaaaagccgataaggagataactttgtcaggaatctgtgtacttattgctgtgtcaatttaggctttcagtactgtactatataagggattccaagaggaaattttgtaatctctggattcagaattttcttttttttttttttcttctttttcttgagacagagtcttgctctgtcgcccatgctggagtgcagtggcaagatctcagctcactgcaaattccatctcccagattcaagtgattctcctgcctcagcctcccatgaagctgggattacaggcagccaccaccatatccagctaattcttttatttttagtagagatgaggttttgccatgttggccaggctggtctcaaactcctgacctcaagtgatccacctgcttggcctcccaaagtgctgggattacaggtgtgagccactgctcccagccaagtattcaataattttcataagaaaagaaaccaacagtcagctgactctcatcctagaaattctaaactactattttttttccccctggataaagttgggtttttagaaactgatgattttttagtaaacttccctggagtaaccaactgagtcagtgcctttattagttacaaatacatgtgatccctaaattctcacctgtaggatctaatctcaaaggcttgggccctgagactatgcagctataaaaattggttaggtaccaagttgatcacaaaatgggattatctttctaagtaaatatttgccaaaaactagttaatcaaagatatcccccaccccttgtgtgctgttctttactctaaggctggagccatgtagacactggggcatttttgttaagtgatagctcctgtccccaggttccttactgtctacaccattatagattattcatacaacttgatgatttgccttgatgttttctctcctttcctcctatcccttctttctctttgttttacactctttgttgcggtgatgagttccttccagaggaaaaacaagaaatccagaaaaggtagagtacttcaatgtcacatcagtttttcttctccagtttgacacttaccagttcccatgctcatttgaattaaggttctgttttg

SEQ ID NO: 30345 - DNA, 2300 bp, Homo sapien
ggttaagtggaataaaaaactactactatgacaaaaaaatattgtcttttgcagaccgcttattaaaaatatttgaaggaaatgtacacttcctcaccccttttaaaaaagtcttatctctttcaacatgctaagcttaatggttttcttctgtaatgtgcttttttttttttttaagggctttcaccattctgctaccttcctgcatgtattctggtttgccagcatacctcttaaaaatgtgataactagaatccaatatttcagatgtgttgttattaatgtagggtatggtgagaggttaccttctttgccctaagagtgtctattttgataatgtagtccaaggtagctagttattttgatagtcatggcatagtaatattttattgaattttcagcaaactaaactccctagtgcttttgttcacgaactgttgttaggttttgtttgtgaagtcatgtagatttttaaaaattgccatttaaaaaacttagatgctgaactttgctttatttctgtttttttttgttgttgttgttgcctattctgacttattgttctttttctgtgttatttctgtaactcagcatattaactagtttattgtaatcatcaaatttgtttttttgtgcttacctgcgtggttaatataaatgttcaaccaggtaaatgacatgtcattagagtcctttccaaatgaacattgaaccattagtcacctctttcagtaaggccatcgacttgggtaagaatctccctagtagtattgtgatctaattgccatttttctggcattgccacacgcatattgtcagtaactttgtcagtctctggctgaagttattaatctgattgtctatgacatttccctcctatttgccttataagtttttattgagtgacatcatttataggatactgtattatcatgaatgaaagtgagactaagttggcaagtcaatcttcgtgaattcttgctagctcctacaggtacaaaattaaattctgcaggcctattgagaatcttgtaatgcaattccttaagatgatttacaacagacaagagcagttagacttaaaactcatgtacaggaaacaggctagaaggaagtataccagaacacttaacaatggtcttttgaggggttttttgccccctgctttttaggttttctaaaaagtggaggcagtaatttaatttttaagaatttttcccatcctttattctcatattgagacttgtcttcattgtgaaacatttcagactaccctgtcctcaaagtgataaacccaatttgacatttcatttgttttaggtagatttccagcatgagagatggtaaatggagggagggatgttaagaagttttgagctgttaagttcttgcattgaaatcaaaggattttttttttcttttattttatggggaaacagaacctaaccctcctattgatgaagttatcagcacaccaggagtagtggccaggtttgtggagttcctcaaacgaaaagagaattgtacactgcaggtgcgaataatttttatttattgcctcataacttaattccttttgaaaatttttattttgtacacaaatttgttactaatttttatctgtatgaagaattaagtttgtttataatgatattcctgacaactacattgcaagctgctttcatagctttgttaacatgtaggccttcgttatactctttattattattataatttttaatcatttaaaatgtttatgattgtggataatacttctctaatagggaaatgtttacagcagaggagccattacagccaggaacttatgtgtgggctacataaaatttggtgttgagggagttttagatgatacttggtggctttctcaggatggtgtaacatgggctagatcagagtcttattaattcccaaatctgttcctaattaattcttcctccaccccacaaaaagccgataaggagataactttgtcaggaatctgtgtacttattgctgtgtcaatttaggctttcagtactgtactatataagggattccaagaggaaattttgtaatctctggattcagaattttcttttttttttttttcttctttttcttgagacagagtcttgctctgtcgcccatgctggagtgcagtggcaagatctcagctcactgcaaattccatctcccagattcaagtgattctcctgcctcagcctcccatgaagctgggattacaggcagccaccaccatatccagctaattcttttatttttagtagagatgaggtttt

SEQ ID NO: 30346 - DNA, 2300 bp, Homo sapien
cagtctggaaagacagtcttatataatgaaacggaatcatgggagtgacattctatcacctttgccatattctgttggctagaagtaagtcaaaggtcccacctacactcaaggggtggagattatataggcaacaccagggaccagagattatgggggccatcttagatttctgcctgatacatatagtaaggttaaagatgcaatgtcctaggatctagcagtttccctatacacagtagagatgtacaagaatgttcacagcagcattgtttgtgacagtaaaaaatactgttctatactttcaaatttctcaaactataaaatgatattgtcagagagacagtagcttataaaacaccatgtatggtatgataacatttttgtaaaagtaacatacataggaattcaacttccagcaatggcctactgttgttttcaatcaacctttccactacagagaacaactgaacaaaatataaaaacgttaatgtactgaagagctaccaaggaagtgagaatttgtgagtgcaaggtctggaagaaaaaggaagccaccagaggttagcctgatatttgccatcatttttccaaagctaaggtgattgctgactctgaaagcagtggctgaaacagggagaagagcttatggctgtctcatggggcttagaaggcccaccaaagagaagaggccctagtaaataccccagacttttggatgggaccatcaaggactagctaggaataagggtgaaccggaaataaattagctttcccaaagactgaagaccggctctgaataatcagtcttagttccttattggaataaggtgatctgtcttcagtctagctgtggtcaggcaaacttgcccttaagtctctcctgttgaacacaccttccctttccccagcccccttgctcaaactcaactctgatcttagtaaacacaacatcagcgggagaatgctgatgcagcagagagaagtccaggacaaatgaacattgcataacctaggattcaggtagagtggtcctctctcctctcctcttccctgggacatttataaatgtattaatctacctcatctctttcaccttgcttcttggcatgtgttttaaatctgtctactattccgtgatccctgctaggctggcttcagtttttcttcttttgaagccactactccatttgctcccccaaagaattccatgaaatttaacattagcaatcatttgctccaagttttcgtttgagagcagttgagagtaaaacgagtatgtgtttcatgtagtttcattattattattattattattgttattattatttttgaggcagggtctcactccggttgcccaggctggagtgtagtggcgcgatctcggctcactgcagtctcaccgtcaaccccgggctcaggtgattctcccacctcagcctcccgagtagctgggacttcaggcgcccgtcaccaccccctgctaatttttgtgtttttagtagagacggggtttcgccatgttgcccaggctagtctcaaaactcctagcctcaagtgatccacccacctcggcctcccaaggtgctgggattacaggtgtgagccaccgcgcccggcccttaattatttttgatactacgcatacgttatcaagcaaaggggatgggagataactaaaaaaggaatgtccagaagcttcctgcattcatgctgcatgtgagccctttagacacgaggcgctgacctactaattttgtaatactccctcagccttcaatcattccatcattcattccatcaacgcgtattaggtacttagaagctatacagaggtgagcatcgatccgccctggaagagcttagcaaagacaggtttgtacatataactttctccaacctttgccatggtctgcaaacctccttcttagcgagaccccctccccgacccccgactcttcacaggctgggcgctaaccattaggaatgtccggcgagagagcgttacaagactacgtctcccggcagcctctgcgacaagcgccggaggggcgcgcgtaggcgctcgggccggcccccgcacgcaggcgcactgcgaacgccggctgagctgagtctcgctgctcggtgcgaggcggcggagagcgaggcctggtgagcaccgccgaggcgcgggccagctcttcgaggttgtgcgcgggagtggcacggcgggcgggcgagcgaggggctaacttcagcggtggcaccgggatcggttgccttgagcctggtgagtgctggggccttgcggccccggc

SEQ ID NO: 30347 - DNA, 2300 bp, Homo sapien
gaagagatggtcacagcaagctgtcttgagtcattgtatgccagctccagtatcccactgcgcctcacccacagctaactggtgagatggtggtgcatgacccaaggaagtagctcaccttctgataaaatgaataatcctgtccttcagatgaagttcatcagtttcccatgcagaggattatctctaagcccagataggtgccctgatcacctccctgaactatttctttttttaatttccttttttttgagacaggatgtcgctctgctgcctcggctggagtgcagtggtgtgatcataactccctgaagcctcagcctcccaggctcaagcaatcctcccatctcagcctcctgagtagttagacctacaggcatgcgccaccatgcctggctaatacttttattttttgtggaagtggggtctcactatgttgcccaggccaatctcaaactcctggactcaagtaatcctcccacctcagcctcccaaaattctgggattacagacgtgagccaccgtgcccagcccctgaactttatgaagcaccattttcatacaagaggaattaaccacatctagaaaagaaggttcattctctccaacatacaaacaaaaatatgcatgacagtttaagaaaaatggaaagatcaaccacggtctgagcgctcccccagggactaataataaaaatagtgccgtagggggccgggcttggtggctcatgcctgtaatcccagccctttgggaggctgagctgggcggatcacctgaggtcaggaattcgagaccagtctggccaacatggtgaaaccccagctctactaaaaatacaaaacttagaagggcatggtggtacgtgcctgtaatcccagctccttgggaggctgaggcaggagaatcacttgaaccagggagacggaggttgcagtgacccgagattgcaccactgcacgccagccagggccatctcaaaaaaaaaaaaaaagaaaaaaaaatacgtgtatatatatatgtgtgtgtgtgtgtatatatgtatgtgtatatatatgtgtgtatgtatatgtgtgtgtatgtgtgtgtgtgtatatatatatatatatatatatatatatatatatatatatatatagtgccatgtattgtgtctgtcaggcactgtgctgagaaggtgtcttatctccttctccccttaatcttttgatgaagccactgttgtcgtctccattttacaaatccaaaaacataacccagaggttaatatgcacacagctagttacatggccaaaccaagatcaaccttggtgtctgtctgccctcaaagccttgttctgaaccattaaacagaaacacagagaatgatacatctttcagttttgtaactcaaacaagaggattattttacacagtaatttacattaaaagtgaatgttgaccattccttcaggctcttttcagcattaacactacattatatccacatggaggtatgtgtgcagacataatgtatacatcttctaataagccttttaataagcatgtattttcttcctaaataagttgtagtgagataaatgcatttaatacacctaacctaccaaacattatagcttagcctatcctaccttaaacatgttcagaacacttatatttgcctatagttgggaaaaatcatctaacgcaagcctactttataaagtgttgcgtatctcatgtaacttattgaatacagtgtttactcttgtgatcacgtggctgactgagagcttggcttgctgccgccgcccagcatcatgaaagagcatcttactacatgtcaacagcctgggaaaagctcaagattaaaaattccaagtacagtttccactgaatgtatatcacttctgcaccatcaataaagcctaaaagtcctaaatcaaaccattgtaagtcaggaccatctatattgccaattgtatctactttgaacaaggaagacagtgaataccatggctccaaaagctaagtgagatgtgttatttctaatagacattatgttaatggatctgtgttgcaatatgcacaaatctttgtctatagactttcatataataacaattacaatagctaccatgtacttaatgtttactacaagccaggaacaattttaagcactctataggaattaacttacataaaacagattattttattattcaatttacagaccaagtttggtgtgtataccatttttaaatgaatttgtgttttattagttacctatagttttcttcttcagtgacatatccacagcttta

SEQ ID NO: 30348 - DNA, 2300 bp, Homo sapien
tacgagtttctattcattattaatgaaattttttagaatttaggatcttcaaagagtatttttcaaagctcttcagggaagtaaagatttaaattagtcatttaagaagaaggaatttaacaatgaatcctaccctttcttcccttttcaggcagatgtaattgttaattctgtaaacccacatgatattacagttggacctgtggcaaagtcaattctacaacaagcaggagttgaaatgaaatcggaatttcttgccacaaaggctaaacagtttcaacggtcccagttggtactggtcacaaaaggatttaacttgttctgtaaatatatataccatgtactgtggcattcagaatttcctaaacctcaggtaagtttaaaataaatgtggctttatttagctccatagtctatacagtcttttttttttaaacaaatttccatcatttcattacattcatgaaatattttgtcaagtggtatagttctcaatttttagcacacctgcgagtaccagaaatactgaacaggtacagttgccataagttatcttaagaagtttgatttaggtctgtcgcagtggctcatgcctgtgagtccagcgctttgggaggccaaggtgggaggatcacttgagcccaggagtctgagaccagcctaagcaacatagcaagacccccatctctaccaaaaagaaaaaaaaaattagccaggtgtggtggtgcacacctgtagtcccagctactcgggaggctgaggtaggaggatcacttgagcccaggagattgaggctgcagtgagctgtgatcacactgctgcactctagcctgggtgacagagactgtctcaaaaaacaaacaaaacaacaaagaagtttaaaatgttacctaacccatgtctaaattttaagtaggcatactgcagatagacactgaaactagtattccctcagtctgaacactggttcaccccaacatacccagtgacctcgttggccttttcctaagtaggcaagggattcagcctcttatgtccctccatgtgttatattcctggagcagctggggttccccctccagcatcattccaatcaaatctattacctgaggtctcttcccacccatgcctgcagtggagcctggctgtctagcccactctccactgaggcacataaaatacaagcattaacgaactcaggaggcaaaggttgcagtgagccgagatcgcgccactgccctctagcctggatgacagagtgagactctgtctcaaaaaataaaatataaaataaaataaaataaaagcattaaagaataggaggaacccactcagatggtgaaaagagggaaacttaatccccttctctgcctttgtctatctttcttcttcaccatttctggtcccttcttgagagctctctaatcccaaactggtcctctagtctccctctatccctcagttttccaaagtccttccatgggcaacattcctgtattactttgatgttaacagttggtagaaatttaaatctgccaaaaatattagcatttctccaagagaaattacatgatagatcttaatgatgttgaataagtgctgctttcttattttaatctcgatctcctttatgaaaattcaagggctcttgacgttgacctggaaggggcaggtgaatggggtaaacagatggttggctctctgacctggggggatgggtaaggctatataaactgggagaaattctagtgccctcatgtcctgaatagcacaagatggccactctattgcttcagtttctcaccatctaaccttataccataatgggttccctctggagtgggacctttcctgtcatctgaggaggcagggacacgaaccctgagggagggtgaaggtggacattgtaaaatatgggcaggatcaaggggtaagtggagtcttgttcttgactcaaatgctgatcttaaatttgtgttttcctgcagatattaaaacatgcaatgaaggagtgtttggaaaaatgcattgagcaaaatataacttccatttcctttcctgcccttgggactggaaacatggaaataaagaaggaaacagcagcagagattttgtttgatgaagttttaacatttgccaaagaccatgtaaaacaccagttaactgtaaaatttgtgatctttccaacagatttggagatatataaggtaagttaatatcttagaaatgtcctactgttcattcattcattcattcattcagcaacatctgtttagtatctacaatgtaagatgcagggg

SEQ ID NO: 30349 - DNA, 2300 bp, Homo sapien
cttttcttttctttttgagacggagtcttactctgtcgcccaggctgtggcgcgatcttggctcattggaagctccgcctcccgggttcacgccattctgctgcctcagcctccctagtagctgggactacaggcgcccaccaccacgcctggctaattttttttttttttgtattttttttagtagagacggggtttcaccatgttagccaggatggtctcgatctcctgacctcatgatccgcctgccttggcctcccaaagtgctgggattacaggcgtgagccaccgcgcccagccatcaatatactcttttcaaagatttaaatgtacctagtttgacattttattgtttgaataggtattacatttacatggttcaaatttagaaaatgtaaaaggtttcctcctgtctccgctgctaaattccctgtccagagtcaatcagcgcttctcctgtattcttccagtggcattttttacacgaaaggtagtagcttatacacacacttctgcatcttatttttcccacataatgtatcctagagatcttttcatgttagcacatagagagctttttcatttttcctactgcccattgtattccattgtatagatatactattattattaaactgctagtccccctatttatgggcattaaagagttccctatcttttgctattgtaaacaaggctgtaaagaacatctttgtacacaggtcacttcacacaggggctaatatatcaatgggacaaattcctagaaatggaactccagaaccaaaaagtatatgcagttgtaattctgacagtattgccaaattgttcacagtaaagacgggcccatttccagtcttaccagccatgtgcaaaaaccttatctcaggcctctctgccgccactcatccctgcttgtaaatgtgtcctccacacggttgtcagcaccatatttctaaaatgcaaatctggcaagtcattttcttgctttccctgcttaaagcccttcaggtcatcttcactgctcttcaaggcttttcaccatctaaatatgtcctgtccagggtggactatcagcctcacatagctactgaggctacatgtggccagtctgaatcgagatgtgatgtaagtataagaaaaacactgggttgcaaagacgtggtatgataaaaagaatgtaaaaatctcattacatgctgaaatgattaagttttggatatgtcaagctaaataacatcattacagttaatttcatctgtttctttatcctttaaaaatttcctaaaaatcattaaaattaatttcatctgtttctttatcctttaaaaaatatggctgcaaaaattttagaatgaacctactggctcccattgtatttctgctggacagtgcccatctaggtaggctctccctccttcatcccctcacccatctcctctcctcccaggccccaggcccactctgtgcttcagaccacagtggtccctaagcctcaggtgcttttccccccaatcctgtcctccccatctcgccgccacactcaatttattaagattctgcttgaaacttccccttggaggccttggagaagttttgctccttggttcacaggtccgcctcccctcaccagcccttgacatcagggccttgctctgctctttgggcagcaagaaacaattcagtgctgttggttaaatcaagcaatggaggagaaaagcccgcagaagcccgtctaaagggtagagttggagggagggaaggggtaacaggtcacaattaccagatgaacacattcaaattttcaaaaatgggtaagtttaacatggattcagaatgtgaattactttttaggatcaaataatagtggtaacagcagtaagagttacaaagaataagaaacacaggagaaacttactttctttgcatagtctactcacaagggaggcctggccctgggacccgggtccgcgcccgtcccccttctccccgcccacctcgagcctgcaggagaggggaccccgagggcccagaggcaccggacctactcacccggcaggccgctctcctcggtgcagacagcacagggaggagggggaagcggctctgccgggaacagggagggacctccagggaagcgaaactgaaactttgcgcccagtccgcagggcgggccgcgcctttaccgcccagctgcctcccggagcccccgcgccctcccgacgcgcagagccatggcctcccacctgcgcccgccgtccccgctcctcgtgcgggtgtacaagtccggcccccgagta

SEQ ID NO: 30350 - DNA, 2300 bp, Homo sapien
cagcctgggcgataaagtgagactctgtcttggggggaaaaaaagaagtaacaccacccccatcttccccttgcttgccctggcgctgtttctctccaaataaataaaatggttttatttattttgtttacttgcctactgtctttctgtgcatgacctggcccccagtataagctgcctgagagcaggggccttgtctgttatattcatctctgtgtccagtgcctaaaacagtgcctggctcccatgtacgtgcccagcacatgggtgttggatcaataatacatgaggctggtgactggagaggaggcgcaggcacagccagctccttctttcaatactcaccttttggagacaggaatccacagcattaggaatatgtccttcatgttgatgcatatcaccagacggtgtttctgcttgtgattgtgtcagtgaagaaatttgaggtctcgtgttcttctttattgaattttcagtgggtaccaggaaaatgggcacaggtttttcgtcaacaagtatttggtgctctccttttttcaacactctctccttagcttcagtggagacattaaacacacacatatacacacataaaaatgggagagatttcaagtaatcctctcattcctgtgtctgtactctgccccagcacctcccagtaaggctgctccctgcatcctggaatggtgggttggcgatggagaaagtcggggagctattaagagctctaaagtgtgcggattaagttttactatagaagtgaaagcttaatgacaatggaacattgtccaccgattaaacatcatgtttctaaaactgtctccagtctcccctttccttcttccttctttccctccctccctcccttccttccttctttttttttttttttttttttttagacggagtctcactctgtcacccaggctggagtgcaatggtaggacctcgtctcactgcaacctctctgcctcccgagttccagcgattctcctgcctcagcctccagagtagcttggattacaggtgcgcaccaccatgcccgggtaatttttgtattattagtagagacggaatttccccatgttggccaggctggtctcgaactcctggcctcaggtgatccaccaacctcggcctccaaagtgctaggattacaggcgtgagccaccgcacccggcccagtctcccatttcaatactcattatacaggtaagtgacaacagcaggaatcaaaagtgcagactccgaattttgtaaatatacatgtgtttgctggcattcataaaaaaaggcaggaaggaaatacaccaaatggtcacattgtttatcttcaggttgttttcttttttactcttttatttctatagtgagcatatatcacttttgtaatcctcaaaaacacaaaatggaacatccttttgttcatggatggaacaatggaaccattatttaaaacataaaagtggaatccctgaatgacaaggacagcagctggcaggcatctgggggaaggaagatgacagctgagaaattaagttagaatgaggatatggaaagcatccacactaaggcgccgtcagccagacccgcaccaggcacatgtgaggccccatcctccaccgagtgttcactgtctcagtgagtctcttggcagtagggccccgtccctgtccgccaccgcacagtgacatactttctcccgccctctcccctaggtcagctggaactgggtccgcctggaaacccgggggccgggcccccagagggctttcgcagcctggccgcccgaagctcacctgccctttcactgaactccacccggaaggtgcccggggcttcgtgttcctgggtgctgaccgtgcactccccgccgcccgaggacttagagctctggaagtagctctccagcttccttcgtactcgggggccggacttgtacacccgcacgaggagcggggacggcgggcgcaggtgggaggccatggctctgcgcgtcgggagggcgcgggggctccgggaggcagctgggcggtaaaggcgcggcccgccctgcggactgggcgcaaagtttcagtttcgcttccctggaggtccctccctgttcccggcagagccgcttccccctcctccctgtgctgtctgcaccgaggagagcggcctgccgggtgagtaggtccggtgcctctgggccctcggggtcccctctcctgcaggctcgaggtgggcggggagaagggggacgggcgcggacccgggtcccagggccaggcctcccttgtgagtagactatgcaa

SEQ ID NO: 30351 - DNA, 2300 bp, Homo sapien
ttagaagtagcaccaggccaggtgcagtaattcatgactgtaatcccagcactttgggaggccaaggcgggcagatcgcttgagcccaggaatttgagaacagcctgggcaacatagtgagactctgtttctacaaaaaaaaaaaaaattggctgggtgtagtggcgcctatagtcctagctactcaggagactgaggtgagaggatcccttgagcccaggaggtcaactctgcagtgagccatgattgtgccactgtactccagcctgggcgataaagtgagactctgtcttggggggaaaaaaagaagtaacaccacccccatcttccccttgcttgccctggcgctgtttctctccaaataaataaaatggttttatttattttgtttacttgcctactgtctttctgtgcatgacctggcccccagtataagctgcctgagagcaggggccttgtctgttatattcatctctgtgtccagtgcctaaaacagtgcctggctcccatgtacgtgcccagcacatgggtgttggatcaataatacatgaggctggtgactggagaggaggcgcaggcacagccagctccttctttcaatactcaccttttggagacaggaatccacagcattaggaatatgtccttcatgttgatgcatatcaccagacggtgtttctgcttgtgattgtgtcagtgaagaaatttgaggtctcgtgttcttctttattgaattttcagtgggtaccaggaaaatgggcacaggtttttcgtcaacaagtatttggtgctctccttttttcaacactctctccttagcttcagtggagacattaaacacacacatatacacacataaaaatgggagagatttcaagtaatcctctcattcctgtgtctgtactctgccccagcacctcccagtaaggctgctccctgcatcctggaatggtgggttggcgatggagaaagtcggggagctattaagagctctaaagtgtgcggattaagttttactatagaagtgaaagcttaatgacaatggaacattgtccaccgattaaacatcatgtttctaaaactgtctccagtctcccctttccttcttccttctttccctccctccctcccttccttccttctttttttttttttttttttttttagacggagtctcactctgtcacccaggctggagtgcaatggtaggacctcgtctcactgcaacctctctgcctcccgagttccagcgattctcctgcctcagcctccagagtagcttggattacaggtgcgcaccaccatgcccgggtaatttttgtattattagtagagacggaatttccccatgttggccaggctggtctcgaactcctggcctcaggtgatccaccaacctcggcctccaaagtgctaggattacaggcgtgagccaccgcacccggcccagtctcccatttcaatactcattatacaggtaagtgacaacagcaggaatcaaaagtgcagactccgaattttgtaaatatacatgtgtttgctggcattcataaaaaaaggcaggaaggaaatacaccaaatggtcacattgtttatcttcaggttgttttcttttttactcttttatttctatagtgagcatatatcacttttgtaatcctcaaaaacacaaaatggaacatccttttgttcatggatggaacaatggaaccattatttaaaacataaaagtggaatccctgaatgacaaggacagcagctggcaggcatctgggggaaggaagatgacagctgagaaattaagttagaatgaggatatggaaagcatccacactaaggcgccgtcagccagacccgcaccaggcacatgtgaggccccatcctccaccgagtgttcactgtctcagtgagtctcttggcagtagggccccgtccctgtccgccaccgcacagtgacatactttctcccgccctctcccctaggtcagctggaactgggtccgcctggaaacccgggggccgggcccccagagggctttcgcagcctggccgcccgaagctcacctgccctttcactgaactccacccggaaggtgcccggggcttcgtgttcctgggtgctgaccgtgcactccccgccgcccgaggacttagagctctggaagtagctctccagcttccttcgtactcgggggccggacttgtacacccgcacgaggagcggggacggcgggcgcaggtgggaggccatggctctgcgcgtcgggagggcgcgggggctccgggaggcagctgggcgg

SEQ ID NO: 30352 - DNA, 2300 bp, Homo sapien
ttgcttcttgaggttctgtttcacctctccaacattggtgctgaagtacccagacaggtcattgagcactattagatcaggggcacccttctctccaaagaaaaaataaaataaaagaataatacatatttgatgcttccctgaaaatagcatcaaagtaatcattaggagaaaaataagatctttattggacttccttacacttaccgtaatagtttagtgtttacaaaaattatccaggcatggtggtacacatctgtaatcccagctattccggaggctgaggcatgagaattgcttgaacccaggaggcagaggttgcagtaggctgggatcaggccactgcactccagcctgggcaacagagcgagactctgtctcaaaaaaaaaaaaaaatgtttagtactgtttttggtttgatttccatacagaagttaggtgctatttccttttttatcgattgggtcatttttattgatcagatctaaaacatagagcttgatgcaaagattaagatattaataattttggaggtccaagcccaaggacaaacaaaaagagaagtgaggcaaagtaagatgtaatgtaacgcggtgctaggggttatcaccctggttactgcttcacaatgaacctgatgttgctggtctgggaattacatttagagatccactggcctagaaaatagagtttaaactcagcagcatggccgttagcgattgctcatgccactttgcatactttgtgctccttcctcaccaccaagtccctagggttcagtcacaccagactacaagattttccaaagcacagtctatgctttcattcatgtgatctttgttctgtgtaatccacccccatcgctgctctctgcatgacagatgatgaaaaagggaactctgaagagagagagggagagagagacacacctcattctcattcttcacctgattttcctcttagaaagtcccctactcatcatgcaaggtcttactgaaatgccactactatagaaacttttctccaatcttgtctctaaattacaacgaaccactgatttctgttatcctaatactttatatgtatctcaatgcaaatacgataccaaaaccttttaccctgctctctgccttggaggtggtactgagggctgacctctaagtaccacatcagctccattctctgattactcattgggttctgcagtgggaggtaccagcacgagattggaaggcacacggagagagtacttgggatgcttatactcccctggctgtcttccgaaagcagtcatgggttctacctgctggcacttggtatagctcttaccaagttcaggagatgccccctcccttgccccttcagcctagatggtaaggggaggaggctacttcaccatctctcaatggtttccttaaccctttgcccacacctgtgtaaataatttctttattaaattatcttcaattattaattttgagtataccatctgtatactgccaggacttttcgtgatacaccaggtaacagtattaatctatgttttatttctccacctcctacttcacccctcactccaaagagaggggatctgtgtctaattcatctttataatcttaacacagtgccaggcatatcaaaggccttcaatacgcgttgattgaattaaataatgccctgttgggccagaggggaacctgactccagccctggcttagggagcacaggagagaacccagtgtatttttctaaatatgggtgtgtagggagaattggggggaaaggagtgggatgcccaacagaaaaggaaaggaatactgattcctgtgttttaatgtgccaggcattctacagactttatctcatttaatcttcattataataacatgaaatagttatggctgtgcccactgtacagatgctattgactgaggctacataactaataaaattgcagacctcaggattttgacccaggatttgtctggcagtaacgtctgtcccaaagggcgacacaatcctgaggcagctgttcgcaaactcgaggcctcaatctttgacggaagcggttttcagagaaaagaagttcgaggcacaagcctgttgggtggggcgcaactgcagtcccagcgagctgaggatggctgcgccaggcccccttcctgccgctgctctgagtccaggggctccgacccccagagaacttatgcacggagttgcaggtgttacttccagagccggacgagatcgggaggcggggagcgtgctgccggccgggaaccgtggggcgcggaaggcct

SEQ ID NO: 30353 - DNA, 2300 bp, Homo sapien
cactggggcctgtctgggagtgaggtgggggaagggagaacattaggaaaaatagctaatgcacactgggcttaatactgaggtgatgggtatttaggtgcagcaaaccaccacggcaaacatttacctatgtaacaaacctgcacatcctgcacatgtaccacagaacttaaaataaatattaaaattaaaattaaaaaaaaaaaaagaaaaccagacaaggcaaaggaagaggggaaagtcaagcatgcacatagcactgttctaaccattaaactaatgttaactcttttaatcttcttacaaggcaagtagtatcattatcctcactttctgggtgaggaaactaaggcatagagaagttaaatgacttgcccaaagtcacacattcagtaatggtggagctgggattcaaatcccaggcaacccttgcttttaagccttacactaaatggccttattaatgctacagcaagaattcaaaatcaaatctctctgactccaatgtgtgtgcccttatccactatgccaggaatgagctctgctacttcatttttgtaaatcattttatcttctagtcaccttgaacattcaatttgtaaatcactttatcttctagtcaccttgaacatatatatatgtatagactaaaagataaaattatctgtctatctatctatctatctatctatctatctatgtatctatctatcatgtatctatctatatttttgagacagagtctccctctgtcgtccaggctggagtgcagtggcgcaatctcagctcactgcaaccttcaccccccgggttcaagctattgtcctgcttcagcatcccgagtagctaggattacagatgcccgccaccatgcctggctaattttttttgcatttttaatagagacggggtttcaccatgttggccaggctggtctcgaattcctgatctcaagtgatccacccacctcagcctcccaaagtgttgggattacaggcatgagccactgcgcctggccaatttatatttttaaatacgtttttatctatgttattaagataacgtggattcactgtaaaaaagaaattagtacaaaaatatgtatggaaaaatgcaaaaataatcctattaataacttaatatttcagtaaccatgcatttgtacatcttttgatgcatatatgcaaatatatagataaaatgatactaatgtataggacattatacatacatacatttttattataaacacatttgttttctctagtgttttactttttcttctgtgttcactccctcagcctttcccagccccacctgccccaaactgggaaatcaattttactacaaaatcacaagtatatatttacatttatagaaattttgtcgcttgttttgaaaaggtagaatcctataagaaaaaaaaaagttgtgctctttctaacactcagtaagagagaattgtgagggaaatatgcataattacttctgctactactaatagctaacatgtattaagcacttactctatgccaggcactgtgcttagacttttacttaccctatcttaaaacatatagcaatatgagataggtactattagtaagaatgaaattgggggttagagaggattgaatgacatattcacagtcacacagctagtacctgtttcagaattccatgttagacatcctgacttctgagtgtattttcttaactgctatgtacatcccctcaaattgccagtgagttttaatagtgaagctatatgacatggctgttgtcagggatcacttgagccaaggagtttaaggttacagtgagctatgatgggacactgcattccagcctaggcaacagaaaaacaacaacaacaacaaagaatcagatatttatgactttataatcatgacatgtccaaatagatatcaaggtatgggtaagtttgtatgggagacaaagataaatcagattgagaaaacaatattgtgtaacaattattactattatcatattacaaagtagctccatgtccttgattacacttggagaggtaactgttgatcctgttcctcaaacgatctcaaattggaagtcattgttaaagattgctgtgtattcagggtaggcaacgtagggtaagttgaaattgatatagggtaggggaggttgaaattgacgttgtgaaatctaactttacatagaaattagcatctaattttaatttgtggttatcgcctctaaatcaaattacttttaaaaatctattttcttctaatatgaaataaaattacaatacc

SEQ ID NO: 30354 - DNA, 2300 bp, Homo sapien
ggaaagggcagaatgagagaagcctcaaggatttagttatttggatagcatagaccagtctacacaagtctgtgagtgtctacaaactagaaatagcagcaccatattcagcagtggagaagcagtcaaggcacactaactaagtagttcccactgacattagaagaatggtatacttaggtttaatctcagttttgccatttaaaagttgggtgacatacctctctgaatctcagctttttttttttttttttttttttttgagacagagtctcgttctgttacccaggctggagtgcagtggtgtgatctcggctcactgcagcggcgtgatctcagctcaatgcagcctccgcctcctgggctcaagcaatcctcccatcttagcctccctagtagctgggattacaggcatgtgctaccacgctcggctaatttttgtattattagtagagatggggtttctccatgttggccaggctggtcctgacctcaggtgatccacccacctcagcctcccaaagtgctgggattacaggcgtgagccactgtgcccagcctgaatctcagttttatcaagtgtaagatgagtgtggtaataacacctttcggaattgttctaactattaaaacgggtgtatttgaagtgttttgcatgatatctagcacatagaaaacccccaaaactggtagtagtcattacccaactttaaggactgacaagcaattgctacaacttactaacatcaccacttaaactggatcaaagataattttgttttttaagttcttagttatacttacccattctggatggaagtgtggtctttccagagatgtttcccagagttccccagaaacactccaaagtattgcatgatgtagtttgtaagcaaatttatccataggaaataataataatattttaaaaaacaacatttacccccaaaggttcttagtttttttcccccggtaaatataaaatatccagagacatatttttttgctcaaagataaactgggggaaattattattagcaaactgttcgtgatatctgtgtccttgttgagttcacaataacatctgccctttattggggtgacatcttcagtagcaatctggaaagtaactgccccaaatttcattgttaaccaagaattagaaacatggactggtgcagtggctcacgcctataatcccagcactttgggaggctgaggcagggggattgcttgagtccaggagttcaaaaccagcctgtgccacatggcaaaacctcatctctacaaaaaatacaaaaaattagccgggcgtggtggtgtacatctgtagtcccagctacttgggaggctgaggtgggaggatcagttgagtccagggggttgaggctgcagtgagtcaagatcatgccactgcactccagcctgggcaacagaatgagactctgtctgcaaaaaaaaaaaaaaaagaaaagaaaagaaaagaaagaaagaaagagaaaaagaaaaagtagaaacagtcccaaagatacctgaaaagaaagaaaatggatgaagacaacccaagtgaaactttataactctactctgtcgcccattgctcaattttatcactcacacgaccaaaatgcctttttgttttttccatttctaaacaaaacttcaatgtctgaggttttctaacgtggattttcgtgttttcattcaggaggctttggctggacctaagagatgaagcatactgtatgtatttgttgttaatcaaccccagaatgtacctaacagccaaagatgccaaggaacgttgttgccctgccccctgctcacctacaaatactctacacttccctcagcctattggatgtaggagattagaattatggggcttcaaaagaggagggataacgatagtggtcacaaaaaaggcatgtgacttcctgcagagccacagtcagcacccctgctgacatacttgcctggacagtgttagtttactcacaaagtaaagcaaatcagcactgctatttgtggagaaaattcctaggttgaaccgcaatcctttaagaagtctctgagggaagaggaaatattttgagaactattgttatcaactctttgatatctgatgatcaatgctccaaagaattggattaatatttttacacaatattgttgtagtcagtaactgtttctatttccaggcatttttagatgaattcactaactggtcaagaataaatcccaacaaggccaggattcccatggcaggagatacccaaggtctggtaaagtcgttctgc

SEQ ID NO: 30355 - DNA, 2300 bp, Homo sapien
catggccatggcagtggagcggttaagagcacaggtcatggagtcaaaattccagctctgccatttaactagttatatgaggttggccaagttattatcctccctatgcctcactttcctcatctataaaatggtacaataatacctacctaatatagtttttgtaaagattgaatgagataatgtttgaaaagtacttaacatagggccaggtgtagtggctcacgcctgtaattccagcactttgggaggccaaggcagatggattgcctgagtccaggagtttgagagcagcctgggcaacatagtgaaactgcatctctacaaaaaaaatacaaaaattagccaggcatggtggcgcacacccgtcctcccagctactcaggaggctgaggtggaaggatcacttgagcttgggaggcagagattgcagtgagccaagatcatgccactgcactccagcctgggtgacagagtgagaccccgtgtctgaaaaaaaaaaaaagaaaagaaaagaaaaagaaaagtgcttaacaacttaacgtagtacctgagacgtagtaatgactgaaagggagctattcttatttcaaatttattactgtttcttacaaaggaaaaactaaatggacttgcttttgttcatcgatcagaatcttgaatgcttaatatgtgccaggcactggtctaggtgctgtgggcacagagatgaataatcaggttcctgcccttgagaaactcatagcctggggtcagggaggaagcccatatgtaaacaaataaagaaggtccaagagaagaagctgtctctaagctgtgaacaaaaagctgtgggaaatgggaggaaagggacccaaacaaggtggcttggtcttgcttctgtgaagtttatattcataatgtccagaatatattccatctgcttgacatagatctttccctatccatctggtaaacccctcttcattgttcaaaacccagatcagagccacttactctgggaaccattgtctgattcccagtattagtcttcccacctcatttgatcccacaataggcaatttatttgctctcaagacttgctcccacatggatgatgcactggcaaagatttgttatatttatttctgtatcctcagatcctagcacagtgcctggcacatcgtgggcccaccatcaatacttattattattattattttaagatagagtcttgctctgtcgcccaggctggaatgcaatgcagtggcgtgatctcagctcactacaagtgattctcctgcctcaacttcctgagtagctgggactacaggcgcgcacaaccatgcctggctaattttcgtatttttagtagagacggagtttcactatgttggccaggcttttctcgaactcctgatctcaggtgatccgcctgccttggcttcccagagtgcttagattacaggcatgaaccaccacgcccggccaatacttattattaaagagacaattgagttgagtcctaaaagatgaataggatcaagacaaaaactagagaagagcattccaaatgcaggaaattgtatacacaaagaccctttcaaggagaaggggttttacaaaaataatgactagtttttgtggcaacacggacaataaaatgaatggcagggaataaccgaaggtgatgcttggaaattagtttcgagtcacatcaccaagggcattgtacacctggctgaggagtgtcaacgctcatacctgcaggtaatggggagccattgaagggcttgagaaaggggtgaaatgagatttgtagggaaaaccctcaggagggttggtgaggtctggggcaggaagtggggacacagctcagtggcagcaatccaagtaagacattcgtgtgtgtgtcgcccagcgactgggagttttaggtatgtaaattctcatgtaggtattaaaatcttgtgtctaaaaatggagtgcttagctcttccttttatttcaattagtagccagacattttcttctatacaacataaagatacaataaaaatttactgattttctttctttttttttttggtttgtagatactataagatttgttgatgattgtaccaagcaccattcaattaaacaacttcagctttctccaagacttctggaagtgacaaacacaatcagggttgaaaacctgccacctggtgctgatgactacagtttaaaacttttctttgaaaatccctataatggagggggaagagttgccaatgttgaatattttcctgaagagagttcagctctgattgaatttt

SEQ ID NO: 30356 - DNA, 2300 bp, Homo sapien
ggattataggcgtgagtcactgcacccagcttagcttctccttcttttaattttaacttacatttgcatagcttcgcaggttattaccaagtgcattcagacagtcttatgggcatcttgattgttataatccctgttttgcacatgacgaaactgaagcacagaaaggtccaataacttgcccaagattacacagctagtgagtgacatagtcaggatttgaacttgggtattctggtcccataacatataccctaacttctctcctctttccaaatctcctgttcacctataacgttaatttttcttataggatatttcaccattcacaatgggttgccaataatgaggcagatggtagatagagcttggtttaaaagagaatttattgtacaatattgtgttttatgtagatttcttgaaaggaaaaaattaggcattttactgtaaaattatttggttcaacttcacaaaatctgttttatttcttaagagaattttcattgaacacctatgtctgtaagatcttttgctgttttttctgctacagtatctcacaatcccattaataatctgcacagttagataaactttgtccttacagacaagaaaagcaggatggagactttaaggcatattaaggtgacatctgtgatggttcttgagtcagacagacctgagtttgattcctggccttggtgcttactagctttgtaatcttggccgagttactttaacccacctaagcctctgtgttcttatctgtaaaatggggttcacattactggttacttagaggaatgctgtgaggttgaaatgaaataataccagcaaagagcctggtgcctgatggtgctcagtaagttggtaatcataaatactgcccaggctcagggctgccacagagccatgttgaagctataaagctcagggctgccacagggaagttgaagctatatgtttgggcctctgaaggccactgcttttccctcatgcttgataccagctctaggacccaatcatacacaaggtgaagttatttttaacatctttccacaaaggttgctcttttaacccaagttgttattggagcacattctgattccctttctgcagatgctctgcttaataacttacacaaaacgaggaggggcttggaagagaagagcatgcacatgcacacacatgcaaacacacccagtgaagtggaaaagggagattccagcagggccaggaggaggtgtggttcttactgaatcatagtctgtggggctgggctctcagaggacagtgatgataacttggatttggtagaggggcaagaggatgggcgttggggttggacaaccactgaatctcagctgaattatctgcagtctatgtaaccctatccaagttatctaacctttcctagcctcagttttagtaggatgataataataatgtctctacctcaaatggttgttgtgaggatgaaatgaattaaatatatgtaaagcactcagaatagtgtgtgacacatgctaagctataataatttattattatgctcctcctttttgaggtattaatgttaatctaagtcaactttgaagcctaaaattataggactgtacaagaagaacaaatagcataatactaaggtgagcttcactttgagcaccaaaatattttttatactttgagcaccaaaatattttttatactagggcaaacattattctcacgattgtgaccaaactcatgtatttcttaacatgatggtgatatatcagtaatatcaggaaaacagtaaacagaatttaattaacaagatttcaacatagatggatcttggctagaaagtaattattccattcaataagggatacctgtgcactgctaacacatatcagtttatatttgagcactttgagagtatattgctttttaatacgctgtaacatcaaaattctaccaacattagttttttttactctaaaatgggaagattttgttttgtttttctttgccacatatcatcttggtcttacattgttttatttctttcctttaagtgttagaaaaacattagatttttttttctctaaaataggaaaattttgttttgtttttatttgccatatatcatcctgggcttacattattttacttctttccttttaagtgttagacaccatcatggccacaaaactcgacttcaataaaatgccactttctgtgttcccatactatgcctcattgggcacagccttgtatggaaaggagaagcctctgatcaagcttccagcaccatttga

SEQ ID NO: 30357 - DNA, 2300 bp, Homo sapien
tgctcctcctttttgaggtattaatgttaatctaagtcaactttgaagcctaaaattataggactgtacaagaagaacaaatagcataatactaaggtgagcttcactttgagcaccaaaatattttttatactttgagcaccaaaatattttttatactagggcaaacattattctcacgattgtgaccaaactcatgtatttcttaacatgatggtgatatatcagtaatatcaggaaaacagtaaacagaatttaattaacaagatttcaacatagatggatcttggctagaaagtaattattccattcaataagggatacctgtgcactgctaacacatatcagtttatatttgagcactttgagagtatattgctttttaatacgctgtaacatcaaaattctaccaacattagttttttttactctaaaatgggaagattttgttttgtttttctttgccacatatcatcttggtcttacattgttttatttctttcctttaagtgttagaaaaacattagatttttttttctctaaaataggaaaattttgttttgtttttatttgccatatatcatcctgggcttacattattttacttctttccttttaagtgttagacaccatcatggccacaaaactcgacttcaataaaatgccactttctgtgttcccatactatgcctcattgggcacagccttgtatggaaaggagaagcctctgatcaagcttccagcaccatttgaagagtcactagatcttcccttatggaagttcttacagaaaaagaatcacctcattgaggagataaacgatgaaatgaggcgttgtcactgtgagctcacgtggtcccaactcagtggtaaagttaccatcagaccagcagccaccttagtcaatgaaggaagaccgagaatcaagacctggcaggcagatacttccacaacactctctagcatcaggtctaaatataaagtcaacccaattaaagtggatccaacaatgtgggacaccataaaaaatgatgtgaaagatgacaggattttgattgagtttgatacacttaaggagatggtaatcttagcagggaaatcagaggatgtccaaagcattgaggtacaagtcagggagttaatagaaagcactactcaaaaaattaaaagggaagagcaaagtttgaaggaaaaaatgatcatttctccaggcaggtattttcttttgtgtcacagcagtctactggaccatttactcacggagtgcccagagatagagatttgttacgatagagtcactcaacacttgtgcttgaaaggacctagtgcagatgtgtataaagcaaagtgtgaaatccaggaaaaggtgtacaccatggctcagaaaaacattcaggtttctcctgagatttttcagtttttgcaacaggtaaactggaaagaattctctaagtgtcttttcatagcacagaagattcttgcactttatgagctagagggtacaactgttctcttaaccagctgttcttctgaagccctgttagaagcagaaaagcaaatgctcagtgccttaaattataagcgcattgaagttgagaacaaagaagttcttcatggcaagaaatggaaagggctcactcacaatttgcttaagaaacaaaattcctccccaaacactgtaatcatcaatgagttaacttcagaaaccacagctgaagtcatcattacaggctgtgtaaaagaagtaaatgaaacctataaattgctttttaacttcgttgaacaaaacatgaaaatagagagactggttgaagtaaagccttccttagttattgactatttaaagacagaaaagaagctattctggccaaagataaagaaggtaaatgtgcaggtaagtttcaatcctgagaacaaacaaaaaggcattttactaactggctcaaagaccgaagtactgaaggcagtggacattgtcaagcaagtctgggattcagtctgtgttaaaagtgtccatactgataagccaggagccaagcagttcttccaggataaagcacggttttatcaaagtgagatcaaacggttgtttggttgttacattgaactacaggagaatgaagtaatgaaggagggaggcagccccgctgggcagaagtgcttctctcggacagtcttggcccctggcgttgtgctgattgtgcagcagggtgacttggcacggcttcctgtcgatgtggtggtgaatgcatctaatgaggaccttaagcattatggtggcctggccgctgcgctctcaa

SEQ ID NO: 30358 - DNA, 2300 bp, Homo sapien
tgagttgaattaagactgtgatcaagacagcctctggcagttaaaggagcctcctctctgttccttaaagacacctgcataagaggagagattaggtggttagcaatacctgtgatcacctcaagctcaacgcagactccaaactctcattccttgtcatctccccaaacctgcccttcctcttatatccccaatcacgtgaaaaacatcactttccatctagagtccttgactctaccctcttcgtcactccgatcttcattagcttaggaattatttgattgaatatttactgagtgcctgcatctgcaaggcaccatgtttaggctctggagatagaaagataactaagaaaaggatccagttcacaaggagcactgagcccagtgtgagagacaggcatgcaaacaaacaactgcaatgcaacgtgaaccatgatatagtgaaggtatgtgtatggcaaaagacagagagggaaaggtgaaggacaaacccagctggtccctaggtactcctgactttacttccaaaatagctcctcaatccctattcttcattctggcctcctctttttgttcagctcttgtcttttgactaagcttttattacagcgtcctaactagacctgggctccccgctccatgcttcctccatacccctccagacttaacttcctcaaaactaggtctgttctgcatacgtgccaggctgaacatatacccattacatagttccatctggcatagcctttccctcaattttccatatttcacctgttgatcacctgttcatccccgcatatcacatcatctgtgttctagcaagtgcctagtgagtacctagccagtgataggacatagcagatgtttcttgaaagtgaatgaatgtaactgaatgtgtccatataaactcttcaaaataccatgggaaaattacagctttgcaaaagagaatttccctcgttctctgatcatctgatttaaaaagatttgaacaaccccccttggttaattttatgtggggttgtctacattcccacaattgtcagcatagccaagtcaaagaagcctactcttcttctgcaatagtggtgggtaccatcaacaacaattagccaggtgggctcttagtctgtcacatcagcttggccaaggaacttttacattgcccatcatgtgactttgccagctgttattcacatgggactgttcccccagctggaaagggacttttcatgatcttacctaggctgttgctttcatggcttgagaaggaggatatggagtatgctgaaaacaggaaacgctctgcttcaggtggctaccttgaatcctgctggtcagctaaaatctcactgagtgtggagggaaaggcttcttggaggcttatagataacttgtgtctgaaaaattatagattataacaaatagcctgtagcactgggtgtcttactaaattttgcttagttcaaattaggttcccagagatatctgggagaataaggatacatacataaaatcaagtgatgactgatcctaaaaaagattttcatctttaaaaagtattttatgtcaacatatattagcatctgctttttatgaaatttcaaggacactagcgagctaagtagaaaagctacttgtgctctgtaataggagaggaggaacacaatgagctgggatcagttgaatagagtagatatgattgtcagacaccaaaagtcagatttctgggtcctttgttcactgctaggctgtgggcttcctgacatcctggaacaaaaacacttcattgcatctaggacttcaaaagtgtttgctgatgctttgttagaaaattccacaatgatgaaagaattgaggagtgggcatttattctctgagcattggaaaccctaatttattcctcagccttccacttggggcttttttgtccttcagcaattttattatttgcttttccaggaaatgccaaacaacacccagataaggttgctgaagccataattgatgccattgaagactttgtccagaaaggatcagcccagtctgtgaaaaaagttaaagttgttatctttctgcctcaagtactggatgtgttttatgccaacatgaagaaaagagaagggactcagctttcttcccaacagtctgtgatgtctaaacttgcatgtgagttctttgtttttatgaaatgcatgttcataacgttgatgtcacatgtgaaatacctaatcttccttttctttttagcatttttgggcttttcaaagcaatctccccaaaaaaagaatcatttgg

SEQ ID NO: 30359 - DNA, 2300 bp, Homo sapien
caaaactaggtctgttctgcatacgtgccaggctgaacatatacccattacatagttccatctggcatagcctttccctcaattttccatatttcacctgttgatcacctgttcatccccgcatatcacatcatctgtgttctagcaagtgcctagtgagtacctagccagtgataggacatagcagatgtttcttgaaagtgaatgaatgtaactgaatgtgtccatataaactcttcaaaataccatgggaaaattacagctttgcaaaagagaatttccctcgttctctgatcatctgatttaaaaagatttgaacaaccccccttggttaattttatgtggggttgtctacattcccacaattgtcagcatagccaagtcaaagaagcctactcttcttctgcaatagtggtgggtaccatcaacaacaattagccaggtgggctcttagtctgtcacatcagcttggccaaggaacttttacattgcccatcatgtgactttgccagctgttattcacatgggactgttcccccagctggaaagggacttttcatgatcttacctaggctgttgctttcatggcttgagaaggaggatatggagtatgctgaaaacaggaaacgctctgcttcaggtggctaccttgaatcctgctggtcagctaaaatctcactgagtgtggagggaaaggcttcttggaggcttatagataacttgtgtctgaaaaattatagattataacaaatagcctgtagcactgggtgtcttactaaattttgcttagttcaaattaggttcccagagatatctgggagaataaggatacatacataaaatcaagtgatgactgatcctaaaaaagattttcatctttaaaaagtattttatgtcaacatatattagcatctgctttttatgaaatttcaaggacactagcgagctaagtagaaaagctacttgtgctctgtaataggagaggaggaacacaatgagctgggatcagttgaatagagtagatatgattgtcagacaccaaaagtcagatttctgggtcctttgttcactgctaggctgtgggcttcctgacatcctggaacaaaaacacttcattgcatctaggacttcaaaagtgtttgctgatgctttgttagaaaattccacaatgatgaaagaattgaggagtgggcatttattctctgagcattggaaaccctaatttattcctcagccttccacttggggcttttttgtccttcagcaattttattatttgcttttccaggaaatgccaaacaacacccagataaggttgctgaagccataattgatgccattgaagactttgtccagaaaggatcagcccagtctgtgaaaaaagttaaagttgttatctttctgcctcaagtactggatgtgttttatgccaacatgaagaaaagagaagggactcagctttcttcccaacagtctgtgatgtctaaacttgcatgtgagttctttgtttttatgaaatgcatgttcataacgttgatgtcacatgtgaaatacctaatcttccttttctttttagcatttttgggcttttcaaagcaatctccccaaaaaaagaatcatttggttttggaaaagaaaacagaatcagcaacttttcgggtgtgtggtgaaaatgtcacgtgtgtggaatatgctatctcctggctacaagacctgattgaaaaagaacagtgtccttacaccagtgaagatgagtgcatcaaagactttgatgaaaaggagtatcaggagttgaatgagctgcagaagaagttaaatattaacatttccctggaccataagagacctttgattaaggttttgggaattagcagagatgtgatgcaggctagagatgaaattgaggcgatgatcaagagagttcgattggccaaagaacaggaatcccgggcagattgtatcagtgagtttatagaatggcagtataatgacaataacacttctcattgttttaacaaaatgaccaatctgaaattagaggatgcaaggagagaaaagaaaaaaacagttgatgtcaaaattaatcatcggcactacacagtgaacttgaacacatacactgccacagacacaaagggccacagtttatctgttcagcgcctcacgaaatccaaaggtgagttaaacattcatacttgtcatccactatttcacatctactttgggcataacactatttggtacgtacatcagaatttcaaattggaaaaaattcatgtgacactaatgaaataaactag

SEQ ID NO: 30360 - DNA, 2300 bp, Homo sapien
aatcatctgatgagtggataaacaaaatgtggtatatgtgtacaatggaatgtttttcaactatcacaaggaatgaaatactgatgcatgctatagcctggctaaatcttatggtatataatgaatctaatgttatgtgttatgtctgtatctggttatctgactgtatcttctgttggttctgtttctctgaggaactccgatacaccatatgatccagtaatcccattcgtatgagtatatacgtagatagatatctttacatgatgtctacatgtacgtaaatgtagatatctataaatacatagatagaaatgtctgtatttatatagagaacaagagattgagatttactttaaggaatgggcttacttgattgtagtggctggcatgtctgaaatttgtagggcaggctggcaggctggaaactcacataggacttctattacagtcttgaggcagaatttttttctctaagacatctcagtttttgctcttaaggacttcaactaattgggtaaggaccacatacattattgagtataatctcctttacataaagtcagttgattgtaaatgctaataatatcttcaagttatcttcacagcaacatccagattattgtttgaccaaacaactgggtgctattgtctagccaccttgactcaaaattaatcattacatatggtaactctgtgtttaaccttttgaggaactcccaggtttctgaagcaccattttacattcccaccagcaatgtatgaagattctgatttctctgcatcctcaccaacacttgttaatatctgtcttttttttattagcactatcctggtgtgaagtcatatctcatcatggagatttgcttttttaagttcaatattgtgtttctaagattcatttgtgttgtcacatgtaagctgttcattccttttcactgtgatataatactgtgttaaggtagcccataatttattcattattaatatttattcattgttactattttagttactattcatatattaatatatgtatatatatcaataatttattatatttataataatttatatattattcattgttctattgatggatgattcagtgttcaattttttgcttctatgaacagaatattcttgtacatgtttcctggcacacatgtgcaaaagtttatctagactgtgtataaatctcagagtggtattgctggtccatagggtatacaatactcaagtttacgagataatgccacccatgttttccaaatgtctctatcagtttgctttcccattagtgtataagacttttgtctctcaatgtcccacttggaactatcaggcccctttttgccaatttcatggatttctcaatttgcacttccctggaggctaaacatatcttcatatgtttattagtcctctgattgctcctttttaaaatgcttatcattgtgtcttttgcccattttttaaaatttgctcatttctcttattgatatgtgtagattattctacacattaatattttatcagttatatatgttacaggcatctagtttgtttttttcctttgtggtgttttttcgtaaacagaagttgttgattttaatgcagttcctcattaatgctataccttatatttactctgtcttaaagccacgtttagatggatagccatctcattcttgtagccaagcatgtttattgtaatttttcttccatctctgaaataatttgcttgtcagactctatagggattattcctctgtatgtggtactttaaaaaaaaaactttaaacatgtcaaataatggaaaagattggagaaaatatcataaggtgattcatacttaaggccatgacttatagatagaatacatacttaaatttgattggtgaaatattctgcagctcttctagatggcaggtgatagtaaatacacaaaaattgtggttctaccaatagcatattcattccttctataacaaagcttatattaatgagagaacagaagatgaaattaaaacagactttattatctcttaaaaagccatgagacttaacagaagttaaaagcgtgtttttttaattcaggaagaggatcacctagcccgggtagaagaggcaatcacccgtatgcttgtgtgtgccctgaaaactgcagagaatccacaaaataccagagcctggttaaaccccactgaggtaggcggcttctggtcttcatcatggcagttagtttcctgtggtaaaccagccctgactagaacatatgttttccagtgtaactaaat

SEQ ID NO: 30361 - DNA, 2300 bp, Homo sapien
catgcccagcctagaattttatcagtaacttgcatttgtgctgtgttcttcccaatccctttcctgtctgttccgttcactctcctcattctcttgtttaaacaaaaaagttttgtcacattatctgtccatctatccatctgtcttatctctgtacacatatgcacacatatatatttttttctattggttctctttctttggagaaccttgactgatataccatatgacccagcaattccattcctaggtgtatacccaagaaaaatgaaaatatatgtccacacaaaaacttttttttttgttgtttgagacaaagtttcgctcttgttgcccaggctggagtgcaatggctcgatctcggcccaccgcaacctccgcctcccaggttcaggcaattctcctgcttcagcctcctgagtagctgggattaaaggcatgcaccaccaggcccagctaattttgtatttttagtagagacggggtttctccaagttgaagctggtctcgaactcctgacctcaggtgatccacccgccttggcctcccaaaatgccaggattacaggtgtgagccaccgtgcctggcccacacaaaaacttctacacgaatgtttacagtagtagtattcataatagcccaaagtgacacaactcaaatatcaatcatctgatgagtggataaacaaaatgtggtatatgtgtacaatggaatgtttttcaactatcacaaggaatgaaatactgatgcatgctatagcctggctaaatcttatggtatataatgaatctaatgttatgtgttatgtctgtatctggttatctgactgtatcttctgttggttctgtttctctgaggaactccgatacaccatatgatccagtaatcccattcgtatgagtatatacgtagatagatatctttacatgatgtctacatgtacgtaaatgtagatatctataaatacatagatagaaatgtctgtatttatatagagaacaagagattgagatttactttaaggaatgggcttacttgattgtagtggctggcatgtctgaaatttgtagggcaggctggcaggctggaaactcacataggacttctattacagtcttgaggcagaatttttttctctaagacatctcagtttttgctcttaaggacttcaactaattgggtaaggaccacatacattattgagtataatctcctttacataaagtcagttgattgtaaatgctaataatatcttcaagttatcttcacagcaacatccagattattgtttgaccaaacaactgggtgctattgtctagccaccttgactcaaaattaatcattacatatggtaactctgtgtttaaccttttgaggaactcccaggtttctgaagcaccattttacattcccaccagcaatgtatgaagattctgatttctctgcatcctcaccaacacttgttaatatctgtcttttttttattagcactatcctggtgtgaagtcatatctcatcatggagatttgcttttttaagttcaatattgtgtttctaagattcatttgtgttgtcacatgtaagctgttcattccttttcactgtgatataatactgtgttaaggtagcccataatttattcattattaatatttattcattgttactattttagttactattcatatattaatatatgtatatatatcaataatttattatatttataataatttatatattattcattgttctattgatggatgattcagtgttcaattttttgcttctatgaacagaatattcttgtacatgtttcctggcacacatgtgcaaaagtttatctagactgtgtataaatctcagagtggtattgctggtccatagggtatacaatactcaagtttacgagataatgccacccatgttttccaaatgtctctatcagtttgctttcccattagtgtataagacttttgtctctcaatgtcccacttggaactatcaggcccctttttgccaatttcatggatttctcaatttgcacttccctggaggctaaacatatcttcatatgtttattagtcctctgattgctcctttttaaaatgcttatcattgtgtcttttgcccattttttaaaatttgctcatttctcttattgatatgtgtagattattctacacattaatattttatcagttatatatgttacaggcatctagtttgtttttttcctttgtggtgttttttcgtaaacagaagttgttgattttaatgcagttcctcattaatgctat

SEQ ID NO: 30362 - DNA, 2300 bp, Homo sapien
aaaccccgtctctactaaaaatacaaaaattagctgggcgtggtggcacgcttgtagtcccagctgcttgggacgctgaggcagaagaattgcttgaacctgggaggtggaggttgcagtgagccaaaatcgcgccactgcactccagcctggtgacagagcgagactccgtctcaaaaaaagaaaaaaaaaaaaagagagaaaagaaaaagaaaggccgacctcaaactattcgctccttgaagcatttatgttctccccactgagatccctcctcctaacaaccctcacagagtgtactactggtagaatagttcaggtgaccacatagtaagtcattctttttcctttctaggctcctttggaaaaggtattgttataaatattcaaaagtctctggatcctgcgacagtattcagaacacagccctgcacggtgcaatcattcaataaataataacagggatctcaggctcatgggcctccaaacctcatccccacttgctaaaccagggttcactgaaatagaataaaagcgcataatccctgttcacaaaagtctcagataacttccattaatctcaaaggttgccttcaatttcacaaatttaattttaatcccctctaaacgttcaaaacacctctatttagctaatgatgggcaaatataaaacaaaacaaaacaaaaataacaccccatgcgtgaaacagcactcgtaggctaccctacgacgatcaaaaatctggatgccacaattcgagaaatgccacgctcactagaaaatatagatttttcttcatagtctaatgcaaggccagagagacctgggttggggctaaggcaaacggccccacgaggggtgccacgagagtcaactggcattgggtttgtactcagggtcggacctcagcctggcacctaccttcctcccctccagccccagccgcaacgatcacaggagtggtcgcctcggagcctgctgccatggctaccgcaaggcgggttctgccggaacccaaggcggagcggagctggggtggggtcagagtaggggccaaactccgagacccgaagctgcaccacaggaaggagccccggcgactcccgcccggctcctacggaaacgccggctctcacgtggaggtcacgtgacggatgctgggcgggaccacgcagctttgttttgataccccgggtgtggaaatacaaacacgtggtctgagttgtggcgctttttacctaacccggaccttagcgttctttattgtagtcttagcttcgtttctgtttctccttttctagtcagatccttcctttccacctcggcttttctccaccctaaaggattggagttttaggggaaggtttgccgcttagtggggctccggcggtgggatgggtctctgccgtgagctttcgcgagccgctcttggcagcctggaatgcgaggctagctcacgcttctcttacacctctcttgcccttctggtggtaacctgactccttctgattttagtggctgccgggaaatacgaacctcgggcaaagaatcctgtgattgcgttccctgtgactcatttcccgatccagacaagccaaattgcttgactttaggttttcaaggacactaatccacagctgtcaggcttctgaatttgtataccaaaataaacaaacagctgtgtgaagagatcaacaaccacctttcttctcgtttaccctgtggtcaaatcataatcactggagatggatctttggggcaaaaatcttccaactttactggacatacctttattgctcgcctattggcaggcgaaatgggtaaagtttacatatatatgaatgaaattggctagtttggaatctcctctttggatatgtaagacaaaaaagtaacaaaaataggtagtacttattgcacgtaagaaatgatttttatgagataatcccctgggaccaactacgcttaaactttatccttcgcctataatttctgaagttactaactcaacaaaaatgagaataagcccaaaatagaagcaagcatcaggttaactgacgtcacttaacaggtcactgagttgtttattaggcacaagatttaacttggacacttcctccaaacaccccagggttccttgcccaacctcctcgaatacagcctctctgggagtttccctctccccgactcagccgcgctggtccctgccttttcagcgctacctgccctccgtctgggacctggctcctttcctctcgccggtgtttcctcgccacccgcggaggggagggcggacccc

SEQ ID NO: 30363 - DNA, 2300 bp, Homo sapien
ccgacctttcatcctcaacatccccatatccctttgaagtcaaagcatcagtcatttttgtcaggtgtaaaacacatacaccgcacgtgcacggggatgctctgatgttcacaatgtgtaaaaacttgaacgtttagagatcgcttaaatccctggtgttgcataaagggccttgataaaaaacataaatatttgcaaggttgcctttccatatttgtcgctttggggacggagggttcctaagtcagaaatggaatgctagcaacactctatcacctcacacaacccctatgccggggccaagggaggcggctggcaggcctggagcgcgggcaggcgcctgctcccggaggagagacagcgcgggctggcgctccgcgacccctcacctctcttgtccaggagccacatgaacgcgaagcagggcaggaagccgatgggcccccacagcacgagcagcgcgatgtcccagctggagaagccgtaggcctggcgcgccgagttctggatgggaccccaggtgttccagaccaggccctgaacgaacgccagcagcgagaagagcagcagcaccagccagcggcgcccgtatacccgcccgggacccgggaccgccgcgggcagcgccgccgccgccgcctcccggcttctccaggaggcccccagcccaggcccgagcccgggccccagcagcggctgcctctcctcttcgctgctccagcgagagcccatggcgacgcgtcgcccgcgaagccactgccgggcgcagtccgggtcaccgccgactagcccagcgcagaatagtcctgagcagcaggaggcggaggctgctgtggtcgccctcggcctccggaccgcgcctggtgcgcctgcgcggcccgagccgggccggcggggaggcggggaggcggggcaggcggcaaggaggctggggtccgccctcccctccgcgggtggcgaggaaacaccggcgagaggaaaggagccaggtcccagacggagggcaggtagcgctgaaaaggcagggaccagcgcggctgagtcggggagagggaaactcccagagaggctgtattcgaggaggttgggcaaggaaccctggggtgtttggaggaagtgtccaagttaaatcttgtgcctaataaacaactcagtgacctgttaagtgacgtcagttaacctgatgcttgcttctattttgggcttattctcatttttgttgagttagtaacttcagaaattataggcgaaggataaagtttaagcgtagttggtcccaggggattatctcataaaaatcatttcttacgtgcaataagtactacctatttttgttacttttttgtcttacatatccaaagaggagattccaaactagccaatttcattcatatatatgtaaactttacccatttcgcctgccaataggcgagcaataaaggtatgtccagtaaagttggaagatttttgccccaaagatccatctccagtgattatgatttgaccacagggtaaacgagaagaaaggtggttgttgatctcttcacacagctgtttgtttattttggtatacaaattcagaagcctgacagctgtggattagtgtccttgaaaacctaaagtcaagcaatttggcttgtctggatcgggaaatgagtcacagggaacgcaatcacaggattctttgcccgaggttcgtatttcccggcagccactaaaatcagaaggagtcaggttaccaccagaagggcaagagaggtgtaagagaagcgtgagctagcctcgcattccaggctgccaagagcggctcgcgaaagctcacggcagagacccatcccaccgccggagccccactaagcggcaaaccttcccctaaaactccaatcctttagggtggagaaaagccgaggtggaaaggaaggatctgactagaaaaggagaaacagaaacgaagctaagactacaataaagaacgctaaggtccgggttaggtaaaaagcgccacaactcagaccacgtgtttgtatttccacacccggggtatcaaaacaaagctgcgtggtcccgcccagcatccgtcacgtgacctccacgtgagagccggcgtttccgtaggagccgggcgggagtcgccggggctccttcctgtggtgcagcttcgggtctcggagtttggcccctactctgaccccaccccagctccgctccgccttgggttccggcagaacccgccttgcggtagccatggcagcaggctccgaggcgaccactcctgtgatcgttgcggctggggctggagg

SEQ ID NO: 30364 - DNA, 2300 bp, Homo sapien
agtttgaggttccatctgaaccagaaggacacgtgaggaaatgagctcgagagccaagatgtctgctgagtgagcaggccaccccgcctctactgagcacaaagtaccccacagcccactgtaaagtcctgttccactttcttgaactgactttctgacacccagaaacattccctctgagtattgctcacatttcctaacagaccagcacactgtctgatagtaaagaaataaactatcttgtcccttctgcatgaatataattccaaatcaaagtggaattgcatttttctccgatattcataaaataggcttgataaaatgttctcatagtttcctgcatttcttttttaatatgacattttcttcatatcacagctttagtacttgccttaatatggcaaaatgatagtaatttctgtacttatttcagggacaaatgtgcaatgtgattttttaaacattaatttaaagcaaatttgctatgcatttttattcaatcttgagcctaaagtgaagcttgtacttatgcaaacagtaagatgaatgcctggattttagtaaaatagtaaaaaacaaacaaacaaacaaacaaacaaaaaactaattaaaagttaagtagatggggatttaacctcttcaatttaaaatcccttagcttagatctctcattagaagggcttcataaaaacaagctgtaaacattctccataattaaacatgagtacatgatctacgaaaaaacttggccctcaggccatatatatttaaatatacaaaattacatttgtatttgattctctcgtaattagctccatcctccagtgaaatgcatttgtgtatacaactgtcttgttcctatacctccaccagggatcatattaaaaaatgcttcttcccataaactgtgaagtattaattgataagccacagggaacctgcactacagcatgtccttaccaattaatattggtgttgacttggtttatgggattgaattattcatcagaatctttttacatgatgtcattacaacccaagggctaagagctgacagagcatcttcaggatagtgatggagaaaaaagaattttacttataaaccaaataatcaccttaacttaatccttgtacttcccatactcaataatggaagcttactgttaaagccctatcattttttaacatgaaggtattcatgcacacccaaaatggtctaaattaagcttctgtgaggtaggaaaaaaacacctggtttaggagtcagaaactgtgagcctcagttgtactttacctctctagaatcatttctataaattctaaaatgagggtttggattagtgaagggttaagatttctttcagctgtaacatttcattaggattctataatggttagaaagtgcaaagaaagcagctggtctattttgatgcatgatagaaataaaaacaaaaagaaaatatgatttgcaatattcaagtaaatgatgtgtaatcttctccccacccccaagccttttggttcccttcctgtcaggtttggtatatgaaatttttgatcacttaaaacagttgcagtttataattagaacaattacctgctggaggggtaagcacatacaaacaaagtacagggactcgtctcacctcatgtattctaaaaacaagaattctgaacaatgcaagaatttttaatcactaccacttgggatgttttgaactaattagtcatttaggtaatacttttagagtgttattctactttgtgttaaaagaagaattaagcctggtgtggtggtgcatgcctgtagtcccagctactcggaaggctgaggtaggaggatcacttgagcccaggagtttgagtccagcctgggcaacatactgagatcctgtcccttaaaaaaaaaaagtgcaattaaccataattaaaatgttctacacaagaaatcttactattgcagaatgttataccacaacatcctcaaacataatagttcggactaaaaccaaataccttataattcttccctctcctttctctcttccctctgaacaggaaggggtggtgcttatttagcatccgggtcatggtctacggatatccttaatggctggctttgaatcatcttcaaggaatccgccttcttggcctggtgtggtggctcacgcctataatcccagcactttgggaggctgaggcgggtggatcacttaggagtttgagaccagcctgggcaacatggagaaacactgtctctactaaaaacagaaaaattagctaggcatggttgtgcgtgc

SEQ ID NO: 30365 - DNA, 2300 bp, Homo sapien
ggagcaagtgcagcagcaactgtggagggggcatgcagtcgcggcgtcgggcctgcgagaacggcaactcctgcctgggctgcggcgtggtgagggttggggccgtgggccaggggcgcggtgtagggtactggagccgaggggagggcgggcctggaggccgtggggttctaaagctgcctctgccgccacccgcaggagttcaagacgtgcaaccccgagggctgccccgaagtgcggcgcaacaccccctggacgccgtggctgcccgtgaacgtgacgcagggcggggcacggcaggagcagcggttccgcttcacctgccgcgcgccccttgcagacccgcacggcctgcagttcggcaggagaaggaccgagacgaggacctgtcccgcggacggctccggctcctgcgacaccgacggtaccccgcgcccggcgccccctccttcctctctcccagccccggagcggtgagggcgggggcgggagccccggggaggcccaggccggggtcggggtggccgggcgcccagtcgctgaggcctagcccctccgcagccctggtggaggtcctcctgcgcagcgggagcacctccccgcacacggtgagcgggggctgggccgcctggggcccgtggtcgtcctgctcccgggactgcgagctgggcttccgcgtccgcaagagaacgtgcactaacccggagccccgcaacgggggcctgccctgcgtgggcgatgctgccgagtaccaggactgcaacccccaggcttgcccaggtaaccctgcacggaaggaatccttggcctagcgaaaccctgtcatcctggaggcccccttccccgccccaggcctacccaggaaccccaatgcccaggtgaccccttctccctgccaactctgtgctagggacccccagagcaaatttctgccccggccgtagatgcaatggctactccggtggagtacggcctcaacttatcctccctgtccctttttttttttcacctttcttagtgagttagacaggtaagaagcttgattggaggtggagtcggtctctctccctccgggtgtctctgctgcttcctgcgtttccctcacctgccgcatggagtgggggcactccctaacagtggactgttgggtggcgggtggatcgggtggatgttgaggtcactgtggctcagggcagagtggtctgggctggtatgggatggaagaccgtcttgggccctggctgcccctacagcccctcacacaccccgtccccttgcagttcggggtgcttggtcctgctggacctcatggtctccatgctcagcttcctgtggtgggggtcactatcaacgcacccgttcctgcaccagccccgcaccctccccaggtgaggacatctgtctcgggctgcacacggaggaggcactatgtgccacacaggcctgcccaggtatgaggcacatcccgccagggctgggaagcgacatggagccctctgatccccaccagggggtccctgggcagttaacctcatcctacccacaatccccagaaggctggtcgccctggtctgagtggagtaagtgcactgacgacggagcccagagccgaagccggcactgtgaggagctcctcccagggtccagcgcctgtgctggaaacagcagccagagccgcccctgcccctacagcgagattcccggtaggtacccctgccagcacctgcgcagcaacccttcccagcctgcactcccaacttccttctccttctgaagcttgtgtcctggtggggagcagggggcacaggatgaaacatggaagtggggggaaggagatgccgaaagaaaactcccatatttgcctccatgcacacatttggggtttgggccctcctcatcctgtggatgggctagcccttctcagaggtggggtctgaggagagagggaggggaatgaaggcccccacgcctacctagtcctacgtctgagcgttgacctagaggtcctcccaggcttacgcctaccctgcagggcccccctcctctcgtctccgcccctgacaccctgtccactggtcttcctgcagtcatcctgccagcctccagcatggaggaggccaccgactgtgcaggtaaaagaaaccggacctacctcatgctgcggtcctcccagccctccggcaccccactccaaagtctggactctttccacatcctgctccagacagccaagctttgttggggtccccactgctttgagatggtgtgtagggtggtctgggcagttccctccatgcccc

SEQ ID NO: 30366 - DNA, 2300 bp, Homo sapien
ggattgggaccagccaggaaggctgaaagggaggctgcagactggaaaggggactagggccttcttctctaaagagtctgcccttttggcccttgtgagatggggccatgtcctacctctacgtccttagtcctgagcacagcatgatatatagaagaaggctctcaatacatgtctgaaggaggaataaatgaacggatggatgagcgagtctgcctgagatgacctgtttaggagaagatatttctatgtcactgtccagccctttctgacagcagtagaaaatacatcggcccagagacagactagatctaagaagctagggctcagaggggcatctgtctctgtcccctcccaccccgccaggaatggggcgtggaccccgtggtcatcgtgggcgctgtgcagcacgtcctgtggcatcggcttccaggtccgccagcgaagttgcagcaaccctgctccccgccacgggggccgcatctgcgtgggcaagagccgggaggaacggtgagggagaacaggcttgctctgaggtcccagactaaccgggccccccagaaagtggcctggattctcctcgtgatcccggggactctcgtcctttccggtcttgcactcccagggacctctcgtcagggaagggggtccccctccctggattgacgcctctcccccgaccccaggttctgtaatgagaacacgccttgcccggtgcccatcttctgggcttcctggggctcctggagcaagtgcagcagcaactgtggagggggcatgcagtcgcggcgtcgggcctgcgagaacggcaactcctgcctgggctgcggcgtggtgagggttggggccgtgggccaggggcgcggtgtagggtactggagccgaggggagggcgggcctggaggccgtggggttctaaagctgcctctgccgccacccgcaggagttcaagacgtgcaaccccgagggctgccccgaagtgcggcgcaacaccccctggacgccgtggctgcccgtgaacgtgacgcagggcggggcacggcaggagcagcggttccgcttcacctgccgcgcgccccttgcagacccgcacggcctgcagttcggcaggagaaggaccgagacgaggacctgtcccgcggacggctccggctcctgcgacaccgacggtaccccgcgcccggcgccccctccttcctctctcccagccccggagcggtgagggcgggggcgggagccccggggaggcccaggccggggtcggggtggccgggcgcccagtcgctgaggcctagcccctccgcagccctggtggaggtcctcctgcgcagcgggagcacctccccgcacacggtgagcgggggctgggccgcctggggcccgtggtcgtcctgctcccgggactgcgagctgggcttccgcgtccgcaagagaacgtgcactaacccggagccccgcaacgggggcctgccctgcgtgggcgatgctgccgagtaccaggactgcaacccccaggcttgcccaggtaaccctgcacggaaggaatccttggcctagcgaaaccctgtcatcctggaggcccccttccccgccccaggcctacccaggaaccccaatgcccaggtgaccccttctccctgccaactctgtgctagggacccccagagcaaatttctgccccggccgtagatgcaatggctactccggtggagtacggcctcaacttatcctccctgtccctttttttttttcacctttcttagtgagttagacaggtaagaagcttgattggaggtggagtcggtctctctccctccgggtgtctctgctgcttcctgcgtttccctcacctgccgcatggagtgggggcactccctaacagtggactgttgggtggcgggtggatcgggtggatgttgaggtcactgtggctcagggcagagtggtctgggctggtatgggatggaagaccgtcttgggccctggctgcccctacagcccctcacacaccccgtccccttgcagttcggggtgcttggtcctgctggacctcatggtctccatgctcagcttcctgtggtgggggtcactatcaacgcacccgttcctgcaccagccccgcaccctccccaggtgaggacatctgtctcgggctgcacacggaggaggcactatgtgccacacaggcctgcccaggtatgaggcacatcccgccagggctgggaagcgacatggagccctctgatccccaccagggggtccctgggcagttaacctcatcctacccacaatccccagaa

SEQ ID NO: 30367 - DNA, 2300 bp, Homo sapien
aggccattcccttttcttaccttttggtctctggagaaacttgtcctgttctactcaggcctccatttgttcatttgggattctgatggttgttgctgacccagccaccctctgccatggtccctgggttctgttccagaaaaccccagactaacatttttcccaggcaagcagctctctccacccccaccacccgatgtcctgcttctcacagggtccctccagccctggccatggtcctggtttccagcttggcttgccctgggttacgttctgcctctttggctggactcacttttccaacctgacatgttgcccctctgcctcttctctctgggtttacaccccggcttccctcctgctaaacacccctctcagctccttccagctaggcccttcccctttaagcagctcacctggaggcctccttcccactgcaagagccactacctccgtttcccaggattcagtagaagaagaaataaaggatccagcatctctgagggccaggcatcgtgggtggcacagtacccatttcatccaatttgatttctcacaacagccctatgaagtagatattaatattcccacttgtcacacagggaaaccgagtctcagagatttagcagcttgctcaaggtcacacaattgatacatttacactcctggtcctgcctaacccctgagccaaggcagtcaaccacaatagtaagctgcctaggcggtcacctctcatggtcaagccaataacccttaggactagggtggcacagcctgtggtgatctgtctccaaagagctcctcccagtaccaaatccctcactgtttaccttgttctccatttctccctacagacccatcagcacacacccatcatggcagggaaacgtaggaaggagaagcaggggcctccccactttcacaggccaagaaagagtaatcacttttgtactcgttgagaaccactataattgtttgcaaagaaggaggtaaatatgaaagccatagatggggtcctggcctcctctgtggtagccaagatatgaaacagagaggtgttcagacctacaggtggctaatcttacaggagagggagagacgagaggctgtggaatatcctctactccccactatactctctgcagtcctggtttccctccaaatgaattgtgcaggcagcctggagttaccactcgctcttgttatctgtggggtgtcttggtgggcagcacagaggagggaaggttgaggaagtcgggctgtagtggtgccgggctgatggcacactccagaagggcttgctgtcctcccagcccaggacccgcaggaagcctggtgaagaggatatggctctgagatggggccaggtggggagaggcttctgaggcttatggagaatgggtgtggggacaggtgggcttgaggtgggggggccaatgaccaaaatgggagcatgaaaggacctgggctgggaaaaggaggggcgatgccgctgactatttcgtgaaatgcttcttccaaagttgttccccaagagtattcagcagggggagctgactgctgacagcagcagctgtgggggaggcaggagcgggaggggtggcattatcaccctcccagagcgggtggcaagggggcggggaggaagggatggtgtctcctgcctgttctggattctgtgtctctcaccgcccatccccctgtctccaaacccaggaggagagagggattgcatgaaattagagagggaccgatagatactctgggaagatgcacacactgcttctcaccctcctctcttgctcacatgcacacatacagtctctcacacactcttacacacactctttctcttcctcgctgtctcactctctaagccagggcattacaccactgctctctggtccagccaaagttggagtattcctgggacaaataatccaccccacgaggataaatcatcctaaaccatcctcaggcagctttgaggaaacacgggagagggagccagcccttgtggggtggccagggcttggccagctgggaggacagtctggcactggtgattggtgtgtcacagccgtgctgcgagctgcttccagtgcttttgtctggtgctgggagtgaggctcagcagtgtgagggacaattggagatgctcgggggcaggctgccgcgttgtgtcctgcttttctgcggccagaccaagccgtctggagctgctggtcaggttttcttgctgacctcacctgaccacagtggcctgggtggactctacagggaaatgttgttttctccct

SEQ ID NO: 30368 - DNA, 2300 bp, Homo sapien
ggcattttgtctattctcccaaccagacaaattggaagctctcctgttcattccctggtcctgcagtatggaatagcttcgtggttttttgtgttaattaaaaggtatctctatattgcacatacttctattttttgtgatgacaaaaacattccccatggctctgcagggaatgggggttggggggggggcacgctcattgcagtggaaaggttccacggtggagatcaggagacctatccctatctcagcctgggactctgggagaatggtccagagctcattgtccttgttgataaaatgatagatttggactcaatatcccatgctgcctcttccaacttgatttttaccccagactgggctaccagactggtatgcccacacatgcccgtttcctttcttttcttctctgcatctctgcctttgtgtccagagcgtgttttccctttgcaagtttctctccattctgcacattatgagtttcagcatttctgttgccctagaaagtctatctttgagatcttgcactgtttctctttttacagtgtctcataaactcccttcttggattcagaaccaccctttctttcccattatcctgtcaaactgcttcttgccatggtccaggggtaggaggatggcaggcaggaggtgcttctctggggctcttagtgtctcaattcttctgctttatctgggttttcctttacccagaattttattatgtaaaatgcttcactcagactttgttctaattatccaatttttggcatactctagaaagtcttttgatattttccttcctccaacttatctatttttatttcatagttctctttggttatctcttagaatcacactttcctggttttaatttttcaaatcctttgtctttctcactcgttcttaggtcacctttttttacattttcaaatatattttttgttcagcagagggctcccttcccatccctcttgcagcccgggcagctaggatttgaagcttgccccttgaatctttctctcccgccttctagccatcagaaacactagatcacttaaacttgtaaacaattcggcctcgctccttgtgattgcgctaaaccttccgtcctcagctgagaacgctccaccacctccccggatcgctcatctcttggctgccctcccactgttcctgatgttattttactccccgtatcccctactcgttcttcacaattctgtagggtgcgtattactaaccccagtttacagctgaggaaactgaggcttggagaggttcgctcggtatcgtacagtttgcaaggttaaccctaatccggccagttctggctttccagcccagcccagcagcctagcctccctctctgccgctgcaggttataacggctctcccccgttttacacgaggtcccttccccttcaaatccacaggcaggaagatcgttccgaactgacggggctggggaatgtgggagtccggagtggggtttgggggagcttcctcaggccctgagtgttggggtgggcaggccgcgccgatggccctcggggatgtcacattcgagatggggtgaccgagaacggcaaggcgggatgtggcaaacggcggcaagtgctcggagtcctaggtcttgccgccggaatgccggccggggaaggggcttcggcccaccgggctggtcaccacactcggcaggcccggggcgggagtcggccgagcagccgcgggatgcagggcgccccctcgcgctcctccgcgcgcctcgaggctggcgggtgcagcgcccgccgcggcaggtctgctccagccccctcctctttttcgctcccgctcccctccttctctccctttgcttgcaactcctcccccaccgccccctccctccttctgctcccgcggtctcctcctccctgctctctccgagcgccgggtcgggagctagttggagcgcgggggttggtgccagagcccagctccgccgagccgggcgggtcggcagcgcatccagcggctgctgggagcccgagcgcagcgggcgcgggcccgggtggggactgcaccggagcgctgagagctggaggccgttcctgcgcggccgccccattcccagaccggccgccagcccatctggttagctcccgccgctccgcgccgcccgggagtcgggagccgcggggaaccgggcacctgcacccgcctctgggaggtgagtcccgggagccccgggcgcttcccctgcgcgggttggggctgcaacttgcaaacttcagcaactcgggtgggtatcgggg

SEQ ID NO: 30369 - DNA, 2300 bp, Homo sapien
tgtacacacacacacacacatagaggggagagagagagagagagagagagagagagagagagagagagagagagagagagagatggcctcttgggagagcctgcactcattttttagctttatctcccagaaaatgccctcaggtgggaggaagaagacagtgttgtgctcctagcttttccaccctttcctgctcttgagcatgagaatttggatctatttcttaaactctttcaaccttagttcaagataagtttggaatttctaggtcaagagtgaatcctaaaaactccgtcaccccctatattcaccgctctttagcttgtttgcttgagataacactgtgttaattactatatttccattctgcttaattacaatgtttcggtagaagaagaattgctcctaacagaagcaattatcttataggttattgcaaaggtctaaggaaggtggcagaagctggttgtgatactgtggtgatggaatcaatgctccaggttttgttccaagtaaatgattcagagattctaaccaggctgggtttgccaaagagcaggtggtaagccaggccagtaaagaaactgtctcttccggagggttgggcttctgaagctctcttgtattgagagctcttgagtaatcactgttaatcaatacaatgctttaggatgcaattaggattaattagcccaatgttgctagctgccctgctacttggtctgtctctttgggtgcctccttgtcctggctcctgcttcccctgaaaaggaaaatttccctctttgtgtccccagcctggagtctcctctcttcccttcctgtgccaagcccccaaaccccctctccactttataacatggagagggagagccaggaaaggccttgacatgatagtgggaagaaaagaatgaacacaatcaaaacatggtagcaaacaagagggcaggtgagagaatgtgtgaagggtggagaatattttggttatctttcaagggagagctgtggctgacagagccactcagaaggcattttgtctattctcccaaccagacaaattggaagctctcctgttcattccctggtcctgcagtatggaatagcttcgtggttttttgtgttaattaaaaggtatctctatattgcacatacttctattttttgtgatgacaaaaacattccccatggctctgcagggaatgggggttggggggggggcacgctcattgcagtggaaaggttccacggtggagatcaggagacctatccctatctcagcctgggactctgggagaatggtccagagctcattgtccttgttgataaaatgatagatttggactcaatatcccatgctgcctcttccaacttgatttttaccccagactgggctaccagactggtatgcccacacatgcccgtttcctttcttttcttctctgcatctctgcctttgtgtccagagcgtgttttccctttgcaagtttctctccattctgcacattatgagtttcagcatttctgttgccctagaaagtctatctttgagatcttgcactgtttctctttttacagtgtctcataaactcccttcttggattcagaaccaccctttctttcccattatcctgtcaaactgcttcttgccatggtccaggggtaggaggatggcaggcaggaggtgcttctctggggctcttagtgtctcaattcttctgctttatctgggttttcctttacccagaattttattatgtaaaatgcttcactcagactttgttctaattatccaatttttggcatactctagaaagtcttttgatattttccttcctccaacttatctatttttatttcatagttctctttggttatctcttagaatcacactttcctggttttaatttttcaaatcctttgtctttctcactcgttcttaggtcacctttttttacattttcaaatatattttttgttcagcagagggctcccttcccatccctcttgcagcccgggcagctaggatttgaagcttgccccttgaatctttctctcccgccttctagccatcagaaacactagatcacttaaacttgtaaacaattcggcctcgctccttgtgattgcgctaaaccttccgtcctcagctgagaacgctccaccacctccccggatcgctcatctcttggctgccctcccactgttcctgatgttattttactccccgtatcccctactcgttcttcacaattctgtagggtgcgtattactaaccccagtttacagctgaggaaactgag

SEQ ID NO: 30370 - DNA, 2300 bp, Homo sapien
gaagcaggcacactctttcagaaactgttacccttccctaggtgatagtcacttagacttgggaggtggcaggagagatatattctggaggtaaaattgacaggatgtggtgaggggttggatgggcctgttgtgaataggaagcgagtaatggataacttctaagttttgagctttgactctcctgacagaaggcaaggacctttcagctataacttaccaacctctgactgtgctgttctcttgttcatctcactactggatatcttgagcctcaggacatagtaagtgttcaataaacattcttgaatgtatgaactgactgcatgcaagaatgctttagcacagcagggcccaacctttttgtcaccagggaccggttttgtggaagacaagttttccacagatggtggggggacaggggatggttttgggatgaaactgttctatctcggatcatcaggcattagattctcataaggcacccacaacctagatttcttgaatgtgcagttcacaatagagttcacactcctatgagaatctaatgccaccactgatctgacaggaggcagagctcaggtggtaatgctcgctggcccacagcttgcctcctggttcctaacaggccacagactgtccagaggcccagcgtttggggacccctgctttagcacagggaatgggttcaataaagagtttttttcttttgaaaatttttactcaggtaaaattcacataacatcaattaaccattttaaagtgtacagtttagtggcatttagtaccttcacaatgttgtggaaccatcatctccatctagttccaaaatgttttatcactcccaaaggagtccctatactcattaagcagtcattccccattccttcctccccacccccactactatgctttctgtctctgtggatttacctattctaaatatttcataagatgtaatcacatcatatgtgactttttgtgtctggcttctttcattagcatacatttctgagattcattcattgtagaatgtattagcattttattctctcccccccacctttttttttttttttttttttgagacagggtctcaccctgtggcctaggctggggtgcagtggcatgatcttggctcactgcagtctccatatcccaggttcaagcaatcctcccgccttagcctcccaagtagttggaactacagtcccttgccaccacaccagctattttattttattttatttttatttttagcagagatgaggtcttgctatgttgcccaggctggtttcaaactcctagtcttacacgattctgctgcctcagctttccaaagtgttgggattacagtcatgagctgccctgctgggccactttattccttttaatggctaaataacattccattagatggatgtatcacactttgtttacccattcatcctttgacagacgttagagttgtttctaccttttggttattgtaaatagtgttgctgtgaacactggtgtacgtgcatttgtctgaatacctgttttcaattcttttgggtattagcctaagggtggaattgctggtcatatagtaatctatgtttaactttttgaggaaccaccagattgttttccaacagctcaataatgttttactgaagttaaatagaataagcaggagggagtctgggaggcagggatgagggcttttcctgtccttcacaggcagccctggactctgccatttaccggctgtgtgatctggatcaacgtacttaaattccctgcgctgcctcctaatcctcaaagtggagaaaataaaacctaatttctgtgagctgcgtgagatactgtttctgaagctccaggcacagagtaagcccccgctcattaattgccttcccttactccctgaccttgccttttcgcacttcactcgctgccacgtggcctcggagcccagtccgcacccgcagcccccagctgagccaggctgcagactacaactcccagcgagcacttcttcccggccgcctctccccagctgctgcgcatgctttggcagacgtggcaccgggaactcggaggcggggagcggctgggaagtggccgtggtggttggccgcggtggagctagcaggcgggcgggcgggagcgggcgccggagtggagaaaggagccagcggtgggcagcgctgctgggatggcgcgggccgggccggcgtggctgctgctggcaatctgggtgagactgtggggcagggatccgggccgggccagcacgtgtgtcccgcgtgccc

SEQ ID NO: 30371 - DNA, 2300 bp, Homo sapien
ttatttaggtaacacatggctcatgatgatgctaaatgttcatttctggaaagtgatattcttgtcattcaaaataatgatgaccttgatacctctacagcttatgatggggggatcccaagtggggtctagtcagaccgtgaactcccaaagtcatctaaccctatgtgcatttttctggaagaagggtttaccactttgatcatgatctccacaatgtctgactgcaggggacattaagaatatctgctgtggagaacaaggccaggaacagccaggctgtcttgcccagcccaggggcagcctctgggggggccgagctcagcagtcccagaggagcccttaggagcacttttggggctatgtgccttgctcagccctggcagcggaattctgcactgctgaattgagcatggggacgtcctcatttctctgaggctgcccctgccctcctgactgggtcctctgtcctctgtctctaacttgcccacatgtgtcctttcatctgccacctccaggaggtcttctcaagcccctggtcaacccaggagttgtctactaattatttaattaggtctcttcattgctgaccagtaaatatttatcatgtatctattaaatggtgatccttttgcttcatggggaggtacaaggtaaaaaaaaacctcaggtcccacctttagagagtcaccatctggggctgggcatggtggctcacacctgtaatctcagcactttgggaggccaaggtgggtggatcacaggtcaggagatcgagaccatcctggctaacacagtgaaaccccatctctactaaaaatacaaaaaattagctgggcgtggtggcacatgcctgtagtcccagctactcgggaggctgaggcaggggaatcacttgaacccaggaggcggaggttgcagtgagctgacatcgtgtgccactgtactccagcctgggtgacagagcgagactccatctcaaaaaaaaaaaaaaaaaagagaggcactgtctggtacctagagcccagcatgatgagtgtgtagtgtgggtacaatatgtaatagggctacaagcagctgccggctcccctggggctgccagggcaggtggagtgctcttcctctggttcatcccttgaaggcatcatgtgtgccactctattcccctctggaccaaagaccatggtcctctctgtcattatgctggaagattctaagggctgatgccttttctaccctttcttctgcatcatagcccaacaggagtaggcagctccctagataatggcagcagaggtgcctgtatacccagcagttcctcctcttcttgttgtggagcctcccacttgagggttagcagtgtctctcttccttggatccacctgggaagagctgacatgttgatgtggctaagcactgtagccactccctgggctgcattccatgagggtcagtgcccttgaccgagtcatgtctccagtgctctgtccagaggaggagcttcacaacactgcctgggagctcaaggatcagtttggttttctgttatcagttaagtggggagtagccactccggggtcccttgtccctgggagggacagggtgaggatgagctgaggaagccaggtacaggcaggagtgaaatggagagattaagaacgagacaggttcatgtctcacctggagctgagttctgcagaaatggccttggaggaggagacaggagctttcacccctgccgggtgctcagctggaggcaggaaagccgattccgtagctcagtgggaggtctcctctgattacactgtttgactttctgtcttgctttcttcttgtctttctttttcctaacaatcagtagtagaattatagcgttctcagctcccacacagtggcacacccctgagaaggttgagtcacgacctgtcatccgctgatcctagttaatgcatggtccccgcacagccaggcttaccttctgagcagcctccatcctgagccagtctgcagacccctcacctcccagtccctccagcatcagaggccagaaagtactctttctattaaaatgaaaacaatgtacaaatgtcaaggtctgtcatttacacaaagtgcttaatttctttttaatgcatcaaattttattatttctgacatcttactgtgttcatgcagctgtaagaaaagcacagagcaggctgggcgcggtggctcacgcctgtaatcccagcactttgggaggccgaggtgggtggatcacgaggtcaggagatcgagaccatcctggctaacacagtgaa

SEQ ID NO: 30372 - DNA, 2300 bp, Homo sapien
attaacactaataattataacttattggttacccttgggtaaccaatattttacttctattaccttatatgattttttattttgaacattatgtaaatggaatcatatagtaatcttttttgtgtctgacttatttcactcaatttttatgattgtgaaattcatgcatgctttgcatatggttgtagattattgtctttcctgtatagtattctactatgtgaatattcttcttcctttttttttttttttttttttgagaaggagtcttgctctgttgcctaggctggagttcagcggcatgatcttggctcactgcaacctctgcctcccagtttaagcaattctcctacctcagcctcccaagtagctgggattacagatgcctacaaccatgcctggctaatttttttgtattttagttgagatggggtttcaccatgttggccaggctggtctcgaactcccaacctcaagtgatccacccccgcccccggcctcccaaagtgctgggattacaggcgtgagccatcgcgcctggtcagaatattctaaaatttatttatttcatgaacattcttatacatatgttttctggtgaatatatgaatacatttatgttgagtatatatctaggacaaaatttatgttagttcaggcctttcttctgaactctagacctacatatccaaatctacttgacatctccatttataggcatttcaaatttaacatattccaaaccatttgctcctctttctgtgttccatgagtcagtaaatggcttcttaatccatctagttacttaaggagtcatccttaatattcctttttgttgacccttcccggcaaaccaatccgttatgaagtcccttggataccatttctaatttatacatatcttgaaattatctacctctttctgtctctaactcccattacactagttcaagccccatcatttctggctttgcctgacgcaactgcctccaaatggctttccagcagcccttcttgcccttttccacactattctccacaaacagcctgagtgattcttaaatatgcaaataggatcctacttaatagtctttattagctgcccattgaccttgggctgagatgagacaagggccagaccatgctgactcttattggccacattacagatttcaggctgtattttggaagatatcttaaggtcaacgggcaaagtttctccttgctccctacactccatccacactgactcccttttagttcctagagcacaagaagttctttcatgccccgacaacctcacacaatatttccttggcggggaacattctctaaggctcttcaatatgcctgccgcttaaaaggcacttattcagaagtcttttccctgatagtccaaaattaattgatcattgcacccactaattttccctcccaatactgacaatttgtagttctgtaactatttatgctttaatatctcttgctccaattactccttaaattccatcaagtgttatgtccactcctgtaaccccgtgcttaacacggtgcttggcacatggtaaacagtcaggaaatgcctgtttaataatgcatgaccgatgcgaaggctggaaggggtcgcagggtcagcatctggcacttctctgccatggttagtttccttcttgtgtgtgggaatagacggggccaggtcttctccttgctcacccagagggggcttttctccctgtcccctttataagtgtctgctgtagggccgcgtgtgagagacaaaatgcctgcagaaacagggcggcgagcggaagagattggccctatttctgaagtcaacgtagttctgtcatcagaggatgctgtacttttctggcgcaggtgcgagagaagctgccaatctctcctggagcgggtgggactaaggagggccccgggagctggggggttgttgtgtccttcctgcagaacccgattggcctgggtgagctgagggaacgggggcgtggtttgattccgcgggcgcgagccacgttggacgcgccgcagcgtcgccgaaaggtccctcccaggccccacaatgcacttcggggcgcgtcactcggagcggcgggtcccgtctcgacaggtactccccggcccctcccagtcctcttcttcctttcttaggggtcgttcgaatccctgccggcctctcccctcccgctccctgcctctcgccacagcctcggccttcgccctcgggattgaagacctaccccacgggcaggagccaagtccgtgcctttgggatgggagtcggg

SEQ ID NO: 30373 - DNA, 2300 bp, Homo sapien
aagcaagtactataggcgtgtgccaccatgcccagctgatttttaattttttttatagagacagagcctcaccatgtttctaggttggtcttgaactcctggcctcaagcagtgttgggattatgggtataagccatggcaccccatccaatctgcttttaaatactaaaatgtgggtatttagaactgcaagttacaactcaccctcaaattaattcccagaatggttattgtgttgcagtgtacttctggaaagacaacagttttatagttaaataataaacgcttaaggggatagagtaagacattttcctactttcttacacttaggctaaatgttacaattgtgatttaataattaagtaaaacatggtaaaaaaaaaattaaagaggggtttatagtatagatatctcttcagggatcccaactttttcatgctactgcttttaggagagaaaaaaactagatgaatggaaaaaaacaccaattgggatatgtcacactgggacttcagtttgaagactccactgtagtaaaaagactaatttgcttctggatatttttctctttaaatgaatggagaggctgggcgtggtagctcatgcctgtaatcctagtactttgggaggctgaggtggacagatcacttcaggccaggagtttgagaccagcctggccaacatggcgaaacctcatctctactgaaaatacaaaaatgagctgggtgttgtggcgcatgcctgtaatcctagctactcgcgaggctgaggcatgagaattgcttgaatctgggaggtggaggttgcagtgaactgagatcgcaccactacactcgtctgggtgacacagtgagaccctgtctctgaaggagaaaaatattaaagggtaatgacacagtaacacctagagatttctcctttttcctcatgaaaagaggaaaaagggatagtgaacttaatgcattagatttattagttgggttaatttttattgtcagatcagttatcaccatgaatgggaagtcatattttgacttcacacagcagtgaaaactatcagctcctgatttacaagctttgtaacaactggttttctgtggtatttttttttatatatattactcattttttcctttttggaatgagataatattgacctagattaagtgggcaggtaaggattaatttagtctctaagatacaatatttttggaaaaatgcctgtgagatttttatcagatttttgaattttcaccagttgcctcaccactagtgaggaagcctttagtgacattgtgctttgatggcctgacagagaagagttatcacttaatcttagatagtgaacatgttttaatttaatgttttaaaaagtatgggccttagacaataagcaaattgtcaagccctatcccacagtcagtggttcagaattttgagggcagagctcagaaatctgcatttttaactaaactttcaacttcttatgcaagctaaagtttgagagccactgtgtattttatgaaaggttgagtgactgttgacctgagttccttcagactcaggcctgtgaagtcctttcatctgtttttgtaaagcaagaagagaatccaataaaataggccattaagatttactttctggtaaaaagattgagaacaacattaaaaccaatattcctttagctttaggatttattttaaataatttttttctgattataaaagtagtatatgtctactgtgaatattgagaacatttaggaaattataaaataataataaccaataataccatttcttagaggtgagcatattcttaatttggcatctttttctgcatccgtttttcaatccctttttccttctctttatcttcgtctctttatccttatgtttgtgtaaaacaacatttgcaatttttatcctacttttttctccttaacatgtaagcattttaccacattattaaactttctccacaaacataacttttagttgctgcattatattctgttatatgaatatactataatttacttaaccatcaccattttataggatatttagattgctttcagttatttgagtggaagaatgtctttctgtttaaaattttgcctggatttctgattatttttctcaagacaggtatatatttaaatttattgaggttaaaaggtatgccttcagactcttgttgaaattgccaaatcattttgagaactgtttgtaccagtttttacttccatctgtacttatgagaatgccagacagaagtattattttttaaaaagctaa

SEQ ID NO: 30374 - DNA, 2300 bp, Homo sapien
aatattaaagggtaatgacacagtaacacctagagatttctcctttttcctcatgaaaagaggaaaaagggatagtgaacttaatgcattagatttattagttgggttaatttttattgtcagatcagttatcaccatgaatgggaagtcatattttgacttcacacagcagtgaaaactatcagctcctgatttacaagctttgtaacaactggttttctgtggtatttttttttatatatattactcattttttcctttttggaatgagataatattgacctagattaagtgggcaggtaaggattaatttagtctctaagatacaatatttttggaaaaatgcctgtgagatttttatcagatttttgaattttcaccagttgcctcaccactagtgaggaagcctttagtgacattgtgctttgatggcctgacagagaagagttatcacttaatcttagatagtgaacatgttttaatttaatgttttaaaaagtatgggccttagacaataagcaaattgtcaagccctatcccacagtcagtggttcagaattttgagggcagagctcagaaatctgcatttttaactaaactttcaacttcttatgcaagctaaagtttgagagccactgtgtattttatgaaaggttgagtgactgttgacctgagttccttcagactcaggcctgtgaagtcctttcatctgtttttgtaaagcaagaagagaatccaataaaataggccattaagatttactttctggtaaaaagattgagaacaacattaaaaccaatattcctttagctttaggatttattttaaataatttttttctgattataaaagtagtatatgtctactgtgaatattgagaacatttaggaaattataaaataataataaccaataataccatttcttagaggtgagcatattcttaatttggcatctttttctgcatccgtttttcaatccctttttccttctctttatcttcgtctctttatccttatgtttgtgtaaaacaacatttgcaatttttatcctacttttttctccttaacatgtaagcattttaccacattattaaactttctccacaaacataacttttagttgctgcattatattctgttatatgaatatactataatttacttaaccatcaccattttataggatatttagattgctttcagttatttgagtggaagaatgtctttctgtttaaaattttgcctggatttctgattatttttctcaagacaggtatatatttaaatttattgaggttaaaaggtatgccttcagactcttgttgaaattgccaaatcattttgagaactgtttgtaccagtttttacttccatctgtacttatgagaatgccagacagaagtattattttttaaaaagctaatgtggctgggtgtggtggctcatgcctgtaatcccagcactgtggcaggcgcctatagtcccagccacatcctatgctgtggcatgggaacccaggctgaggcatgagaattgcttgaaccctggatgggggatgttgcagtcagccaagatggcgccactgcactccagcctgggtgacagagcaagatgctgtctcaaaaaaaaaaacaaaaaacaaaaaacaaaagctatatgttaagtgaagcatagtatgttgttttaattagttttttgttttttttttcctcctgagacggagtctcactctgtcgcccaggctggagctcagtgacgcgatttcggctcactgcaacctctgcctcccgggttcaagcaattctcctgcctcggcctcctgagtagctgggattacaggtgtgcaccaccacgcctggctaatttttgtatttttagtagagaaggggtttcatcatgttggccaggctggtctcaaactcctgatcttgtgatccaccctcctcagccacccaaagtgctgggattacaggtgtgagccaccacacctggccattttaattactattcttatattactagtaagttgaacatttttacatatgcttatcaagtttggctttaatttttatgtaacccaaattgttcattttgttttaggtcttctctgttggttgaaatgtctatgattttatctgcctcagtcattcgtgtcagagatggactgccactttctgcttctactgattatgaacaaagcacaggaatgcaggagtgcagaaagtattttaaaatgctttcgaggaaacttgctcaacttcctgatagatgtacactgaaaactggacattataacat

SEQ ID NO: 30375 - DNA, 2300 bp, Homo sapien
catgggagaaatggaaagggaataaccttgagtcccaagagcccaatttcaggaggaaagaaaaaaatccctttcctctcctcttcactctctccaactgaaatgaaaacgccgctttgctgatcaggggcaccagacaataatctctgtgactgcctggggagccctgcatgtgggtattttaaaccgtaggttttattattgttcaggtatggtgtggccaacagatcgggagacaaccaccgtggaaaagatagtttgttactcatggctcccaagaggagggcacatgccatgccatgccatgcgggggccacacggggaaatgccagggtcagtcaggaggcagagggagccagggagaaatgtgggcaagagcctttattgtggtttccagggaaggaacagagaggcggggtcagcaggtttaggattggcagtttgaataactacagcaggccctggagcctagaggctgtctctggttgttcagtacctgaccctggggtgattagggtaggaaagtaatggccttgagtataagaacccaataaagaaggtggttgggagtatggcctctggattggttggtttgcatatgaaaggtgcactcacaagcaagtcatttactgtctctaggaattggctaggcctgggaagagcagtcggtccctccagggtcagcgagaccccagatttcaaagtatcagagatgaaaaataaaaagtgctgggtgtggtggctcacacctgtaatcccagcactttgggaggccaaggcaggcagatcgcttgaggccagtagttttagaccagcctggccaacatcgtgaaaccccatctctactaaagatacaaaaaccagcccggcctggtggcaggtgcctgtagtcccagctacttgggaggctgagacacaagaattgcttgaacctgggaggtggaggttgcagtgagccaagatggcgccaccgcactctggcctggacgacaaagcgagcctctgactcaaaataaataaaataaaataaaatggagtaaaataaaataaaataaataaaataaaatggcatgatggtctagtggggaaggccacgggccttgcatttggtatggccctgctcaggcctggcaggaggcacctctcccctcctgtcctgctccctcctcacctctcacagatctctcaggtcctaaaggagagaaccaagttggtgttcagtcctctctgtgccggtgttctgggtctggaagcatttgcattccacacaagggaagaattctgacgtggaaaccctgcagcctgacatgccttgtccgtgcttctccatcctgtgctctagactggtgctcagagcctggccatgcagccaagggagtccgcggggcaaggctgctgcagcctggcggagggctggagtcccttggcatgaaaaccagagccacagcatgagagaggacaggactggggagcctgtgctgcttggcctcgccggccttcgctgagctgctctgttttcagggctgctccagcaggtactgcagcagcacggtgacaggtggcacttccagcagctgtcgcaggctctttcctctgccctgcccttctggcatcgccctaccattccagcagcactggtgaaacaaggggggcaggtttgtcagaaaactgaggcccagagttaggtgctgagaccccaagataaacacactgatcagaccacactggtgaggtctctttttcagagccagttgaagatggggtctgaatagatagaataaaacagaaatgtgtgtttcagcagagaggtctcctgcccagatgtgtccacatttggcttgactcctccagtctgttttccctgctggccaaggtagtgagccctggccttgtgatttttcccatcaggctccacctaatccaaaaattctcgagtgctgaactcagagtggacccacaacaccctcagagcccctgcggctgggagctcttgtctgagaagatggagcctcccacttctttccccagtggccttcccactcaggaggcctgtgctagtgtttattctgggcatagtgcacattcttctctctggaacacagctggaaagatggggcaaggcagaagctgggcctcagacacaggcaggggacatgggccgactgcccacctcctggcccctgaccatggtggagtgggaggtctggatggagcagtgagaaggtaagggctgaagatgctgccaggagggcctctgcttagtgttctgaactgaccggtggcttgaggggttaccttgc

SEQ ID NO: 30376 - DNA, 2300 bp, Homo sapien
gtggagataataaaagtaacctacttctcagtgctggtaaacatgcttataatagtgtgtagcacctggtaaaccctacgaagatttactcttttatagtcattctttcaacagaacaataagcacctggagtgattcccatccttggggtctgttatatgttaaactgtctcccaaaaaggatattgaaatcccaacccacagtacctatgacttatttgaaaatagggtctttgcaaatgacaatgttaagatgtcatcagggtgggccctaatccagtgtgactggtgtccttataaaaaggggaaatttggacacagagacagacatacgcagaggcaagatgacctgaagacagggagagaacaccatctacaagccaaggaacacctgaggctaccacaagccaggagagaggcagggaacagatttttccttctggggaaacagccctcagaaggaaccaactctgccaacgttttgattttggacttctggccttcagaactgtgagacaatagatttccgttgtttatgccactgagttggggaattttgctgcagtagccctagcagactagtgcaggatctgaagggggtatggtgtggccactgcccctcaccgctgccctgagctgcttgttaccccccagggacaaacagtgtcagaactgagcagaccggggtggcgaggctttggctggcctcaagcctctggcatctgtctcagatggtccaggctcttggccgtgtaggagaatggagatgcggccatctgtagggcctggggcacagatcactcacccctcacctcccaccctaccttcctgcctctcacctctttcttagcgcacttcctacctgctccaggcaggaggaaaaggagaaaggaggtaacaaatctctggagaggacaacccaaagcagggttttggcctgagcatctctacccgtcttctcgccatctcctggaggcttaactgtgatctctaagcgggaaatgatatgcctatctagggtgtatctgtgtgtctgtgcatgcatgtgagtgtggatagagaatgtccttcattaagctgctgtggcctcatgaccatgactcataaacttacaatcaagctctgctggacagaggagacctgtccccagggtgggtgatgccagcttctgatgtagcagccagtgccaaggccctccgcagcgcaccttggcagtctgccccgcctgctccctctaaagaacggtttgttcagtttcatttgaggaaacagatatgtcttgagcatctctgtatgtatagcccagggatacagtgatgaggatggtgcaggcttcacccacagggagctcatcatttgtgctgggtggaggggtgggggggtgtctacaacaactgcgcaaataatacaaggtagaataaaatgagcacgggggaagtgcaaggtgagagtcggagtgggaagagcgactcggaggaggaggggagctgagcagcagctggggagagctggatgggggagagcccagggaaggtttcatgaaggaggtcacttttgagaggggccgcgcagcaagagcctcgctggcagggggagcagtggaagcaaaggattggaagctggaatgtgccacgtatgtccgggtacacagagtcttccccggtgacccaagcacagggtcctccctggagcaggcaggagttgaggctggaatgtgacacatcatggttgccctcacatgctggggtgaggagtatctacagaaccgaagtgtaaaaggggatccactgaggtctgcaggcaggagtgcacggtcggttggacagggagcatttacaggattgaggaggctgatgcaagtctggcaacgtgggtatggggcctgaggtgggagtaggaaggaaacggtgaagggagagacatttctgttggaaaagtgacaggatttggcaagcgaggaagaggaggcgtggaagatgagccagagtgatggaatagtgctgccattcaaagagaagtgggtgggcggacggcacttccctggcctgtgggggcgcgtggaggggagggccttgagtgccacctgactgtgtgctcgtcagatgcatggagggcctggaatcatgatgaggggaggggatgcggtgctctctcgggcaccggctgcactatcagcgttccctggagaaacagaacccttaggatttatatagacatatagaaagatttactgtgggggattggctcatgccgttacggagactgagaagacccatgagctgttgtctgtaagctggagg

SEQ ID NO: 30377 - DNA, 2300 bp, Homo sapien
cagtttctgcatctataagctgggaatagctacacggtctctgtcctctgtctcatcctaggattactgacgggaaccaagtgagatttatgagactttacgaacaggcaaagagcgctttataaaagccaggtgtttccagtgttcactgtggggctttctcctggtaactacccaccaaagcctccctgtccgccccgccccggctgcatcggcctcacccactgcatcaccatcttttccatcactgtcttcctgcgtctcagaagtcctgtttctgcatctcccctgtccatttccgggtctggctctccggcccctgagacccctccagggactctgttctccttctccttgaggcactcgctgcccaggcgccccccacccggtgcgccctcctttggcacagccgccgggccagagaatcgcccaataagagcgccggactgtagtctgacagctccggaagcggccaatcgagccgggccagggaaggggggcgcagcgccggggctgaagttgggttaaatggggggagggggattaaagggggatacaaaagaggggagctaggactgggggcgctggagccctggccgggggcgggggaagaccgcgctccacccaggtctggtgacgggaccgcaggctggatgcggctcctagtcccagggagggaggggcgcagcgagaattttaggtgaggaaggggaactggggtgcccgcggccaggcctgaggatgcccgcggggcgccgaggctggggccatggccaggccgggggcggaggcggcctcgcgcggctgtgagccgaggcccgggcggcgcggggggcggggaggcagcgggaggaggggatgcggagggctctccggcggcggcgagcgggcgagaagggaggagcggcgcgagcggccggagcggcgcagggcccgaagcgtgcatggcgcgccctgagccgggctcccgcgggcccccccggagcgcctctcgggcgccgcggctctcaggcgggcccctctgggccggctgcttctgagccccggcgctggatctctggatgccttactccccgggagaagcctgcctgcgtcggggcagaaccgcggcagcgctgcgccggattccgtcctccgcctagtcgttccgcgccggccgcggtgggcccgcagccggcgacgaggagcttggggcttgcgaagcgggcgcgacagctctccgggccggcaggtcccggccggccccgctccgtttgcgggaaagggagaggcgagaggggaagggccgcaccgcaggagccggtccctgacccggaccccgccccctgcgcggacgcgccgaaggctcggctcggctttcgccggggccacgcatccactctcgccgcgagaggtgggggatgcgggcaacggcccccccgggctccaggaccctcccccccggggctccggagctgttgctccgcccgtcgccccctcccccgtcctctccacctcccatcccacctccccacccctcgtaagaaaataatgctggctggcgcccgcacctcccagtcgctcccagtccgctgcgaggaaagcgcacccgcagtgtctcttcgccgggacccccgccgagccgccctcgccgccgccgagccccgagagcagctgggctccgcttaggcggaatcagcgagcgccgcgcccgggcactgccggcccgaggaggcaccgcccgcaaggacaccactccgtcccgtctcgtccgcaactccggccctcgtcgagctcgacgcgagccaggatcccggacgtctctccgcgtgcggcgcagcagcagccagaccagtccctgcgaccccacctcggaggcaactccatttcggacctgggacttctgacgcggatcctcagctacttctcacctcggggctgtgccctcctcctccgctcaggacgggggtgccaagatgccccgctgcagcgcagggccccgggccgcccccgacgtgtgaccctagcctggtccccctgctcggccgtccgccctccccttggagacccccggcccggcttccgggggaggaggaaggagacgacgaggccgagggggggatgtccggctccaaaagcgtgagccccccgggctacgcggcgcagaagactgcggcgccggcgccccggggaggccccgaacaccgctctgcgtggggcgaggccgattcccgcgcgaatggctacccccatgcccccgggggctctgcccgcggctccaccaagaaacccgggggggcggtgaccccgcagcagcagca

SEQ ID NO: 30378 - DNA, 2300 bp, Homo sapien
gcatccctagtcttttttaaaagacttatgccatcgtcttcacagctgggctctgggaacagactgctttcatacttagcctgagtctgagtttgtcatagttcttttggctgaggtctaacttggggacggatgggaggtgaataataaccaatctctaggctgggtcaaagcaggaggttttgggcggttttgggttttgtttgttttttttttttacctatttgaaggtcactaagactacacggaaactatcaggcaccataaagaagggaactgagtctcggagtaacccacttaggactgaattcatttgctccgcaattatttattgagctcttacttgtgaaaagcacaaagtgtttttggaaaacagaagatgaataaacacgttccctgctttgaagatgtttacagtacaaaatattagaggaacttcctattataacccagagctctttaggcaaggcttccactcttagctgtaaaaacatatctccttaagataaagaggattataaaatacatcagaaagcaaagtgtgcttttatatttatattatattttgttatagatggattcaagtaaggatttggagacagactgaaaaatcttaccatgaaagctttagaggtggttagcttttgcttttctttggctaatatgagagcaccaggaaaacagaaagtactcttgctcttgacagtataaaattcttattatttttagagaatagtaactgcatttatgaaattctttgtcagagcaatttagttaatagatatgtaaatgactacttatttcattgtgtaggtggaccgctccatgtacactttctgaggaagaacataagtgctaaaaactattaacattgcaaatggaaagaagcaaaagttaaggctagaatgccattcccttgctgtattagatattaggagtgggacagaaagtccatcttgtcatcaagatttgttcggtttatggggtgggatttcttatttacatcccactcttggacggtcttttttttttttttttttgatgcatggaaactaatataaattggggtgcaagggtgtttcttgctgattttcaagcacaaaaggtcattacaaacccagctgggaagggactgggggaggtgctgaaagttaaaaccacggcagtaaattttcaacacaagggaatacctcctaaaaatcacctaggggctcttttaaacctttattgtttttttcagcataaaaacaacttcagaggagactggggatttcaaagctctctggctctaactgcctcctgggaacagcatggaagcttccctaatcatggaggagttaatgcaggcctctgggggaagaagtctctaatgggaggaaataaatgggcccttgccttgcagatggtcccaagccctcccctcactggaattcttcttgctctgtgagctagcctcatcttcagttgtgcttttttttttttttttgagacagtctcactctgtcacccaggctggggtgcagtggcgctatctcggctcactgcaaactccgcctcccgggttcaagcgactctcctgcctcagcctcctgagtaactgggattacaggcatacgccaccacacttggctaattttctgtattttttgtggaaacagggtgttaccatgttggccaggctggtctcaaactcctgacctcatgtgatccacccacctcagcctcccaaagtgctgggattacaggcgtgaccactgacatcagtccacattctccgcatgaggctggcaaacctgtaaatccccacccctcgtgtttgttacccccaccctgctgctctcactcctggtgactgaggccctttgcacttggccctcatctctgggatgtacacagctgtcatcctaggccccagctctacacgcaagctctttctgccatacaggggtcctgaagatagagaccagcggctgtgccgactcactccctggctctgccgggtgctgcacactgtcttcattaacgttgtctgtgtgttttttttcttttgttttcctcttccttcaggtacagagtgaagacagtgtcctcctgtttgttattgcatggacgatcacggaaatcatccgttactccttttatacattcagtctattaaaccatctgccttacctcatcaaatgggccaggtaaaaaagcacatttcaaaaggctcacttttgaaatgatctgtcattgaatttgccctttattgcctaaatattgcctcaaagtttctaaaaataaaattgagacgggtt

SEQ ID NO: 30379 - DNA, 2300 bp, Homo sapien
ccactgatgtgatataaagcttgtatctgtactagttcttcattgacctgtgagtcaagagaaatgatttctagatctggaacttctactaacaagttctatgatctcatgcaagtcacaacttctctgagcctaggttccaacacctaccatttctaatactagcaatacatatatgatcctcccacgatatattttcttcttcgtgaaaaaaaagcaaggtgctgaactgtaaaaatattaatatattggcatttgtcttattttaaaaagggatagggggatgtataaacatatttgcttgcatcagcatcttaaggatacacaaaattaactgcctcgagggaggggagctgggtagaagggaaaggtgggaggaaagattttcactgtattccctcatgtttttcatttttaaccctaacaatgtatcacctactttaaataaaaatggatgttcactatacaattctttcaactcttctgtatgtttgaaatttttcataataaaatgttaggacttcttaaaaaattacaaatgaagataacttaaaaatatataactgtctgatgctgtgatcctcctcaccaaaatgacaagataaagaattgcagagctgaaggaaccttcatcacccagaccaaccctttagttttacaaatgaaaaaacggaggctagagaaataagatgatttatccaaagtcacacagctagttagtggcagagcttgaactaaaaacccgccgggataagggatgcactgaaatgaaagagacagaagatgggtaaaaccgtttcgagggtccattctccccctttccagtaactctgccttctactccccagtttcttccccaccccaacccatcctaaaagtctaaactcatctaaagcctagctctgctcatgtcgctggccaaaaactttgaacgctttcccaatacctttcagattaaagcgcagcccagattttgaaaacagccgcccaaatgaatggtcactctgcagccacagctcctccactccccatgctggcgccgttcaacatccgaatctggccgcccaggacgggctccgcgccgcaggtagtccggccgctgcccccggccccgcacctgtggccagccccacctttcctcccgcggccctcgcgagccagcgcccggcagccgtccccgcgccccagtgcctgggaacttggctcgacccccagcgcaggagggagctcgcgggcagccaccggggccgattcagcgctcggccgccctcagcgcccaggtaccgggtcccgggcaccccccgccgggaatgcactgcctgcggcgggccgcgccgatcctatccgccccgccgctggccgcagggctccctccccggccgcgctggctccccgcctccccgagccccagcctcacccggctgtcatcaccacattgtagatgaccaggtacgccgtggccaggggccccgggcccttcttcttccgcgtgccgctggcgtccccggccccggccctgccaccgccgcccccattccccttcgctgctgcagtcgccgccactgccgccatgtcaagtgcccgaagcccgctctcctagcgcgagcggctcgggccggactacgcgaggagagggggcggaggaagggacgaggggcaggcggggccagggccgcggggcggagccgggacagggtccacggcagccgccatcttggctgagggcaaagacgctcctggcgctcccgtctttcggcttgcctcagttgccactgccatcttggatcagggtaattcccgcctcttgggcgctcccggttacaacctcggcgccatcttggattagttcaatgtagccaccctctccaggcccgctgcttctgccagctggatgttgcgtcgtccctcgctattcgccctcctataatcactgcttccatgttgaatcaaaacaattatgctttcgttctcccttcttcaattgccctatcttcacacctgaacactattgctccggtatcctgccattttggatcagggcggttgacggtggattcacttcccatcagcccttgaggctgcagggaccagccctttggtaggtgcgctttgcttcctaacccgttgccgggttggagattccacctccgaagttttctttctgacttttgattttacattcctagtacagtggagaagcccaggcggcctagaatccagtgtcgtccgtgagtgcttggctggtgttcaagtgcatcttccagcctgagaccgcgtggactcgctcatcgtgagggcga

SEQ ID NO: 30380 - DNA, 2300 bp, Homo sapien
acagtgtcatggatttaaataccaccaccaccctcagaactctgagaaaagataatacctcaaacagctctgagctgtctgagctatgtgaagtatgcaaaaatttatcaggcccagagacaagagtttgcctgggggcaactgtttagacattttgttcctgactagcagcctcacccattatcttcatgttcctggaatctgtgatacaaagaatagtttatagccaatcaatagctaatgtaattttaatgtaaattcttagtaaacaacttagaagctgcctctttttcctttaaaaacccactcataaccgctgctaatcagagtgtatatttagggtaacttgaatctatgctcccaggtagccatcttcaacctttatgcttgaataaacttcctttaaactagattcttaccttttttattattttaggttgacaactctcaaatttatatctctagcccattggacttccttcccgaacctcagggtctaaatttaattgtctatccagcctctccacttggatgtttaataaggatttcaaattcaacatataaaaaacaaaattcccgacttccgccttaaaaatggtttcttacaagttgctcaaaacgcctttgacctcacactccaaaactaacatatccacaaatcttataattctacttctaaaatacgcacagaattcattgttgttttcatcacctcgatttccaccactctggcccacaccactatcaccatggctggattattgtaataacttcctgataccacttttcaccaactaatacgagcattttcgtctggttccctcaggggtccttaagccccaggctgcggatagaaccaatccctggcctgttaggaaccaggaggcacagcaggaggtgagcagcaagcaagggagcattacctcctgagctccgcctccctcagatcagcggtggcatcagattctcataggagcggggaacctattgtgaactgcgcattggagggatctaagttgtgtgctccttatgagaatctaatgataaatgtaatgcctttgaatcatcctgaaaccatcatccacccccccaccacgaaaccggtccctgttgaccaaaaggttgggggccgctgctctatataatccctgggagactgacgactttgtctctttcacttagtgccatgaactccagggcaactttgtggacgctccataaacacttgctggaatgaacccataaatattttatactaccacatatacagtaatacatttaaggagctgcttgggtgtgtaaaaaattgcaggggacgtttacaaataaagaacctcctgaaacaaagcaatgaatggaaagtgggatcagctggttgaagcaatgcccacaagctgctccagcttcccaaagcagagaggttttccacctaagccaacatccttttatttttagtcactatagctataaatctactcccttaccccgcacctcactctcagccgacagcccaatgggcttatcctcctctcgccctcacgatgagcgagtccacgcggtctcaggctggaagatgcacttgaacaccagccaagcactcacggacgacactggattctaggccgcctgggcttctccactgtactaggaatgtaaaatcaaaagtcagaaagaaaacttcggaggtggaatctccaacccggcaacgggttaggaagcaaagcgcacctaccaaagggctggtccctgcagcctcaagggctgatgggaagtgaatccaccgtcaaccgccctgatccaaaatggcaggataccggagcaatagtgttcaggtgtgaagatagggcaattgaagaagggagaacgaaagcataattgttttgattcaacatggaagcagtgattataggagggcgaatagcgagggacgacgcaacatccagctggcagaagcagcgggcctggagagggtggctacattgaactaatccaagatggcgccgaggttgtaaccgggagcgcccaagaggcgggaattaccctgatccaagatggcagtggcaactgaggcaagccgaaagacgggagcgccaggagcgtctttgccctcagccaagatggcggctgccgtggaccctgtcccggctccgccccgcggccctggccccgcctgcccctcgtcccttcctccgccccctctcctcgcgtagtccggcccgagccgctcgcgctaggagagcgggcttcgggcacttgacatggcggcagtggcggcgactgcagcagcgaaggggaatggg

SEQ ID NO: 30381 - DNA, 2300 bp, Homo sapien
gatatattcatttctagttctgacaaataacttcctcggcaattttttttcacaaatcaattcccaaatatttttctatgttttagaaattatatgctggatatctccatcttttagaaaagttctccctatgtgagacatatttatttgttaatatatttactacttcctctgaaatactataactcttttgtttcctcattctgatagcttcattttagtcattttgttatgaaataaaatctggaagaaaaaagacatcgtctcgccacaccacacaggtgaagacagtcctcatcagtcccaatcctgatgtctggaattggggagcccatgggctcaaggcgggtgttccttgctacacatttatggatataaaccagagtcgttctgtagaggtctggaactgcaggaagattagaatcttctgctcccaggctactgaggcccagagaggggaactgacttgcacaaggtctcccagcaattagggttagagaactaacctgtcccttgttgggaatgaaccctctgggtttagaggctcctagcccaggacaaaccaatctgtgttggataaagggaatggagagcagagaagggccgagtctgagaatcgggttgattaggaagcaggctggtctgacattgactacgtagggagggctgccatggctggtaccacctcttacctgttcctgagggcagggtaacctcccatgggaagagctgggtctctctctctctacactttgtctagcacaacaaacaggttgaaccagtaacatctcccagaagagcatgaaaggttgccacgtggcctgagcctgcagaggcattctccgcagggccacacggtggttctgcgcacagttaagttgttcagttttcatctctcaccatcttcccctcctcatcacctccacctggggctgcgtggattctgttcagcgacccagcctcactgtggtggcagaggccagaaacatacccacaccatacagtgtgatgtgtgtgagaagggatggccaggggacagagcaaggtgaaatgtctgtccaaagtgcatgagagcagtctgcagcaaggatggcaggaggcatgacagtaaggtcatcccgctcactgcagtaggtctcctctttaaccatacacacacgcacacaattttctgtatgtttccttagcacccagaagttattcactttcaaaatgatcagtctttttactgaagcttactggctttccaactagtcctaaattgtgaggctttactgaagtacttgagcatgtgaagtgaactgaggaggaaaatggctttgccggcagagtttgagatgcaacgagtacaagccatttgcctatgaagaggctgtttcctccctctctcagggaggacaagtagccagtctgtggtgacatctgttgtctagatgcacagcttttcgatgcctaaaaaagatgctttgggtgcaggggtggaaagacttggttgtgccttagttttcttatcttagtcattcctgttaaccttagaaaaaaggtgaaaaacttactgaaagataagaaacaataagacacaattgtacattattagggatcctatgcttggtagaattttcgcaatgtaaataaattacatctcaagttctgatccttttcagcagaaattctttcctctcccaagtctagtcactgagaagcaaagtgccgttgccttttatttcttcaatgcttctttttggtgcctgaatgcacaccaaggaagagctcctctccagagcttcactgcatcatagacttgtgcaggggccagccagagtgtttctcaaaatcttttaagtctctgaattataaacagagctaaatgggaccttggagatcatcttgtccagccccctcctagagaaggagactgaagctcagagtggttaagtgacttgcccaaggtcaacaggatgctgtgttattattattatgattatttttgcatcaggacttgtgggatctgtagtaactattctcttggccaattataatcacatcactggcattgttttacgagaaatagccccgctaggcccagtcagcaataagtctttggagctgtctcagcctgcagttgctttatataaaccatcccttttatgggagttgaagcactgtatgaaaagggtttttgtctcatgttgaccttgtttagtcacattaacgcacacatcagttccaggccccattccattctctgaacatcttctgacacactgacagtgctgagcagagcaaggttgggttcgctc

SEQ ID NO: 30382 - DNA, 2300 bp, Homo sapien
accttcagtattatattttttaatagaggtaaggtcttgctatgttgcccaagctggtgtcaaacgtgcgagctcaagcaatcctcccacttcagcctcccaaagtgctgggattacaggcatgaaccactgcgcctggactactttacctttataagcctcatatttcttaccttataaaaacagtggtgactctaatctcacagagctgttctaagattaaatgagatggctcatgtaaagaatctgtcacagagcttggcacatctgctattgggtctgagtgctagtgagacggccacatccaggggcatgagtgggagcactgttgtcagagaccctgagggtcccaccccagagccccctttccttatctttaaattgggcatggcagtactctatacctctctggcatgctgtggatatcaagaaagaactgcgtgtgggtgtcatgaaagctggagggtgctgtatgaaatgcagttgttacaaccatcactagtcacctctggctcgcagacctgcccccaccccttcccctagcctgagcagaaccttcttgtctggtcagagctcagaaatgccagcaggtggcagccttatggggttggagggacaatctgctgcaaatccactgcactgtagccagacagggtacagcccctcccctgagcagagggcctgagcctctgtgcaccagcaggagactgaccaggtttatggacatgaagaatccagagccctccccacctgaaggaagaagagaaagggccactcatgtaggaaaacacttgttgggtttttaacacaaaaagttctgatctgagagcattatcaatgagtgggggttaagggtgcttccattcccgagcaagagagggaaaggaactacttctgtgttaagggatcatggagtcagagtcaaggtcactgggcaggcccaccaccagggcctatctgtctagaccaacctgctacatcacagttcccagcagggttagcctttctccttccccttttattggttgagtgagtgagtgattgattgaatgattatattatatacttacagaaaagtgttcctatttctggatgcctgccttagctgttgtccagacattctttttttcttcttctttttaaataagagctgagaaaataaagggtgaccacacagtgagagggtcctgccctaaatctaaggctggggtgaatgtctcagtcaagccggcgacttccatcttccccgctggccagcagcctgtgatcaagtccacactgaacaggccctttgcccagagggcctcttgatctttattgatctttggaattcttcaggaaccgggttggcgaatgcagttgccaggtgtcactgatgctacagaacagctctgccagagcccttccacggtgagtgcccccaggagctgcccctccaggccatgcccccatccccaccttcctcctggccccggcagctccagcccagcagccctagattgtttgtgtcctgcagctgaggctgccaaagccagaagggagagcctggaaggggaatgagggagggagagcaggggaaggagggggtgattttttttttttttttttttgcacacacccttataaggctactgaagtcattaccgatgtaataaaccaactaagcaagcgagcgcctctcaccaatgttcccatctataaacacagcctggccggcctcccccatcccctcccgctcccctctaccctcccaccctcagggatttgctctcccctgaagtttctttcttacccagccccttttcctcctgctactttcctttttccctacactggttgcagggggagggagcctgccagctgcgaggacctctgtggtggaggagttggtgctgatggtggtggtagtgaccgctatgggtccctgaggcctggctggccagcaagagggcagggttggctagaggaggaagacggcgaggacgtgcgaggggtgctgaagaggcgcgtggagacgaggcagcacactgaggaggcgatccgccagcaggaggtggagcagctggacttccgagacctcctggggaagaaggtgagtacaaagaccctatcggaagacgacctgaaggagatcccagccgagcagatggatttccgtgccaacctgcagcggcaagtgaagccaaagactgtgtctgaggaagagaggaaggtgcacagcccccagcaggtcgattttcgctctgtcctggccaagaaggggacttccaagacccccgtgcctgagaaggtgccaccgc

SEQ ID NO: 30383 - DNA, 2300 bp, Homo sapien
cctcttcgttctcccagggcctggcacccatgaggtttctaattgctgtttgttgagcaaaggaacaacctgaactcaaaattctccagacttgagactccctgcaccttgaatctgtgccctctgacagtctgagcattgaggagggtggctgggaggggacaggctatgggatacatggccagggaggagagaggagtgaaagagctaaggcagtcaggaaggcacctgcaccagcacagcctgggacagcacgagggcactggagagaaggacaaaggagaggagcccagcaggcgggaggagggctggaggacagcaacgattggcttctccttgcttcaaatgggtgccagcacccaagggtgagcagcgccccagagcccctgagaatcctgggccaggccatgggctaccagtgtctgtccactgggagggaggccaggcagagtgaggtggagacccacacacgccagcagaatacacaagaacgcatgctcagatgcctgtccaggtggatgtaactcatatgtgcacatattcccaaacacagacctccaggtgcaggtgcctgccagctagaccagtatatgtgtacatcatgtgtatggttgataactacatatgtgcatgaacacacacatgtcccagaccagatttgtactgataagcacagtagggtagagtgcaaaggtcatagggtcacaggtcccaacccctccctccactagcaagctctgtgtgtttaggcaaattacttaaccttgaccttcagtattatattttttaatagaggtaaggtcttgctatgttgcccaagctggtgtcaaacgtgcgagctcaagcaatcctcccacttcagcctcccaaagtgctgggattacaggcatgaaccactgcgcctggactactttacctttataagcctcatatttcttaccttataaaaacagtggtgactctaatctcacagagctgttctaagattaaatgagatggctcatgtaaagaatctgtcacagagcttggcacatctgctattgggtctgagtgctagtgagacggccacatccaggggcatgagtgggagcactgttgtcagagaccctgagggtcccaccccagagccccctttccttatctttaaattgggcatggcagtactctatacctctctggcatgctgtggatatcaagaaagaactgcgtgtgggtgtcatgaaagctggagggtgctgtatgaaatgcagttgttacaaccatcactagtcacctctggctcgcagacctgcccccaccccttcccctagcctgagcagaaccttcttgtctggtcagagctcagaaatgccagcaggtggcagccttatggggttggagggacaatctgctgcaaatccactgcactgtagccagacagggtacagcccctcccctgagcagagggcctgagcctctgtgcaccagcaggagactgaccaggtttatggacatgaagaatccagagccctccccacctgaaggaagaagagaaagggccactcatgtaggaaaacacttgttgggtttttaacacaaaaagttctgatctgagagcattatcaatgagtgggggttaagggtgcttccattcccgagcaagagagggaaaggaactacttctgtgttaagggatcatggagtcagagtcaaggtcactgggcaggcccaccaccagggcctatctgtctagaccaacctgctacatcacagttcccagcagggttagcctttctccttccccttttattggttgagtgagtgagtgattgattgaatgattatattatatacttacagaaaagtgttcctatttctggatgcctgccttagctgttgtccagacattctttttttcttcttctttttaaataagagctgagaaaataaagggtgaccacacagtgagagggtcctgccctaaatctaaggctggggtgaatgtctcagtcaagccggcgacttccatcttccccgctggccagcagcctgtgatcaagtccacactgaacaggccctttgcccagagggcctcttgatctttattgatctttggaattcttcaggaaccgggttggcgaatgcagttgccaggtgtcactgatgctacagaacagctctgccagagcccttccacggtgagtgcccccaggagctgcccctccaggccatgcccccatccccaccttcctcctggccccggcagctccagcccagcagccctagattgtttgtgtcctgcagctgaggctgccaaagcc

SEQ ID NO: 30384 - DNA, 2300 bp, Homo sapien
cctcctgtcaccagtagaacacagcccagatgcaaacatcaggagcagacactgcccagatggcggctttaccccagctggactcctctgaggctttggtggtggacagccctgtgccgcaagctggagtaagccgattctccccatgggggaagcaggtaagggcttctgtcactttccatgacctgtgctcaaggtggggagcacagactcagacaagcctctcaagggctcctgtccaatccagccccaggccttaccctgtggcccccagcagtctaaggggtcagagaaaggtggaggacttgggatacaaaggctgacgcattaagtggatcacctggtggcagggcaatagcagtaactattcctacagccatacccttaaatctctgctgggcctttaaagcaaaccatgggttcatttgcagcctataaagttcatagtggcctcctgcctgggacccacatgtcagatcacctaagctgctggaacagggtcttggggccatctttgacatctgcacataaccagttacaaaatcagggccggggctgaagatgaggccccatcccaggagctgccacagagcatatggggctatcatcctataaactgaacctttcacaaagagtccttttgccttggcttactaagctctgaataagagttccactctggttacaaagccttggatcctgtcccaccctgaatcatctacctcttggatgggttctatatggaaaaattactttaaagaactaatttcggccgggcatggtggctcacacctgtaatcccagcactttgggaggctgaggtgggcgaatcatgaggtcaggagattgagaccatcctggctaacacagtgaaaccccgtctctactaaaaatacaaaaaaaaaaaaaaaaaaaaaaattagccgggcgtggtggtaggcacctgtagtcccagctactcaggaggctgaggcaggagaatggcgtgaacccgggaggtggagcttgcagtgagccaagatcgtgccactgcactccagcctgggcgacagagtgagattctgtcaaaaaataaaaaataaataaaaaagaactaatttcctggcaagtgtcaagtgtttcaagtattccagctggaattttgagctgactttttgtcatttccccttttggtacagtagacaagagctaggaagggaagagaggcagaaactacccacccatacctgcctcacaatcctagcagggacaggcaggatctgcccacccctctaccccctgcacaccggacccccggcttcctcccagccatccagtcattcccctcgaaaggcaccctgctctacgtctaggttgctggaggagtgaggtctctggcaggcctgccacgtaccctcaggaaactctccactgacttgcttcttctcaggtggggaaaaagccaaggccagggcagtggcctccgaaaggaatgaagaggctggactttggggaagaaaaagaggcaaaggctgcaggctggaggctccagtgtggtttcccaggtccttccagttccctgtgcacttgggagaaactccccaagcagagccataaggaatggaagagcatctgatttaagtcaaaagatgagggcttgaacttgggctctgttacttgcctttggatggccacaagcaagtccacgaccctgagacctcagtgtcccccgttattaaatgacgatgaggctggataacttctgaagccccttcctgctgggacagtctaaattttatgactgtccccagctggccccagacagtctgcctgccgacctcctggtgcacgcctcctctctggcctggcaaacttcccacagccctttgcttggctctgcccccaccccaccctttcttgctcggcctactcaacagctaagccttatcacatttgccaagattcagccttccttttccatcaaaatccccaaacaagctcatctcctctaggatgtctggcttgagtaatgtaagtattatctcaaagtgctactccttctatactgacgagatcatcagcaggtatttttacacatcatcggtttccattctttgtactgacctagggggtaagcgtgtaccttctccccattttggaggcagagtggccttcctggtaataactagttcaagcataatgcaaaggcagttgatgcattctgagtgtaccgctaataatagtagggggaccagcagctcacaagcatcccatcacttgaccacaacagacatgtcattgagctcagctgagattagcct

SEQ ID NO: 30385 - DNA, 2300 bp, Homo sapien
ctaggaaaagaataaaaggaatggggaggtaaggaaaaactgaagtgaggaatatgggatttcctacctcaaactcaggctcctttgaaacagttttcaggcaactgctctaagcaggacagagcaccacaccacatccacagacctcaagtcagggcccctgaactgtttaaagttggctctctgagcacattgacagggcccacagcagaggacgctgctgcccaggccctggagtctatcccactaggattggcaggaggcaggaggacacagccagaaggtgagcagatttgtatgaccaagttaccccattgccatccacagggaaatgttccactgcagccgagtgcccgtgtgtctgtgtctgagaagaacggcatgcaggttctggaaatccatggagtcaaccaagatgacgtgggagtgtacacgtgcctggtggtgaacgggtcggggaaggcctcgatgtcagctgaactttccatccaaggtatcgaccagtggacggctagtgcagaacgatccctgcctggtgccgcaccctcctagaggagctgcttgttcactgcgcacctgtgtgtgtatacacctggcccactcacacacccaggcactccccaggggcaggtcttttttttttttttctcttcagacagagtcttgctctgtcgcccatgctggagtgcagtgacatgacctcagctcactgcaacctccgccacccaggttcaagcgattctcctgcctcagcctcctgagtggctgggactacaggcacacaccaccacgcccggctgatttttgtattttttgtagagacagggttttaccatgttggccaggctgacctcaagtgatctgcctgccttggcctcccaaagtgctgggattacaggtgtgagccaccacgcccggccacaaggggcaggtctttgacaagaagaaagggtgaacagggcagcgcagacctggccacgagggaagatgccctgtgcttggctgccaccttcccttgtgttcccatagtctcccccaccatgtcttcagtcctttcttctcacccggactcccttttgtatctgtggttgccaactggaagaatgaatgttgctaacgtcttgccatcaccccaaatttaacctgcccagaatttactgataatttactctgtctttcaagtcaggcgatccttcgacttgaccccctctaccagggttcccatgttccttcacacccagactggactttccagcatccttttgacccctgcctctttctccttgagtcgtcagccctgtcagttcttccttgtaagtcttgttgaacacgtctcctccttacagttctttggttcctcaagtccgggctgaggagggagtgcagggatggggaaggggctgcatgtcactttactggagcaggaactcgggggtcaggaagggaagtggctttcagtccttcctccttctttgtccctctcttttcttctgatttttctgttctgcatctccttcttcttagaaacgattcatctttgctcttgttactttttttggcctgggtatttttcacaatctacagaaagaaatatatttcacagtacattgcaacccagaacatgtatacataggtaaacaagtttcaggaaaccatcctgaccgtactgtgtacagtgcatgctggtattctctatttcacttgacatcactaaaacaagaaatcctggtcctgaccggaggacctgacttggtggctcactgctgaataaggagatgccaccagacacccagagcaatgtgtgcctgccctgacattcagttaaatactattccctcctgatggacttcatgacaaaatatgttgcctgatatttgttttaaaatactcaaaaacaaataaacgaaagaaaacaaaaatggatatataagactggcaaaatgtggtatctccttaatcgtggtgatggctttcagggtttgttatctctttctactattgtatatttttaagtttaccatgataaaatttgagaaagaatatagcaggaaaaatatgtattttatgttttttctttgaagaactggataacattaaaagtatgcttttctgtacactggtaagttacagcatttgggtttggaattttcagtagatgtttgtttgtccctggattggttttttttccttctgtttagtgaacagaaacagattccatgccctcagggtatggtagcaccagccactattaagaagcccaaaggacagaacctgaagctttgacaatgtactctagggct

SEQ ID NO: 30386 - DNA, 2300 bp, Homo sapien
aagaaagaaggaaagaaggaaagaaggaaagaaagaaagaaaaaaagaaagaaaaagagagagagaaggaaggaaggaaagaaaaaacaaaaaaactagagcttcttggagaaatggctgattccaggtttgaggcagcaaatgtacagatgtgcctggaacatcttgtcatatcagatagcaaggaagctatcaaagacttctagggtctttgaagctctttgcacactagtgagagagagagagagagaaaaaaaaaaagactactagaatcttatcaaaaggagccaggagccatattgaagaagctcctactggccaaagatgggacaatttgagctctaatatcgtagatggaaacctatcaaatatatttaaattcatgaatttataatgatattaaagaaatctaagaatgacagagaatcaattccttaacttgaaaactgggtaatttttttaaaaaaaagcaggtattcatcgtgcctttcctatctcagggtaatcaaatagtagatgagaggaagcatctccttatccacttatgaactaataaatgaaaacaaaattattagaataccatgattttgcaaacttcaattaattaatgaatctaggaattgagcatcgacggctgttaacctcaaaaaagagcaaacaccagacatcatgatcatgtacctcttgaagaaaagaacacacaaccatctataatcttacaaaagacatcaaacttcagtctgaggaagaccctggatcagctgccaacttgctgtcaatacagaggacagagaaacatgctgaattgcctcatgaatgtgcaacccccagactctggaaaacctcacagatcaagggcttaagttatttaacaaataattgtaaggaaaagactgaaaaggcaaatcaaattaaaaaaaaaaagagtggggggaggggtaaggtgcacccttggaagataccaagaaaaacaaaagcagcagaagtgactacatgaaagtcaggttagtggttacttttgggaggagggagaaagggggttgtcattgaggtagggcacatggagaggctcctggggtggctggcagagttctatttcttgatccaggtggtgattacaaggatgttccctttataataattcactagtctatatatctatatatttgttttttgtggttttctgtatttatgttttattttacaattaaaaaatttttaaaaacactccttaacctgcagtaaacagtttttttaaaaaaaacaaaagaaggtccaagtgaagagatcagaagctataaaatatttcatattgggtgcaaactaaatataaagcaagccaaaaccagaaacacctcctccccctcccctcccccccctcccctttccccttttttaatttaaagaactttgtaggtatcttccaaaccaatgagagattcttaacacacacaaagggaggatgtcagaggaaccatggggctgagttgcaccactggaggatgtctgaaaaaaactacatagacaaccttccagcactaaaactttagccccatggttccgctgacatcttcattttacagattagaaaactgaggcccagaggcagccagtgtctcatgcacgctcacgaagctagcatcagaccccgacctaaggcctaggtctcccagtgtaggactaagacacgcaccaagacagtaccagcccgctgaccgccgcctgcgaggagttaactggggcggtgcaggataagtgcgaggggggcccgggtctggcgctaggtttggctgcggattctccgctccggactccgaggcagaaggcgggtgggcgtggcgggaagggcagcaggtccactccccgagcgctatgcaaatgtcatgcaaatcagtgcatgggggctggagcgggtggtttgagtcctgaccccgtagcgccgcgctctcactcgctctcctcagcgcgcgtccgctctccgctctcccacttgctctctctctcgccggttcgctcacccccgccccgccccgccccgccccgccctgcccagtcccggacgcgcctcgcgggctccccgcgccgcccggtcggcagcagggcgctgagcgagctcggagcccgcgctgtgcgcctgcggccggggcgccccgccgagcgccggtgccccggctcccgggccgccttcgccgcgcgggtgagtgagcccgccccatgcttttgtccaggcgcgggccctggaagtcaaggctccgagggtgggagttctgggtgggggctgggacccccaccgtctgtgc

SEQ ID NO: 30387 - DNA, 2300 bp, Homo sapien
ttgatttatttaacacttactgaatacctactgtgtgccaggcacaaatagaactatatatgtacttttttaaaaatgagatcacactgtacatacttttccacagcttctgtttattcacttaacatataatggacacttttgtctatcaaaatacataattatgcatctttctctttaagaattacttgggtattctgcttatccaggtctaccataatatggtcctttgctaatagtactttccccttttttcccagtgcaaacaacattgcagtgaaaatctttgtatatgtctttgtgcatatatgtcagctttgtttgtttgtttgtttgtttgtttgtttgttttgagacggcgtcactctgtggcccaggctggagtgcagtggtgcgatcgtgtctcactgcaacctctgcctccaaggttcaagtgattctcttccctcagcctctcaagtgtctgggattataggcgcctgccaccacgcctgtctaatttttgtatttttattagagacagggtttcatcatgttggccaggctggtcttgaactcctgacctcaagtgatccactcacctcggcctcccaaggtgtgggattacagacaatgagccaccacgcctggccagcatttttgtaggatagatttatagcagtagaattgttgagccaaagggtatatacagttgcaattgtgacagatattgccaaattgtccttaatgatcacagagcttaataaagaaactataatagtaccagaagaaaatataagaatttttatttttttatttttttggaggggaacttttcctaagcctgacaaagactcaaatgccacagaggaacagattgataaaatatgtccccagaaaactttttcagtttctacatagcaaaattataaatacattcaaaacataagcaaaatggagaaacaatacatgacatgatgaaggcttaatcttcttaatatataaatatgtcttataaatcaataagaaaaaaatatgattgcccaacagaatgagcactttataaaagtgttcagtttcaccagagtgattcagaaattatcactgtgtctccactgttaaccaaaggtgaggaaagggagagggtaggagagaggaggcctagaggacaagtggggagatcagtagttgccactttaaatagcttctcttatttatattatctgatcatttatcttattgtttctttgagatcattactgtgtataattacttgtttgttatcagctctgtgagaacaggggccacgtctgtgttgttcatctctgtatattcagattctaatacaatacctcacacataggaagcattcgctgagcatgtatttgctcaacaaatggtgccatatacttttatcgccatgaaaaagaacgtgatagatctatgtgtttgtatacaacagtcttatgggaaaaaaaggcaaagttagaaattgtgtatagtatgtgtgtgtatgtagtgtaattaataccatatgtaaaagtgttttcacgaaagataccaaaattaatactgattgtctctggggacagagaggaggagtggaagggagattcttcattgagaatcattgacattctgtggtgtttgaattttttaactttgtacatgtattattcttttaaaaggattatgtattctttcttttaaaagggtttaaaaaattaatgcttaaaatgtcaactggaaaagaaaggtatgacttctgccaatcatttttaaaaatatatgtagtatttatgtagaactgctcatgcaattaatcgttaaacaaaatcaataaatttcaggccttttttttttttttttaagaaacaggtattttccaagtttgtactttttaggtttgggaaacaactatttgatccattttgtcttaacagtgttttctcttcagtcattgaatatgtcactgcaaaatcaattggaggagtcactaaagagccaggaattactgcagagtaaaaatgaagagctgttaaaagtgattgaaaatcagaaagatgaaaacaaaaaatttagtagtatatttaaagacaaagatcaaactatacttgaaaataaacagcaatatgatattgagataacaagaataaaaattggtacgtatttagacagtagttatggtcacatcttttaaaaggaataaggaaactgaaacttttgttgttttagaattggaggaagccctagtcaatgtgaaaagctcccagtttaagttagaaactgctgaaaaggaaaaccagatattggggataaca

SEQ ID NO: 30388 - DNA, 2300 bp, Homo sapien
ataatagaatgccgtataactttagaaagtttggtagttacagctcaaagctatctggagatgaaattaaatatgtgaagagaaattataaataaaactgccaacagtgactacatctggagggtggaactagggggggaatcagggactttctcatgtctatttaaaattattttgaataaagattatatttatctgatataaaattattaagatataaaatagtataccatggaaagtgtcccttctcgctctgtcccccagatactctgtttccctccccagaggcaaccatgattaactgtttctggcataactcccaagatactggatgcatgtaaaagcaaatgcttattttttcctgtttttctacacaaaaggttgtccattattgtcacttttaaaacaaaaaagtttaagaaaacaacagtggtatatgaatttaaaaagaaaaattaagacagtgagatgtagataaagagacagggtagagttctcacttcctggtctaatcaggcattctaaagaatgtacataaaaggaaccagagttaagaactctgtcctatatcatgaattaacttgcatgtttcaaagaatttgggactatagaacatattttgggattaatatagtctgaacttagtgtagtagttacttctggtttaaaatagtatctcaatttccttttcaccttaaatagacttaaggaacaaatatatgtgtagtttgcttgacgttttacataaaagaaatttaatatatgaattaaattataattgtgtatttttaggatatatcacattaattaaaacagtgaataatgtggtacatacatataatggaatatatttgacctcaaaaaggaagaaaaattttgacacatgctacaatatagatgaagcttgaagacattatgctaagtgaaataagccagtcacaaaagaacaaatattgtattatttcagttatataaagtttctagactagtcaaattcatagaaactaggatgatagttgctagggtcagggagaagaggggatggaaaggtattgtttaatggatgcagagtttcagtttgagaagatgaataaaagaaaaaaatgacattaaattttgtcaagatagcatattgaaaatataatagaaaaatatttgtttatctgctataatatattatgtcataggtgttatcttcaggaaggcacactggacctgctaaattaacaaatggaaagaaagcgtaagtacttgaagacgtttacaacttcagatttcaaggaatttttcaggtctttgggctggatgacatgtcgtctaccccagaaaattaggtaggcctctaccatcacaagctctgaggaacaatttttcatgtctacccatgttaatcattttagtatttaacagtctttctgatcttcagaatgtgtttataaattcatcttgtacatggttggacaagctttcttgtctttgctggaaagaaaatgactacttactaatatattttgggaaaaatatttgtaagaatattaataagcttgttttccaggacctatttaagaaaaataccacgttttaatgcagattctggctattccatccattctgattcagaaagtcaggtaagattgaatagatacaatacacactattttaattagttttcaaatagtagctaaaaagtaggaataaaatgcaaagtattaattgctctaaggaagtatgaagtctgttgctttaaaacatcttttctaccaataatagtttgtaaataaacaaattttaaaactacataatttatattttttcctacactaacagtcatatacaaatgtattctaaatgactttatttcttacaggctgaaactgtacacgggcttgatggttgtgcttctttgctgagggacattttgagaaatgaagattcaggttttttttttttaattctttgctgatcaccttatctcaagtcattattttgatgtaacaaatttttgttttattaataggttcagaaacagcatatttagaaaacagatctaattctagacctttagaaagcaaaagatacggatcaaaaaagaaaagacatgaaaaacatactattcctttggtagtccagaaagaaacatgtaagccttttttctcttagttatttaaagataatccttaattgtgggtattttgatcaattatcaggattatacagttgattttcattttaataatcagtattagttaggtttatgtgtgcttatgcctttctgtattcagcttctaatcactgagtag

SEQ ID NO: 30389 - DNA, 2300 bp, Homo sapien
tatatcacccagcaattctacttctgggaatttatccaaaagaattgaaatcaggatatagaagagatatttgcactcttgtgttcattgcagcactattcacaatagccaaatgtgggaacaacccaaattctatctgcagatgaacagataaagaaaatatggtatatacatacaatggactattattcaacctttaaaaagaaagaaatagctgtcatatgcaacaacagagacaaaacttgaagacattatgctaagtgaaataagctagtcacagaaggacaaatactgcatgattttacttacataaagtacctaaatagttaaaactcatagaaacagaatgtgagcatggattgggcgtgaaccagagggatttttgttttttgggtttttttttgtaaagaacagtattgggataattggcaacatgtgaataaggtctgaatattagattgtaattctgtatcaatgttaatttcctggttttgataattatactgtggttatgttagagaatggccttgtttttaggaaacatttaggagtaaaggagtattgtatctgcaaacttaactctaatggttcaggcaaaaagtactgctgtgtatatatattgagagagaatatggaaaatgtcaaggttcacagaatctgagtgaagcatatatagggcatctttgtactattatttcatagtagaaactacaaaaaaaaattgaaaggaattgttccaatatgacagttactgtttcaaggtgcttttatcatgggtagttttctttaccagattttctataatatagccttgtgtatattttttggagaaacaccatatgtaatcttacagttatgccagacatatacctcagacagtgtactttaattgtggtagttgtttttggactcgatccagggtatagtattatagtgtcatggcttggattttttattatgattccagccaagacatcgacataaatataccaaagggaaggaccctgagagtgtgatgcagagaccagtggtgtgatgttatacaaggtcttatttcctacattgttggttctcactgctggcttcatgaccctccatcataatccaagttatctcaagacgtataactcttaccaacccagtttttaaaaaatgtattctcagtgacattcttagaaggatggagcacatattcaagcatataatagaatgccgtataactttagaaagtttggtagttacagctcaaagctatctggagatgaaattaaatatgtgaagagaaattataaataaaactgccaacagtgactacatctggagggtggaactagggggggaatcagggactttctcatgtctatttaaaattattttgaataaagattatatttatctgatataaaattattaagatataaaatagtataccatggaaagtgtcccttctcgctctgtcccccagatactctgtttccctccccagaggcaaccatgattaactgtttctggcataactcccaagatactggatgcatgtaaaagcaaatgcttattttttcctgtttttctacacaaaaggttgtccattattgtcacttttaaaacaaaaaagtttaagaaaacaacagtggtatatgaatttaaaaagaaaaattaagacagtgagatgtagataaagagacagggtagagttctcacttcctggtctaatcaggcattctaaagaatgtacataaaaggaaccagagttaagaactctgtcctatatcatgaattaacttgcatgtttcaaagaatttgggactatagaacatattttgggattaatatagtctgaacttagtgtagtagttacttctggtttaaaatagtatctcaatttccttttcaccttaaatagacttaaggaacaaatatatgtgtagtttgcttgacgttttacataaaagaaatttaatatatgaattaaattataattgtgtatttttaggatatatcacattaattaaaacagtgaataatgtggtacatacatataatggaatatatttgacctcaaaaaggaagaaaaattttgacacatgctacaatatagatgaagcttgaagacattatgctaagtgaaataagccagtcacaaaagaacaaatattgtattatttcagttatataaagtttctagactagtcaaattcatagaaactaggatgatagttgctagggtcagggagaagaggggatggaaaggtattgtttaatggatgcagagtttcagtttgagaagatgaataaaagaa

SEQ ID NO: 30390 - DNA, 2300 bp, Homo sapien
cacctaatcttcccgtcgtaacacggccgctcggtctctagatgtttctgtttaaatcgtcgtagccctagtctagagcgccggctttggggtcaggcccgggttcgagtcccagccttcgccgctgcgtcgagtgacttaacctctcctagcttcagtcacctgcagattgagagtctactactttttactgctcagaacttcctattccttagctgcaaaataggcagaaataagcataaaatcctgtctcaaagaattgagaaggttaaataagagaacccggtaaaaacatcgatcacacagttgttgtagacatacaacaaaatttagttccctttaaaacacgtagtttgccaccatcttaatgataacagcagccaacatttagataggacttatgtggcagatgctactgtaagtgcttttatgtattacatagaataactcatttaatagtcacgatatccttatgaggtaagtactattatccctattttatatatgaggaaatcgagggctggaggattcaaataacttggcagttacacagctgtggaaacaagattcagactcacaaaactgatgccagagtccattcttcttttaaacattttacctagtagatgtatgactttgaacaaaccacttttctgaaatttaggttcccacctcacaaataataactcacagggtatggattaagtgaaaatgaaagaccttagcacactgtaagtcattctacaaaggcagtattatcttgtacttgttggtaggagatatgactactaagaaatgcttatatgattctcaaatagcaaaattaaaagtttaatgataataacctcgtagaagtaagtgtaaaataaagcaaactgattctcctgtattgtgattaggacactccttttggagagcagctttgcagtttgtatcaagggttattaaattgctaataacctttcaccaaataattttctttttaatcctaaatataaaaaggctgttttcagtagatagaaaggcttattccaggtttgtttttttaattgtgaaaaatatgaagcaaaccaagaccattattatattacttccactgaaggaaatattatacaaccattaaaaatttatgaatatgaaaaagatttaaaagtagaaaacacaggatttaaaattgcaaatatctaggtattatgactaagtaaaaaatgcatatgaaaaaagattggaggccccaatagcaaagaacacatctagtacctagatcttggtttccacgtaccactgtccactaaggagtcatggcttcttggagaaatgaccaactccagggctgagcaggggtaatataagaagagcatggacacatcaaactaaaaagcttctgcacagcacaggaaatgattaatggagtgaaaaggcaatctacagaatgggagaaaatatttccaagccatgtatctgataaataatatccaaaatacatataaggaatttctataactcaaaagcagaacaacacataacctggttaaaaaacgaaaaaaggatttgaatagacatttctccaaagaaaatgtacagatggccagcaggtatatgaaaagatgctcaacatcactaatccaggaaatgcaaattaaaaccacaatgagctatcacctaacccctgttaggatgacattaaaaaaatgaaaacaagtgttggcaaggatgtggaagaattggaacccttgtacactgtcagtgggaatgtaaaatggtatagctgctatggaaaacaatatggagattcctcaccaaattaaatatagaactatatcacccagcaattctacttctgggaatttatccaaaagaattgaaatcaggatatagaagagatatttgcactcttgtgttcattgcagcactattcacaatagccaaatgtgggaacaacccaaattctatctgcagatgaacagataaagaaaatatggtatatacatacaatggactattattcaacctttaaaaagaaagaaatagctgtcatatgcaacaacagagacaaaacttgaagacattatgctaagtgaaataagctagtcacagaaggacaaatactgcatgattttacttacataaagtacctaaatagttaaaactcatagaaacagaatgtgagcatggattgggcgtgaaccagagggatttttgttttttgggtttttttttgtaaagaacagtattgggataattggcaacatgtgaataaggtctgaatattagattgtaattctgtatcaatgttaatt

SEQ ID NO: 30391 - DNA, 2300 bp, Homo sapien
tctgtaaaggcccagatagtaaatatcttaggcttggccggctagacggtctctatcacaaatactcaactttggcagttgtagcacagataatgtgtaaacacattagcgtgactgtgttccaataaaactttgtaacactgagatgattttcaggtaacttttcacatcacacaatataattcttttgacttaaaaaaaactacctgaaaatgtaaaaactgttctcaggctacatccaagaatggcagactgaattttgccagggactgtagatttcagattcctgctctacactacagccattgatctttgtaaaaccccagtcagttcactgtgtcccctgcttgaacttttatgtattcccaatggccttaggataataagccaaatcatgtagtctatgaggactgcatagtctggccctacatatatttccatccccactgtctatacttcagcagcaaggaactctctgggtttctctttctcaacatcatgctgtctccacatctttagaatactctgctctccactctctatctagttcatttgcagatctcagctcactgcaacattatttataatagcaaacaacaaaatgaaacggggtgggggcataacattcccaacactagggaagtgaatcatggaacaccaggcagccattttataattgtagactaatgagaaacaatgttgattagatattaagagaaaacacgcatgttacagtaatacctattatttcatattgtcgtaatacatttatacatatatatgtaggtggaaaaaatcttgaagggaatgcaccaagctgttcaaagtgataactcatgggtaatggggttatgggtggtcttttcctttttgcttatctatattttctaaaataaacatgtattaagaaaaatcaatatgaattcaaaaaatatcaacttaactaaaaaaaaccccttaatttcaggtgaatatgtcagcaagttatgaagttatgtgagggctggggaaggaaaggagaggttttcacagtttgatctaattcaaaactaaatctgtgaaatactcatttcctaaaatcactcaggataagtgtgtgatattttggtggacatattttagttcctgggctttgacattaattgtaacagacttttaaagcgtagctcttttctccattaaaaagaaatgaggccgggcatggtggctcaccactgtaattccagcactttggaggccaaggcgggcggatcacctgaggtcaggagtgtgagaccagcctggccaacagggtgaaaccctgtctctactaaaaatacaaaaattagccgcgtgtggtggcacgcacctgtaatcccagctcttcaggaggctgaggcaggagaatcgctggaacccaggaggcagaggttgcagtgagctgagattgcgccactgcactcctgcctgggtgacagttgaaatggaataaactgagttatctctcttcaacttgatttaaatcattaacccaaaactcaatgccttaaaaaccaatgactaaaatcctcattaaaatgagtgcacatgccaatactaagaatgttgtgtcatttttcatcaaaagtaattacctcaacataagaggagacaagtacgcatggaagtaaacccaaaatcccaactaatgaacaccgttctgagatcagtggccacagggaataattctgcaatttccatcacacgcaaaggtaacaaccccgaggtcttatttttatagaatatcaagaacaaaatcttccaaaaggcacacgatgccaaactaaaaataaagagcgaaaacccaaaaagtcgcgctcaattccttctgaaacctattcgcctcctacccctgtcccatcctctggcgctggcgggtcctcgtccccgttttccccaccgcaagtcctggaacctccgcttaactcttttctcggcggctccgccccggccccgccccagccatgccttggccccgccccgttcgccgtttattggcttctcccaacccctgccggtgggtgacaagccgggaagcttggaggggtctattgcgtacgcccaaggcgctgggcctggagcaggagaaagggagtggaggcgcgtcggagactatgaagcgcggcattcggcgggatcctttccggaagcggaagctcggcgggcgggccaagaaggtccgggagcccacggcggttaattctttttaccgtgaggcttcacttccctcggtctgggcttctctgaggcggcgagagatggtcaggtctggagctcgaccg

SEQ ID NO: 30392 - DNA, 2300 bp, Homo sapien
attagatgatgcaatgggcccctttaaaataggtgtgaagtgacacgggatgtagcagagaaagatggggcttttcttgcctccttgggtgcttaaaacgaacagtcttgagaccaggtgcggtagctcaaacctgtaatcccaatactttgggagaccaaggcaggtggatcacttgagcccagggattcaagaccagcctgggcaacatggcaaaaccccgtttataaaaatataaaaattagcctgtcatcgtggcaagcacctgcagtctcagctacttgggaggctgaggtgggaggattgcttagacctaggagattgaggctgcagtgagtcatgattaccccattgcactccagcctgggcaacagagcaagaccctgtctcaaaacacacacacacacacacacacacacacacacacacacacacacacacacacagtcttgaaaccggaagacctggagtaaagttgggccctgagccctactgccagctgttcgatcacaggcaaaattactcgaagccttgagcctgttttttatttccaaagcgaaggtaatacctaccttcagagtttactgtgaaactttgatgtcatcatgtttgtaaaagtgccctggcacagtgaccacattctaccctataaatattttctatctttccctgttgtccccaggcatctcaggctctgttcctatccactccatgcccctttcttagcattataaggtcaagagtgaggaatctgggaccacgcaacccagattcagatcctgactctgtcacttgctgactgtcatcttggacaagtttaacctctctgtgctcagttccctcatctgtaaaaatggggataacaatagtacttgcctcatggggtgacagtaaggatgaaatgagttcatgtgtgtaatgcacttagaacaattcctggcaccaaaaactcattgtaagaagtgttgttactatgattcctgaggaattctcacctgtccactttccacaagccgaaagatcaagctccacttctgccctctcacctacaaaagcgcaccgtcaatggctacacattccgccccacccccaacgcccccagcccgggtttcctaacgtccccagcccagtccttaaccctccaggccgtctggtccttccaccaccagcaaagcccaaaacagctttcagcgtcccctagcagcgccctagcgggaccctgggaacccgccgctgcaggagaggcggggcggctctgtgacgtcgcgcccggcgctacccctggtgacctggcagcggagcccgcgcagggtttgccaggcgaaggcggagcgctaacgtctaacgctaacggcggtcgtgccccgccgctgctgtcacccccggccgctgctgccctccccgccgaggttctactgctctccttcttaagaagggtgggaggcactcggtctctccccacacctctcgcctgaggccaggcgccaggtgtcgcctgaagccagacagccggtttgggagcgagcctgaggtagccaccccgaggggaagtggagggagggcagggctctgagcgccccgagggctgcgctggtctgagggaggagccctgccggacgccccctggattctgagcctctccttgttcacagggcaaggggaaggcaaggggatcttcaagagaatgtgactgtgggggattatggctttctggccaatttgtgtgcgtattttgtacccagaatactattatacggtttcttacccggaggacagtggttgggaggctcaagagtttggaatcagagccctccaccgaggagccacacctctgctttttcatcagcgacagggatataaaaatacctctgggtgaattgtcatgtggatgtcatgggcatacctagcacttcatagactcctatcacacattattttatacctagcacttcatagactcctgtcaggcattattttatacctggcacttcatagactcctatcacatattattttatacctagcacttcatagactcctatcacgcattattttatacctagcacttcatagactcctatcacgtgttcattttatagctagcacttcatagactgctatcacgcattcatttttactagtacctattgaacactaagttccaggcactgggctaggcactgggatggtgtggtgagcaaaaactgaccagtcctgccgtggagtttgctgggggagacacatgttactcaaagaatcacactaaggataggtaagtgatgctctggaagggtatgtac

SEQ ID NO: 30393 - DNA, 2300 bp, Homo sapien
tttattgactaacagatcaaggataatctaacctaggcctctcaacctggcctcctacagacagacatcaaatcgcctcagtcagacagtcccatgaaattcctcccttgtgtttaacttgctacactaaaattctattctgtttcatctcccatctctagctgctagtgctttgtctgaaaaaccccttcttctgcacaaagatcattattattcactcctgtcagcattatttactctgcatgaaagcaggaagagattggcacacctttatcccatgtgcatacaacagaacagaccccagtggccagagcattcttgttatcctggaagatgcacctgcagccctcaagcctccagcctccccctcccaacctaaggcacaccctgtttgtcaagtgcctataccaacacctggcagcccctccacagaggcctcagaaaggcaggtgatagctagtgactaggtttctttcatccccagatcttgccctgtgggcagtggccatccccagaccatccaggattctccaggtgtgcaaggacctacaggattttgacaaatgccagcagagtggcctctttacaaatggatgacaacaggctgtgaaaagctttctgcatgcgtaacccaaaaatctagttcccccacttgttcactgatgcttaaaattgctttagggagagacaaaggctttcatctcacaaacagagaaagctttgaagggcctgggtgaactaatctatttagactaatacacactgttgtataaatggaatgaaggattagatgatgcaatgggcccctttaaaataggtgtgaagtgacacgggatgtagcagagaaagatggggcttttcttgcctccttgggtgcttaaaacgaacagtcttgagaccaggtgcggtagctcaaacctgtaatcccaatactttgggagaccaaggcaggtggatcacttgagcccagggattcaagaccagcctgggcaacatggcaaaaccccgtttataaaaatataaaaattagcctgtcatcgtggcaagcacctgcagtctcagctacttgggaggctgaggtgggaggattgcttagacctaggagattgaggctgcagtgagtcatgattaccccattgcactccagcctgggcaacagagcaagaccctgtctcaaaacacacacacacacacacacacacacacacacacacacacacacacacacacagtcttgaaaccggaagacctggagtaaagttgggccctgagccctactgccagctgttcgatcacaggcaaaattactcgaagccttgagcctgttttttatttccaaagcgaaggtaatacctaccttcagagtttactgtgaaactttgatgtcatcatgtttgtaaaagtgccctggcacagtgaccacattctaccctataaatattttctatctttccctgttgtccccaggcatctcaggctctgttcctatccactccatgcccctttcttagcattataaggtcaagagtgaggaatctgggaccacgcaacccagattcagatcctgactctgtcacttgctgactgtcatcttggacaagtttaacctctctgtgctcagttccctcatctgtaaaaatggggataacaatagtacttgcctcatggggtgacagtaaggatgaaatgagttcatgtgtgtaatgcacttagaacaattcctggcaccaaaaactcattgtaagaagtgttgttactatgattcctgaggaattctcacctgtccactttccacaagccgaaagatcaagctccacttctgccctctcacctacaaaagcgcaccgtcaatggctacacattccgccccacccccaacgcccccagcccgggtttcctaacgtccccagcccagtccttaaccctccaggccgtctggtccttccaccaccagcaaagcccaaaacagctttcagcgtcccctagcagcgccctagcgggaccctgggaacccgccgctgcaggagaggcggggcggctctgtgacgtcgcgcccggcgctacccctggtgacctggcagcggagcccgcgcagggtttgccaggcgaaggcggagcgctaacgtctaacgctaacggcggtcgtgccccgccgctgctgtcacccccggccgctgctgccctccccgccgaggttctactgctctccttcttaagaagggtgggaggcactcggtctctccccacacctctcgcctgaggccaggcgccaggtgtcgcctgaagccagacagccggtt

SEQ ID NO: 30394 - DNA, 2300 bp, Homo sapien
taagccagttcaagatactagggccagatgaattagatctcagggcagtgaacttgtgatgtcagagtcactacagaggtctgatagatgtactcaaggttggagacaggtctgataggtgtatccaaggttggaaacaggtacttttttttaatgggtgaaaaaaaattagactgtttgtgtcagtgaagaacgtgatgcgtacagggagccagaaagtgttcactaaaaactaatttaattcattttatttgctacaagtttacacagttggtggatctgcataggccccagttgccttggcccccagagagaggtggaaccaaacaggttactagagacaaacagatccaggagattctgtctgatgggttgcagtcattaacttcagaccagtacctggttttcctattaggcgtgttttaacacattaggtcaggccaccacttctccatctgtctggatgaggcaacagcgaacagcgctcagcagaccttattaagtactcaggtcttaaagaccctctgtttggtgggctctgtagtcactagaaccataaacacactactggctaattattgtttaattattgcttaaaaactgatgggcacaatacaatcaccgcattaattaccccatacagcatctgttttcttttttgcagccatccccattcctccccagcccctctccccactttaattgaaattcagcttgctgtaacacctccttcctcctggccaactggatctctccattcacatgagggagaacaaaaccgagaaggccccagggattagagagttttgacagctgtccaagaggagcgcggagatacgggccaagtacggaggcaggacagagacaaacgagggacaagagagtgacggagggagggagagataggcagggagacatcacaggagcattaaactggacaaagagtcacagagacaggcggagatgtttaaaggggcgctgaaaaggggaaaaggacgagaaaagataaaaaggagagaaactgtggcgagctggtgaggaaaatgtgagaggctcaggagggcagggagacagaagagagctcgtcaggaaggaggggaagaaaggccggcctctagggacaggtcagtccagcttggagaccgatctgaagatccagagaaggcgggcgggcagcctggtggtcccctcacacacctgggagtggagtggacggaggaggtggccgcggggccgggaggagcaccggcggcgcgagcggagaagctgagcgcgcagcgcccgggccgcagagccccctggacaagcctggcgtgtgccctgcagccccgggctcgcccggcggccccgccccctccctggcccgggcttttcctgcggagctcaggaagccggcctagcacagcctcgaacaatagctcgggactcgggctccgctccccgggaggccggcgcggggccgctgggactgggggcgtaggcgccgccgggggcccgcagcgagccctcggccccggccggagcttcaattcagctcggcgctcccggggtcattgttggccgggactgagggagcgggagccgggggaggagctggggaggcggctgctgcggcggcggcggcggcgggagccagagggggagctagagagcgagcgagcgaaggagggaggtagcgagtgagcgagtgagcgagggagggaggaggtagggagacagggagggtgggagggaggaggaaaaataaagaggagagagcggagcagggctgaacaatagagacaggcagacgggcgagcaggagagccagctgccgctgctgggggacagcgggcgcccaggcagcccgcaccccggccccgggccccggccccagccagacagcaggcggccagcgccctggggaaggggtaccatgggggagctggcggcaggcacccccagcccgccgcgcgcctccgcctgagggaggctcagcgtcctctgccccagccccgccgcccaacgcccgccctcgaagctccgcggccgccagctctgcggccgcagcagctgcgccccgcgccctccgcccaccgggcgccgagcagccctcggccccaggcttcttcggctcccggctgcccgcggacgccctcccacagtcatgaacccccctgagggagcagcggaggaaggaggagcagcagactcggacgtggacgcctttttccggacaggtaagccgggcagggcgcggggggccagggctgaaggctactgcctcggacgcggcgtctcggacaagtttggggaaggag

SEQ ID NO: 30395 - DNA, 2300 bp, Homo sapien
ttctttgtgatagggggttttacatagaattgtttcaacgaataaatgagatcatgaatgtaaagcagttagcctggcatataccgactactcaaaggtattattcaaggacctctacgctctggccccggtattacctgtcccataggcttagctccagtgacttgaactacttggtgatctctgtgcctttgctcctgtttttccatcctctaatattcatctttttgtggtgctcctttatatattttgtgctgtaggtatttgtgtacttgtcttgacttccttactcaactgtatgttgtttgagggcaggacctgggtctgactcattctgtactatactagcataagagacacaaagtgtttgtggaatggatatttacctcagtgaaacagctgcctagacttgggttccatatgaattagttaattgataatgtatttataatagcctcatggatatttattgggtcctactgtgtttaggggctcagtggtaaatgcatcaggtacagtctaggccctgtcgtgtaatggggaaacaggctggtagagtggccataatgcatgtggtaaggatggtgacagggcaggtacagggctgtggctggggaggtacagggctgtgacgggagacactgaggaggatatgggagcacatagcagagacaacaaacatagtcctaacatctcgagggcttgctggaagaagaggtcttccacctgagactagaaagatgagtagaaccttgactcaggtacatagtaaaattgctttaagtctcagtttaaaaaatcttgttttatttgcatttactcgcaagcacttacagaaatacttccttagtactaggttttctgaagtgatctctcactctcaaccaaggcagttgttaacatttgaaggtttctagggactgggacaagggttgttgattgtattcaacttttaccaagccaacagctgtggctggagacagaaagttttctcttttaagagctgggtggaagattattctcttctatctgggaaaagataatcatatactttcatgctgtcagggtggggcctattctgtttttgtttgttgcttgcttgttttgtggcttcagctgtgtggatacagagcaggaaggctagaagcaggaagaggctggggtgtttttctgaccctacagatagttcttcttgggtcgggaagagagactgtagtagcaaacatgatctgcagctgcagaggaagcagaggggatttttgcatcaaggacagacgtggggatgaggaactgtatacaagtcaggaaacttgataccagagagaggaggccacagaagataaggggtctccgtagaccctgtacaaaagaaatgtacaagaggaagacaaatggattaagaatcattgtgatggataatcagaaagattatgaatgatacttacatgtttctttaaaagggattacttttttggcttaatgcttgtactctgttctcttattttattattttatttttaaaggtattaaactgtgctgctttttaaccacacctaacatttaggacccagagcccaagacatctactgccacctggtggtagagtataccacctgtgggatttggaattgatgagactacattgattgaaaattgattctgcagtcaaaatatggaatcatagaacatagagttgttggagatattaaagattacatagtttttcttctaataaaacccaacgtctttttatataagtattttagttgaatgcctccaatgacagagagctcatgatctggcctgacaggctattttgtctttcattcttgttagttagaatgttttttctttttatttatttttaaatagaaaagtcacttgtatttatttgtcttcatgtttacctctggaaaaaactcacaagtttagtgattcatctatataataagctttcaaatatttgcaggaacgtgtttgtttccccataatctttttgtcttcaggttaaacagtcatagttccatatttattattctgatgtcatgcttctcagaatccccatagcatttctttcctctagttgcattctatgttgccagtgttcctgctgccagaattggatccaacccattgttccagacaagatcaggttagtgaactctagtacttgcaggctgtctgaacacgaaacttctaacaccttctgtatagtatgagttagctttctgtagcctttccacaatgctgactcctcttaggtttgtggtaactgaaagcccaagaatttgtatcctttc

SEQ ID NO: 30396 - DNA, 2300 bp, Homo sapien
gaaacgtgtcacaatttcccagagaatctcttagtgccccagaaactctcagggaggagacagatgggcacctacgagttatctgaccttaaacaagttatttaatcttttggaacatggattttctcttctgtatactggagaaagtgattcccatcctacagaccttgcagggcaaacaggagatgatagttatgaaagtactttgtgaacgaaaaagtactggccacatgtgagcgatggattcttgttactcgtgaagggagaaacaccgggttacttctctctggagggaggaggaggggtttgcattcttgtgttaactacacactggagtcttgtccatttaaggtaataagaaaataatgctaacagagcctgagaggtagcttcttgggtggtgatgtctctgccgagacccaatgctgccgtttaagaagaaaccacaaggcagttggggggcaggggcaggcggtggaggttgtgactctgcttgctttctccctctccctccttgctcctaccccctggacgtgcctcctccccagtctgagttcttcagaaatctgcaccctctctcatcttggaggtataagttccaaggaagagctggtgctgagggagacatgcctccagttgcctgatggagaccaggaggcctgggagaccaccattctgttaggacagtgagaaggcattgctggcatggcctaggctgcacagagctgtgatgaatgtgcagatggctgttgggtagtttttaggcttggagaacaaggtcatcctagacctggggactcctcaggtttcatttcagtgaatagcactcccagtcacctgggtcacaggctggcccactgtaagaggggctgtgattgggcaaggactgggcaccccgtcatgccccaaaggccttagacaatgcccaggggctgaggtctctgcagcttacttttctccttgccttgaaaataacattgtatcagggactcagatgcccttgcatgttcatttgtctagttagtaatcactcgagtaactgcgaagttcagggttctttgagggacacaaagatggagtttatgggcaagtaagggagaagagtcatatacaaaggagaaggtggaatgaaaaaaataaaatataaaggaaggaagatcagggaagtctgcctggattctgtggcatttgagttatttgttggaaaaattaggcggatttggccatgatgaggtggagagtggggagagcatcctattggcaggaagggcaggagcaaagtcctggggatagaaaaccgtgggatgtatgaatgtgtggggaactgagagtctggcaagagggagaggggttgagaggtaagggagaaccttctatctaccagtatctaccaggtgcaacaccagaaacattatattcttcttttgctttgaggctcacaaatactgttctctctggtttacagaggaggaagctgaggcacatggagctgaaaaacttgatccaggccaggcaagtattaagtggcaaccaggatttggacccatgactgtgtgacttcaaagcccatgctgtctctactataacaaaggttccatgaagggacgtagggaaaaaggatctgtggccttttaccagtcatgcaggtcctgcagtcttgggcaaggagagccagtggtccctacagtgaggcagtgaggcagtaacgctcccaggctcctggactggcctcaaagtccaaaatggccgagcttctggcttcccatcccatattctattggaggagccactggcctctggtgtgggaggtatggaggccaggatggcaggagatgctggaaaaaatttaagacatggacttgactgtggattttcattctcaagaccactgcaaacctcgcgtctttgcgaaaacccttcctgactccctcccacgcatctccgacctccccttgggtccaggcaggctcggtctgcacacggcgttgttctgcacttgttcctttgttgctgtgaaaccggctcccggcacagtcagcctctgtgtgggaggactggtggctgtctttgcaggcaggcatttgcttagagcaggctgtgtgcgagcccagcgtcaagtgattccggcctcctcgagtcagcggtggtgggatgaggctctgccgaggggactggctgtgaaggatgagttcagggtgggatgacggaccgcttctgggaccagtggtatctctggtatctccgcttgctccggctgctggatcgaggtatcctgagtgtgtgtatgcttgtatgagaga

SEQ ID NO: 30397 - DNA, 2300 bp, Homo sapien
gactctttaggattaaaggtggacaatttgagggattcctaaaatacctctctcccatcagctgtgggcatatagactagaaattgtgggcaatcccataagagctttctttaacctgacctacagccgtagaggtctacccttgcctgtcattccccttgtctccctgcatgtctctcatgagtggatgacttccttcatctgctttccagaattgacataccctgctttaacccagtggcaaaactactttcctcatatgaagctgctgtttttccatgaatttcccagttggggccaagtgatttttcctctttttcaaccctgtgttgggagcattgggacaatgtaaatgactttttctctttttcaacccggtctcaccagcattggaacgatgtttaccttgggaagttgcttttcaagcaggattccttatggatcccctgaggcctctctccaaattcctagaagccaagacaagtgtttgcctgcccatcttccccaggtcctatgccagtacaatcaagaggctggctccacagcctctgaaagtttcaaccctagcgtctcagtttcctggggctgttgtaacaaagcaccacgagactgtgacttagataacaacaatttgttttctcacagttctggaagctagacatttgagatcaaagtgtcagcagagctagttctttctgaggaatatgagggagaaatctaccctgtgcctttttctcaacttttagtagttttctggcagtctttagcattcttagccttgtagatacatctcccagtttcttcgttcatcttcacatagcattgtccctgtgtgcatgtctgtctcttcacatggcatttttttttaaataaggacaccagtcatattggattagggatctatcctactatagtatgatttaaacttaatgtaactaattacgtctacaattatcctgtttccaaggaaggtcacattctgagatactggggattaggagttcaacatgtgaatttgagtggggggcacagttcagtccatagcacccaggtcttcaagtgagcccaaaacactccttacagacacggagaccctgtctccataagcaaaacaaagcaccagagagtcattgctcatgaatccatttcaattctccactcactttgtgtttgatactgactgctctgcttgttcgccactctagagttttgtgccaactctagggatacttagaaatatatgtacacctgagtcaccagctctaagtcaggacatatcaggagactttcaaaatgagaagcctgctgaggaaaagctgtatctgcggcaaataatgtagtaactattctaaaggcagtggctcccatcctgatgaataataattacaagtcggttgccttttaaaatgctctggagaataccatggtgtgtacagatagggagttggacgactgtgtgtgcatgtgtgtgcatgcagtagcttatgataaacaaaatcaccagactcttccccaaccttcctgcaaacattccctgggcccgcagggagtagcctgcatctcctccctctggctgtggccgctgccttctgtcagctccctagagttgctgatcccttcccctccaaagaaatagctctgttccaaaaagataaacaccagtggttacagggaacttgaggagaaaagcaaagtgagtctcccacttagtgtttttctggtgttctcacatggaaatacagaccgtctttgtgggtgtgctatttctgatcctggcagttacagcctgagatgtgagggcagtgatgggttttcttgaaggtaggggatagggagcagctggggtatggaggttctctacgctctccccacttctttccagggacactgcacctctgagaaatcccaggggtggatgaggcacctagctggtgcccgcctgcaggctgctcgcttgctgagaggcggcgtgccagctccgcgcaccgcgcctcagtgccagatcagggagctgtcagctcagcgcccacgcccctccgcttcagctccggggagccccagggtgggctgctggaaggcgcgactgcaacttgactttgcctcactgttgttgctggcagaatacgtacaccaatgcggacaagctcctagaagcagcagagcagttggctcagacgggggaatgtgaccccgaggagatctacaaggcagctcgacacctggaggtgcgcatccaagacttcgtgcgcagggtggagcagcggaagcttctcctggacatgtctgtttccttccacaca

SEQ ID NO: 30398 - DNA, 2300 bp, Homo sapien
cttcctgggattttgaaggactagctgagattctatatgaaagagcacagaagacctggggtaggtcactgcccaggggactgtggggcactcatgtgcaagaaaacaggcagcaacatgccccctagagtttcaaggggccacagaccactgtgttttgccactgaagagaaaaccaaacatctggaaatgtggagacttggcagcattaggattgataaaaatcttagcacttcacatggtaatatttttcacttgacacattcttgaaaaccatcacgatggtccatccaagaccgggtctccagcatgtggctgtgacagcatgttaggtttagctgtggtccctggacagtggcaccacacactggagatccagcccattaagtgtgctatcttaaaggcaggaaaaatgggataggtctctgggaaaaattcctcagcactagtattactctgccctttgtctcagtggggctggaggggcccatgaaatatttcttattagggagagattatgctgcctgccatttagtaaaaaacacttcaaacccttaaataaatacctgaaaagtatatataattgcacttcctgttaccagggcctggagtagatatatctgaagtctaaacttgggctttataatatagctgcgtaatctcgagtctcagtcacatcccacacctgacagcatacaggattagaattgctgtataaatccgatagaaacactctgatttttctcaaggacttgatattcaccccaaagtaggaaaaataccatctccactctaagcccaaattgtaatttcttttttttttttagctttcttaataattcaagtccagagctaggtttgaaaataactttcttcccagtatagttcctttgttacttttatctgtggtaggcaggtggctggaggaggaggagaaggagcagagagcaacaaaatgcagaggtttctgtggtactcggtatgcctgcagctccccacctctggctgccctctcacctcccagaagcacaactccatcctctcctcagagacattcgacacagtacaaatgtgtgggcttttcagaacaagttgataaagtgtgaggaatcgaagtcacaggttttcctctaagtgaaatttcttcaaataaatgactggcttccagctgttgcataccaccaaagggtatgaaatatactttgctgaaaaatacaacctaggttcacagggcaaaatatttcatatcagcattattttacttaatattttgatttatattccatagcttaaaaacctccctcaagaaacccatcattaaaattgccaatcgtctgcaaaagcaagtaagtttcataaaatatagcagacagtgagtagtttgctgaacacacgcagcttgcaggaaacctcggaagtgctctcgtggtactcagagcacttggacccgcataaaaatttgtttcaggtttatacaagtacttgttacagaaatagggacactggaaaaggtgatttgccagtagatgagatctataggtgatagctgcaagggtaaccagagactagatctgattcaatgtgagtttggaatttgaaatcatggaatcttaggaaggaaaggaaccttagagatcatctagccctcttccttctgtttaaaaaaaaaaagtgacttgcctagagtcatgaagccacttaacagcagacctaagattcaaaaccaggtcaatctcctgcctggtaagttggattaaaagcagtgcttttgtagtaaccttgatggttcagcttgatccttgcaacagaaagaaaaccctactattaccctcccatccacccactatgctgaatgtccttgcatcacctcccactctgccccagcaaatccacagcaacacaaagtaaattacaaagtggttctgtagcccagtccaggggcttcagggttggcatgtggcaagtattaatgcctatcacagactcattgatgccaagtactcgtgactcacatcatagccttggtgggagtgtgattctgccctagacagaatcttccagcctctcaagcaaattctggttgggctctgagagcttggcagtgagcactgggatgtggcaaggcagatccctgcttcagagctgcctgggaggactgagctgccagaaccagttcagccccaccacagcccaactcaaattgaaatccactttattattagaattttggtggaaggagaaagcaaatctgagagcaagccaagatgttaaagtggattagctggagacagtccaaggca

SEQ ID NO: 30399 - DNA, 2300 bp, Homo sapien
gtaaaacaggacactactttacaaggtttttttatgaggataaatgagatagtatatggagaacatggaggaaactgcttagcatataaatgctcaataaatgtaagctattattactcattaggtcatgcttcgatcatttactggtatcccaaccatgtggcagatgccttggcacattttttttgggggggttgagctgggggggatggggtctcactctgttgcccaggctggagtgcagcagcacaatcatgagtcactgcaggcttgacatccccaggctcaagtgatccttccacctcagcctgccaagtaactgggaccacaggtatggtccaccaagcaccgctcatttatgtacttattcatttatttttattatttgtagagacagggcctccctgcatcgttcaggctggtcttgaactcctgggctcaagtgatctgccttggcctctcaaagtgctgggattacaggcatgagcaaccatgcctggctgtcacatagataaataaagcacaaatctaagcatggttccaactgggaaaggaagccccaaatcctggtaacttttaaaagccttgtcccatgagtgtgtttcttccaggaaggcattggttacctgggtgatcaagcttctgtttttcattcctcccacaaacttcccttttttctgatgaatgggccctctttatgagtgttgtgtgtttccagcaggccctttgccctaaagctggacacaaaggaatgggagagacaccctgtgagtaatacagtggttcatggaaaggtcccactgatgtggtccaagtgggcttcaagggggttgtggaaagcaagcttggccttgaaacatgaaaaagatttaaaagatagggatagggatataagtaaaggaatgataggtctactgggcatattgggccgaggggatggtgaatggaagtcttgcaccgtaagtaagatgttcgaagtttctctgtaggcattcattcacctggaaatattaaacttcacctctgtaacaggatgttagcccagaaacatggcctgagaagggaggaggactggttcctcaaagacaagtcaaggggctgttacaaaaagaaaaggggacagttgccaaataggcaaggaaaaagtctgaatctcaagtaggtctcagtgtggtcctataccaacatcagcatcacctgggaacttgtagcaatgcaaattctcgggccccacctcctacctactaaatcagcaactctgggagacatccatagatatttttaaattctaccatcggctgtatgtggtggctcacatctctaatcctaatgttttgggaggctaaggcaggaggatcacttgagcccaggagttcaagactagctggggcaacatagcaagacccgagaccctgcctctattaaagaaaattttttaaagaaaatctacaaccgtggaatataggaattcttttacattttttttttaaatggggaaactgaagataaaaggtgaagtgacttgcctaagttcaaacagctagcaggtggcaaaactgagctttgaaggttggttgtatgattccaaacccagagtgtgttttcacgtcattacagttggagagctgatcaatatgaggcactgttatcattattagtaatcagcattacacggaaggaaaggaaagggttggggacggtgttttcaatacagaggaggctgtggggagggaacgggtgaggctgcgaggaagaaaagggcatccttgagtcttggagcatctaagtctgcccctctcttacctctttggccccatctagttgtattttttaagccaacgcccattgtggtggcctttgaagggaggaagttgcacataaggagtacctacctgtttggtgccaagggctcaaactccacccgtttgccccgtgcccacagcgttggtgccacaggcagcgttacatgaggctccggccgctgctggccaggtctcctgcccacagctggaccttggaactccgccccttaggccctccctccccgcctggcccctccccgcttcccaaggtggcagtggctcccagtaagtcagagctgcggccgcggtgcggggagagcacagcggggagggcgggagccggctctcgggcggcggcgctgaagtttccttcccgccgcgctctcaccccgggctggcgccccgtgccatgcgggagcgctggggcggcggggcaacatgaagggcggcgacagggcttacacccgaggtccctctttggggtggctctttgctaag

SEQ ID NO: 30400 - DNA, 2300 bp, Homo sapien
aagaaagggaaaggcaaggctttagaaatattagattagtaatacctaaaatttgattttatatatatataaaatcaatatattatataaaatcaatatattttatatataatcaatatatattataaagtataatatgtatgtatatatttgaggcagggtctcactctgtcacccaggctgcagtgcagtgacacagtcatagctcactgcagcctcaaatgcctgagctcaagcgattctcccttctcagcctcccaagtagctaggacaacagatgcatgtcatcatgcctggctaattttttattttttttgtagagacacggtctcactatgttgctcaggctggtctcaaactcctggcctcaagcagccctcccaccttggcctcccaaagtgttgagattacagacatgagccactgtgcccggcctaattatattttaaacaatggcttaacttgattcatcttatggaactaggaggctaaatagaaaagagagacttaactttcctttctctcctttcttgtcataatccccctttcctttgtcttccctccctctcactcttccttctcccatagctttgaaattttgaggctgggtgcagtcactcacgcctgtaatcccagaactttgggagactgaggcaggtggatcacctgaggtcaggagtttgagaccaacctggccaacatggtgaaacacatctctaccgaaaatacaaaaattagctgagtgtggtggcacttgcctgtaatcccaactactcaggaggctgaggcaggagaatcgcttgaacctaggaggcacaggttacggtgagccaaaattgcaccactgcactccagcctgggcaacagagtgagactatgtctcaaaaaaaaaaaaaaaaaggaaagaaagaaagaaaagaaatttgaatattctgggagttctctctatgttattacatcttacatgactcataatttcatttctcagctactctacaccattgccacttctgctgggaaggaaagtctccagggtgttattgtatttttatgataagttttttcccagctattttactaattttaccccttcccacactcttgcctgcttcccctacttgttaggacttcctgagatacagtgagaaggctggtttggagtgttcagatattgaggtgagttttctgcttgtaatgcttgctgttcttagggaccatattggatatctttctctagaggggaaaagattgtctcaggaggaccgtggatccaggtggacccctctcagacagtaagaggctcttgtaaacagctttgtacctgcttgaggaatggcaagtgttaacacagtgtttcctagaactaaagaaatctgtcctggggtgcactagagcttagccccactggtgttcttttggctcctggtgacacatagtgggaaagggtaaccccttaatatccttcagagattagatgtaagttgcacaaaagcctcagtatgcaattttattcgtgaaggcaagtattatttgagtcaaacatataaagtattccattttcacctccctgtccaaaccctgcagactacttccaagtgaagtcctttgagacaatgtcactatgggattattttaagccagggaggttacagaccattctgacagattattttagttgaaaacctctagtgtttcacaagccaggctaagctgttgcctgggcagccaggaagcaacagagagaagaaagaaaatctgagaaggcaagggaattgatgaacaaaaacaggaaggtagggaaaggaggggctgagtaatattcccccaacatatgctcagtgactgacatggagcccctgtgctgaggaccaacaccctccctctagaacagaaagccccacactctctgagagtggacagccagaaccagcatcccttcctagaataaaggagccaccagagatgaagtccctgttttccagcactgaattaccaagagcttcctgcctgagtgctgttccccctcctgagtaacagttgttctttcccacagaaagcagtggagttaatgtgccttgttcccaaacgctgcaatgacatgatgaatctaggacgtctgcagggctttgaggtgagtctttaagaatgcgtctaagcccactctctccaggacaataggagtccagactgttgcggcttcctccccctgaagccttgtgtcctgcctgtgcctccttcactcaccactatgccttcctacccgggcccctctggttcacagtcctggaagatgcatctct

SEQ ID NO: 30401 - DNA, 2300 bp, Homo sapien
cggctcacgcctgtgatcccagcactttgggaggccgaggcgggtggatcacaaggtcagcagttcgagaccagcctgactaacatggtgaaaccctgtctccactaaaaatacaaaaaaatcatctgggcgtagtggcgggcactcgtaatcccagcgacttgggaggctgaggcaggagaatcgcttgaaaccggaaggcggaggttgccgtgagccgagattgcaccactgcactctagcctgggcaataagagcaaaattctgtctcgaaaaaaaaggaaagcctggcccatagggtttgtcatgggacaaactgtaggctctgaggattcccaatatccataaagtccagcttggcaagttctgttctgtccactgtggatgacctgaatcaagatccccctgctgagccattctgagtttttataacaagttgagtttctgcttgagaaggccagggcccagaacaatggtgtgcagaccacggcaggtgggggacaaggagggtatttttgaaattatgttatgggggcagttgacagaatgttagacagaccccaagctttcatatcagcttttacaacagagttgggaggatccagatgtggggttgcatggaattcccccaagtacacatatttgggaagtgagaagacaggaaaggagggacctagaaatgaaaagtaggatgattttgttaactggagccaaggtacaatcattagactagaatgaacttaatagaggccccaagagaaagggggtatattttatatagtttgataacggagggaaactaacagggaggctccctgtctgcaaagctcctggtccctcccaacagagataagagagtagtcttggttcaagagttctccacagcaagttggaaataacaaggaatcccagatgatgatgatcctggggaatgtactttaggttgctctgagggcaaccgtgcttagggaaaaaggatcaggggccactcttgttcctgttttggcggagagatttattacttggtagtaaagaagagaggagagaagagaaaatggtccatttctatcattatgatggtagttcacagtgggagtgaactttcagctgaaatgggaaaaacaaacaatggtcaaggtcacaagtttcttgcttggcttttattcattgcatagggttttgagctttttgttttgttttgttttgtaagggtgggatacagaaagaatgaaaagatcagggacaacccataataacttttaagaagtattaatataatgatttcctacatcttttacatttgtttcaaattaaatagatatatatccacttacagctgaatgtggtaaaatttttaagaaaaaaatggtaatgttggagatatccttcaggtctctctcagccataaacaatgtaagggggagtagaggaagcagaggagaaagctagcttcactgctttgtggtccacaaagcctttataaatagtagtgcctttcagaggggaggatgggagataaagaagttcattgcatttagatgtactgatattgcagcattttttctttactttaaaatatcttgtaaatgaaaacatctgaatataggggtgggaccaggaatgtttgagtttcaatctcagctattcctgattcatcttttcttacagaaagtctttgtttttccttccccaaatgtccccattggtaaaatgggagttgggggatggggaaggagggaggacattaatcttacaggaatgttgagaaataaccttggtggggacatctataaaatactttgatttttttaagtgctacacactgccagtgctaagaattttattgatagtaactttgaacattccaggttttcaatattcacgtctttagataccaattataaactcatgagattaaattctgtaaattgttttcagttggaagtatcaggtgctctttgtctaaatgttatttggtcttagcctataatttcgatcatttaagagcttgtctaccgaaaagggttaggagagctgatgaagtcttatgtccataagttgttttctccagtatttcttatggcagatgcgaagagtaaaatgcccttgaaagcaactgctaccttccttctcaagctttatgctctggaaaaaaggacagagaagaacccaacaaccactttcttcacttgggagggcagaagtgagaagaaaatatcttctcataccacaatttatttttcacagcctcacaggaatctaagagacaaattaaatgcacaggcaaattaaatgcatag

SEQ ID NO: 30402 - DNA, 2300 bp, Homo sapien
tttgttgttgttgttgtttgtttgtttgtttgttgttgttgagacagagtctctgttgcccaggctggagtgtagtggcatgatcttggctcactgcaacctccaccccctcggggttcaagcaattctcctgcctcagcctcccaagtagctgggactataggcatgtgctactatgcccggctaatttttgtattttttggtagagacggggtttcatcatgttgactgggctggtctcgaactctcaacctcaggtgatccacttccctcggcctcccaaagtactgggattacaggcatgagccaccacactcagctctaccaactttttatcaagtgtttttgagtgaactatcttattgaatcttcatagtgatttttggagaaagttaatattattatcttcattctttttttttttttttgagcgcagtctggctctttcgcccagcctggagtgcagtgatgcgatctcggctcactgcaagctttgcctcccgggttcacaccattctcctgcctcagcctcccgagtagctgggactacaggcgcctaccaccatgcccagctaatttttttgtatttttagtagagacggggtttcaccatgttagccaagatggtcttgatctcctgacctcgtgatccgcccgcctcagcctcccaaagtgctgggattacaggcgtgagccaccgcgcccggcttcttcattctatttttgagaaaattgagactcatatagctcaaaatgcattgccaaagatcactcagccagtaagtagaatgggactaaaatccaaatgttttggtttgaaacttcatgttctttgtagtgcactatacagctatgccttatctgttcctcttttttaaaaaagtatttgttatagttgacacatgatatcgtacacatttattgggtacatagtgctatttcaatacacacaatgtacagtgatcaaatcagagtaattcatatattcctcaccttaaatatttatcctttctttgtgttgggaacattcaaacgcccctcttctagctattttaaaatatatagtaaattattattgactacagtcaccctacagtgcaatggaacactaggacttattcctcctatctagctgtaatttgtgtcctttaaccaccccctacccttcccagcctctagtgattactattttattctctagctccatgagatcaacttttttagcttctgcatatgagcgagaacatttggtatttatcttcctgttcctggcttgtttcactaacataatgtccttcaggttcatccaccttgctgcaaatgacaaggtttcattctttatgtgaatttaagggttattttccttaagctagaataaagtattgccttatatacacaatggagaagggatttatttgtacagattatttattgattatttctttaagggatttatttgtaaagaccaaatatgtttggattttcagattgtctagcaatattatcctcctggataaccctgataccaatcaattaaccgtcttctaactctcctccttccctcccttaccttttctacacctattacctaagcatttgaggtacgccaaaggaaataaaaaagtactcctccaggaagcagagtacagacaaaagaggtaatgaatactgtaatgatctaagtgctatatattcctatgtgcaaactgctatggaactgtcacgtactagatgctatgaagttaataaaagaattgagtaaaggtccctgtctttgataacttatattctatttggagaaacatggggggtaaatcttggctaataactagcaaatataacatgttaggccaaggagtagagataattaagagaactagtcgagaaggcattggctattaaaaaatggacaggatttatgcaaactctcatgaaaggtgggacttcatgatcctacagtcaatctagctgttctgggctttgaaccccagcgaccccatccagaagaaaccaggagaagcacaaactggcgctaggttcgctaccatccacctgacccttgagcccggggaaacccacgggtgcagcaagccgggaaagctgcagacgaggcaggcggaagaggcgggacttcgcgggtgacgtcatcggggcgccggaggcccggggcgcctgggaatttgaagcaaacaggcagcgcgcgacaatggcggtcgctcgtgcagctttggggccattggtgacgggtctgtacgacgtgcaggctttcaagtttggggacttcgtgctgaagagcgggc

SEQ ID NO: 30403 - DNA, 2300 bp, Homo sapien
gtttaattggaggagatgggggagagtaaggaagaagaaaaacagattcactttagacctgctaagagcagagaaaaaacagatccaagtagaaacagcccggggaaggttaggatcctggatctggagcccagatagctgtggccatcccagcacagagtcagccattatccacgttttgtatccgagggaggtgcccccaacctccagctcccagcagcagaacctttttgagcctatgcttctagtccttggggcacactaggtaaatggggagttggggtcaagctaggacaatacacatggagctcatcaaatgagtcttgccttcctatggagcagcaggcaatggaggattggctttaagtcaaaggcccaggggaaaacagctctagctttaaatgtttaaagcatttatttcttagaagacatagacttaataatttattattcattacacaatatgaagggagcaaggagagcaaagagatgccacaagggaatatcacgattcctttttttttttttttttttgagacagggtctcactcccgccacccaggctggagtgcaatggcaccatcacagctcactgcagccttgaactcctgggctcaagtgatcctcctgcctcagcctcccaggtagctaggactattggcttgtaccaccacacctggctaatttttatttttttgtagagacagggtcttgctatgttgaccaggctggtctcaaacgtctgaactcaagcaattctcccacctcagcctcccaaagtgttgggattacaggtgtgagccattacacccagcccactattccttcttatttgtctctgggccacactgaccctctgtctctttcacagcctaggtggaacttttttttctttttaaacgaagtccttttgatggtgacttacatcagagtctgttttttctacttgctgcttgttaggaggcaccaggttttgaatgtcctacatccttttttttctgggggtttcagggcagccagtcttcgttttctggatctaactaaccacacttttcactttgggtgagttcacactcaacacccagctgatttcagttaacaggctctcaagagcaaagtgtctctaaacaacttaatttttttaaaaggcagacttattttagtacatgactacaatatattacaagtttcaaccagtacatggggcatatgagttagactgatatgtccacatggatacttagggagtgtttcctggaagcagcctggagctatggtttaacaacagagaatcagatggcagggacagagaatcctggccgggagagaaagcagccctcttagccctgtgctaatctgggaggctggtgcagggggagggtgggggatcgggggcagctgggtcagcatgaatgactgaagctggaaccaccccttcctggcccccagccaggtctcagctgcccgccttccggggctgtgactgtggggagagttaccatcttgtttctaacttcagaatatttccataaagtcagtcccaggagagtgggattttgtagccatttcagggatggttgagctcctaagcatgttagaacctcttaggaagcctagtctgagaggtggggcacctggctgcagaacctcaagttctcctccgtaaaataaaggggacttagtgaaatggtctcagagctcccgtccagttctgctcctccacttcgcagtttctgcactggaaatgttttagtagctggcctcttaatcccgaggagttaagaaacagatgatgataaaggctctacattgcagttgcacatccctctgtatttttgccagagagctttctggacacccagcccctttggtccccacaggcctgtgggggcacagcggctgtccctcgtgtagctgaggtcaccccctgcactctgatggcctccctggcacacctggctcttgagtcctgacccggtttcctaggggcctctcctggtgtctcaccctcctcgaaggccaccaggcagcactgcatcacaaagtccctgagagcaacatgccccagcccactcctccctggagcttcgagctcaccatcttatagccccatcccccagccaccagaggagcctgggacctctccccttgaacatcagctttacagcccggcagccagagcttagctccccaccctgtgacctcaggaatcctgttctcccagatgtctccgaagacagacaaagaatgtgtgcaacttggttttgatgatataaagtataataatgaccatttaattg

SEQ ID NO: 30404 - DNA, 2300 bp, Homo sapien
gtaacatagcaaggccccgtctctacaaaaaattatccaggcatggtggcgtgtgcctgtggtcccagctacttgggaggctgaggtaggaggaccactggagcccagaaggtggaggttgcagtgagcagagatcatgccactgcactccagcctgggcaacagagcaagaccctatctcaaaaaaaaaaaaaaaagagctatctgtttctagccactactcaagttcacttgaaaagcaaaaaggtaccaaattgtagggcttgtgatcctataatgaaataatacatcttttaaactagtcacatgagccagctgggctgctcatctctggagtcagccagcctcttgcagcttgtggttggagaaaccagagctttggaaaaaccagagcttagtaagtatctgatctgagacaatgcagctacaaatatagaaacaacaatctctcattgaaggtcattttgtgttaggcaggttgctgcattcatctcattcaacaaaagttcattgagcgttcttcataagccaagtgttgtactggctgccagggatatacagctggagtttcagtcttgaattaatttctaaatttttattgcccctggaattttccacttctttcttgaaactttctggaaataaggaatgggaacatgaatcatcttatgcttctacctttaccattaagacttctttgagatcttgaaagacaaaaaacagagtgttgggaagcattttgagaacctgccttctcggtgctctgagcttagctcagtaaatggagctttttcactgcttttgcttaccgctcagatcctgtgtccagaaacatcttaagcaacaattcacctgtgattctgaaaatctaagcgttgggcctcccctcaccgtcccactccctctacttaggaagagaagtttgccaacagaaccccgtggcgaggattctgtgtgtgcctttgaacttcaggcctggtgcttaaggtcacgaggtttggcttgtgaaggaaataatgacatttaaaaagcaaaggaaagtactaggaagacctaagaatgccaaagataagatcttagtcatgtaggcttgaggtgtgcgtggtattagccttttgatattataggataacatgctggaaacttttccatgtttaaatttaaaactgtgagagacctctggtggctgaaatggttattcttaaggattcttttgttccatttcttaggggttgagctgacactttgagtttggtcttggttttagatacttcaacatagttggttatttacaggcttctgctgctcagtgcctctggtgaggtggggcaggtctggatggagctatgttgatctttggggtgagtgtctgtcatgctcagaacactgacctaagagctccacccagatccaaaagctcccttgagtctggaagttgctccaagtctgatctgctcaaaggtttccttcctctttccagggctccctcctgggctctgactgttgttctctgacccagaggagggaacctgctgtcactccaccccatagccaccactcccaaagtctatcaggtgagtccagatgtccctaagctaaagaaatatgcaacccaggttggtatgttatttgacgtcatgaagttggcctttagcaacaggcaaaactatagtaacacaaggagaatcttttttttttttttaagagacagggtcttgccctgttgactaggctggagtgcagtggtacactcagtagcctactgcagcctcaaactcctgggctcaagcaatcctcccttctcagccttccaaagtgttgggattacagatgtgagccactgcacccagctgagaatctgttttaatggccttttcactatattgagatcatttccttggaaacaaacaggctcgtttgttagtgttttgcactcatcatgagcaagccctaactgggaggatttttttgcatctcatgcctttcctagcagagcctgtcacacacggtgtgtctacagtgcattgcctgcttcgactatttacattggggaaaattgaagcccagaatctgaactagggctccttgtgatttttgattatagagtcagacagggagaaccttgcactgccttttgcaggtaaacaattagctcatttctacctaaatttactttttttggttaacttaagacccttcccaccaccctggcacttagcctacattttccaagtcctaccttataagcgttctttatctctgtcaaaattttaggaaatatttagcccgttttcctaagt

SEQ ID NO: 30405 - DNA, 2300 bp, Homo sapien
catctttgcagtgacaaaaaaccattatatgctgtacaaggtatgctgggagggagggaggctagtgatttgtggggtgaagtgggtggtgaggagtgtttacaactctgcctatctgggggaaattcaaaggaggggtggaatatagcccagtcttgatctaatggaaaataataggaggaaacaattaagcattcgcatagcagtgaataccttacaagaaatttgaacatatagtatctaatttgattctgagaaaaaccttgaaaatagcatgaattcccatttttttgggtgatgaattggaaacagagaggcacactctactagagaaggaaaatataaaatgaaatgaagatacacacaaagaaaagtaaggcatctcatcaggctacgtcactaatctctgtattccagagctttatgcctgagcctgcagactataggagaccagtgggctagtctggcgcagaaattcccaaagaaaccaataaatgtcctgagtgaatacagcagtctgcatatggatctgttccatttaaagaaactgttcctgggtcaccctggactgccgcatttagtctggggcaggaattcccaaagaaaccaataagtgtcctgagtgaatagagcagtctgggtatggatctgttccgtctaaagaaactgttcctgggtcaccctggaccatcttcaaaaactccccacatgaacgtgctccttctcacaatcacagatgagccaagtttgaattacagatctcctcggtgtgctcatgtaagctaaatgtaaactcgtctctgagattcttttacgtgatgaagcaatgagaacttaatctggaatccctctccaccctccacccccagaacagctggccatagttccctctccttcttgctcttgaatgtccacaaaagaacctttgtctgattgtgtttttctattgctcctgcctgagattatcactgataaaatgccacttatattttcttgagttctttatcctcctttagttcaaatcaatgttagaagatgaaacaagggaaaaggattgtttttctttttttgtttagtggaagatagcaggataaagcctattcagggcgtggtggtgtgtgcctacaatcccagctaccggggaggctgaggcaggagaatctcttgaacccagggggcagaggttgccgtgaaccaagattgcacaattgcactccagcctgggggacagagtgagattctgtcgcaaaaaaaaaaaaaaaaaaaaaaaaaaaaagcctatgcacttacaaataacgttttatgtttttagagggctcaattgcacagactgtattgggtttccagatatttccagagggaagaagtccatactggcttaagcatccttcctcagagctaaatacaccttgcttgggggaggaagcccatccagtcccaaggcaggcagagggtgggagatgtctctgtcactgttagaagtggaagactcaggagttagtacagatgaaagaggaaaggtgggtacttcaaggctgcccctttgccacaggacctcagaggtccgtgggagggcgccattcgttctctcagcttcctattaaagaaagggtctatacttgagacccttggaaaagttgcccttttcacgccttctgaacagattgagcagatcctgaaagctgaacctgtgaatacctcagagaccgggggagaaatggcaagaaactgtcaggagctgtcgaccttagaagatgggcttttacagagctgtctgttaccgtgggaggggcggggtctcaagacattatcttttagagaaagatcttgtgagcccctttcctatggatctatagggctggatattccacggcgtactgtagcaactcttcttctgtgccatttcttcttgcttttccctgtgggatcttctttagttcatggtgggagaaggtggcaggatatggttctaggagcctttactgttctagcccagtatagcaatgctcactctgatggttggcagggcaaaatgaacttatttcttttctttactttttttcccaagaattttacagccctgatacctggaacaacggtggagattttagatggagactccaaaaatattattcaactgattattaatgcatacaatgtaagtcatcagtttcttcccccactgccacctcccttccaccctctcccactgaggccctgcagctgccgcgggctcaggtgggcagttctccgtgctgctcttcttggctctgctcccccatccccttgagtttggtatc

SEQ ID NO: 30406 - DNA, 2300 bp, Homo sapien
gtgtaagacgtacattggtttggttttgtaaggcaggacaacttgaagtgggggcttccaggttagaagcagataagagacaaaaggttgcattcttttgggtccttgatcagccttccactgaatacacaatttagtctggctcagtgaatctgcatttttacataaacaataggccagagggagcaatcaggtattcatttgtctcaggtgagcctcagagggatgactttgagttctgtctgtcctttgtccaaaaggaatttcctgtgggtaaattgtgagggaggtatgtagcttcttagctatcttaattaggcataaaatgggaggcaggtttgcctgacacggttcccagcttgatttttctcctggcttagtgatttgggggccctgagatttattttcctttcacaaatactataaaggagcttgctatggactgctgcatctttgcccccaggcacactatattgtacttcaagaagtttacttcctcaggcattgaggcaccaccttgttagagtttgggaggaggccaagaaataaaggttaacatccaaactccttgagctgggcagttaggacagttttccactgggccctccaagccattcttccaccaggtccctggcctgcaaaggtgagacccctttgttctttcccccttactgcttcagttttagccaagccatgctgcacttttgaacgaggcatcctagctgtcacttcctccagcagttaacccctctgtccctcggttcctcaactggataacagtagggttgtcggaggatgaaatgagttaatatgggtaaaggacttagaacagtgcctggctggcagtgtgctctctgtacttggtaggtattctatcgttattttcccctacctgaatgtcgcctcttctcttgcctatcaaccactccactctaaacgcacttgtagcgaatccaagcccaaggcatcctttcctgcaccatctgaggaagaccccaccccactctttattggctagttcagatccagcttatatgtaaatgataagatgaaagcctgagcatatgtttttgagtctatcagtttgatcatggaaactgacagattatcagtaaggacaacgaaatatagcggcatattggccagtctcaaatccttgaaaggtgcaaaagttaaaaagtgaaaagtgggccgggcacggtggctcgcacctgtaatctcagcactttaggaggcagacacaggaggaatgcttgagcccaggagttcaagactaacctgagcaacacagcgagacccccatctctacaaaacatgtaaaaattgtccgggtgtggtggcgcgcgcctgtagtcccagttactcaggaggctaaggtggaggaacctttgagcccaggaggtccaggctgcagtgagccaagactgggccagtgcactccagcctgagtgagagcaagacgctgtctcaaaaaaaaaaaaaaaagaaaagaaaaagaaatgtaggttttacttgtgcctccacgccccaccacgccctcccttgctcatccagaagtcgctttgcggttccacgcgcgggcgtctacgtcccatctcaggccgccggcagtgaggctttgggaggatgaggcggtaccggcacgacccccgtacctgctctccctctcgcagtctagcaaccgcctttggcccaagtaatctcggctcgcctaatacagcgtgccccgcccctttcccgtggcgacgggcggctaagcaacgggagcgggctctactcagtggtttcgagccccccacgccccaagtgagtcgcaagcgacttccacctgggcccgtagggcctccgcgtcccgggccggtccccgcacagggcggagctggcccggcccggagctcgccccgccccgcctcaccgtaagctgaccgtgtggcggccgggcgagggcctggcaggggagagaaggggaggagaaaggagaggaggaaagtggagcctggcgggccggagggaggaagggaaggggcggaggccaggggcagagtgtgccggcgcgcgggggagtctcggcgctgggcgcgtctcggagcccaagtcgcggccgccgagcggagccagcccctcccctacccggagcagcccgctggggccgtcccgagcggcgacacactaggagtcccggccggccagccagggcagccgcggtcccgggactcggccgtgagtgctgcgggacggatggtggcggcggggcgcgggccagcgcgggcgccgtgagccggagctgcgcgcggggcatg

SEQ ID NO: 30407 - DNA, 2300 bp, Homo sapien
tgtgtcagtgcactccaggctgggcaacagagcaaggccctgtctcaaaaatataatgttaatgaactttatttttagagcagttttagactcacagcaagatttagagaaaggtacagaggtttcccatatactccctggcctgacacatatattatcaacatcccccaccagagcagtgtgtttattacaattgataaacctccagtgacacatcattatcacctacagaccatagtttacattagagatcactcgtggtgctgtgcattttatgaatttggacaaataaatgtataatggcatgcatccactattataggatcacaaccctaaatatcttttgcacttttcatcctcccctctaactcctggcaaccacagatctttttactgtctccacagttttgccttttccagaaagtcatatagttggaatcatacattatgtagcctttcgagattggcttcttttacatagtagcatgcatttcctccatgtcttttcatggcttgatagctcattttttagtgctgaataatattccattgtctagatgtaccagtttgtttatccattcacctactgaacggtatcttggttgcttccaagtagtggcactcatgaacaaagctgatattaacatggatgtgcaggcttttgtgtggacataaattttccacacctttggttaaataccaaggagggtgactctcagatcttctcgtaagagtatgtttatttttgtaagaaaccaccaaactttcctctcaaagtggctgtgtcattttgcattcccaccaatgaatgagagttcccattgccccatattctcaccagcattattttactttttattttttaataaaagtaaattaggcctataattatggaaaaaacagctcaaacagggcaaaatcatgtacaataaaaaataaatctccctctcatcctaaacccccaggacccagacccccagtttccttccccagaggcaacttctgtgcccaattccttgtatctccctcctgaaattacctatgcaaatataagcaaatatttgcttgtgtataatccttcccttcttttattcacaaaagagagcatgttatacacattgtaccttacatacagcttttaaagaaatcagtggtttctacatataggtttgtaagactctcaagacagctctgaaggttatcaaacacataagctattctgacatcacagctcagaatcattccacttgacagaagtgaagaaaactcatagcccagatcaccactggaccactgagctaactctcctcctcagatctcatcagttccccagagaaagaaagatgctacaccctgcctggcctgggagtctcagcccacagtgtagaacccattgcagtgttattttcaccatttattcagatgatccacttagaaagccagaggctggaatgtcttctcatggcctcttagaattttcactgagttaatccacatttctctcctttactatcccattcctgtttttatggctatgtctcctaggtatgcctaacagaatgtgacatctagtttcttttggagcttcttggctgtttcttcctatatgacaattattcatacctttctaaaaataagatgttttatctagaatgttttggggagccccacctagtgttagaggaccatgcttcaaggttctggagggactttgagatctgaagattcctgactccttggagtcagaagactgcaatctctctttctttgggcaagcccttgtacactaatctctgatctttactattgacaagtattatacttggctctagaatttcagaaacaaactctctagagacctaagcaagcaaatatttgtttttaactcttccaaaagtgtgctgtggagtaacacaagcaaggaatggaaagggcccaggggggaggcatgaagatggaaaaatacgtttccagttgttatttattgtcatttctctggatttctaatctctttctactccatctaaggtcccagcaatccttgccaagatgatccctgtgcagataattcgttatgtgttaagctgcataatacaagtttttgcctgtgtttagaagggtattactacaactcttctacatgtaagaaaggtgagttacaagggatgagccatggctgagctctgtatctcacaccaaaagtggaatcgaaaactcaaaatgatggcaaaaggagattccaaaatatgagagataaagaaaatgcagaggcaacaaaggccagcaaagtagagaaaagt

SEQ ID NO: 30408 - DNA, 2300 bp, Homo sapien
tggccaggctgatctccagctcctgatctcaggtgatccacctgcctcagcttcccaaagtgctgggattacaggtatgaaccaccacacctggccttatttataatctttttgtttgtaatagtcaaaactagaaacaactcaaatgtccatcgacagatgaattaccaaacacgccatggtacattgatacagtggaatagtgttcagatataagaagaaacaaactatgaattcacacagcaaggatgagtctcaaaatggttataagtgaaagaaactggctcaaaaaacaaaacaaaacaaaaaactacatctgtatgattccatttacataaaatgctagaaaatgcagactaatttatagagacagaaagcagatcaatggttacctggggttggggtggagtataggggatgtagcactaaaaagggacaagaggaaagtcccaaagggtgtgttgggaatgctcggtatcttggttgcaacggtagctacacatgtatatacatcaatcaaaattcgttgaactgtacactgtaaatagatacagtttattgacataaattatagctcaataaagctagtttaaaaagaaaagaaaaacaagcctttgtttaaatcctgatgccaggagttattcaagctgagaataatagcataacataatgggccttagaagtgtctttgctttggaaaaagtgtttaaatggacctctcagccatgtaagaacaaacccctgtcttattcttgaatggagactctaggacaataagcagcttatctgctgggcgatcatacaaaaatgttttgttttcatcaaggtcagggttaaaatttaaacccaaaggccaggtatggtggcacacgcttgtaatcacagcactttgggaggctgtggttggggattgcttgagtctaagagtttgagaccagcctggacaacatgacaaaaccccatctcttctgaaaatacaaaaatcagccaagcattgtggtgtatgcctgtaatcccagctacttgggtgactgaggcaggaggatcacttgagccctggaggcagaggttgcagtgagctgagatcgtgccactgcacttcagcctgggcgacagagtgagactctgtctcaaaaaaaaaaaaaaaaaaaaaaaaaaacttaaactcaaaactctagccacaactcacaaggtatcattagtttatattcctctggctggggctagacacagtagagttggggccctggactttaaggagggaaaattagattaagaagacccaaatccaagcagtaaagctggttcctgacacatggtgagaggtgaggggctgaggaactagagagagggtgagaaagggaactgagaagtggggcctgcccaatgagtggccaggagcagagagatcaaatcagctgttctaagttttctcttttctgtactttattgccaactccccaacacaccagtcacccacaagacttcagtaaagttaggttaaatgccatgatgtgatgtccattgtgcttgggaactttattgggggctgtatccaggtagagtcacagaagcttggagatgtgattacaaagttgctagacatgaccatcagagaggcccggaatggtagtccccagcatacagtgacaaaagttaagcaactaataattttgggaaacatgtaagtcctcttcagggattctcagaactacagctggaggaaagtggtttcctgcactcatatgtgggtgagtagagcacagtttgttattgaatgtttaatggaatggtgacctcctaaaagatggcggcttggagacatttgagatatcaagagattaaccaaactcatgtgccaccaacctcacaaggatatttggaatgtcctgacttattttgggctttgagtcagaaaaatgattcgtaaggccagctccacctcttctatctcaaaagctcggaagagatctatggtatttggccaaatgctagctataattgcctttctgtggtttgacgtcaattaatgactggactttgtacccgaaagacagttaaaacgaaaggtagccaggaagggaaatcatttcctcctcagattaccaagcaagaacagctaaaatgaaagccatcattcatcttactcttcttgctctcctttctgtaaacacaggtaaggaatatttttacattttaattcttccaatcatgtatgttgtctttgaggtagaatcagcaggcctatagctaccaattctcccagcccagcacatggtctattttataaatgaagtttc

SEQ ID NO: 30409 - DNA, 2300 bp, Homo sapien
ggcattgccagcacatctgcagatagaaccccgggaggtctggaagtgaatgacattgcctgagtccacgcagagcaggtgcaaagttggggaacagtccactaaaccaccatcactactgataccaatttcaagttcaggcatccccaagatcgccctcagtttcaataattcactagaggagtcacagagcttactaaaagcgattatattaacagctacggtttattacagtgaaagtcaacagcttaaaatcagccaaggaaagagatgcacggggcagagagtccgggagagttccaaaggcagagcttccagctgtcgtcccgctgaggagtcatgcacagtgttaactcctcctggcaacagtgtgtccagtatgcagggagtactgccaaccacggaagctctccagagccttgactggggctttgtcatgtggctgacctcaatctccagcccctctagaggttgagctgataccatgttacccaaccccaccataaatcacattgttggactctctggcatggcccagcacccccaggtaaacaaagaagtttttattagacagcacattccaagggcttagagatggcctcccaggatccaagagcaaaggcctgacttccctggggccaaggttaaattctttactacacagcagaattttatgtctactaatcctatacttgtcccttcgccacagctgcctgttggtcgtgctgcaggtggatatctcctgctaagataatacagggatttagaaccctttgcagaagtgcagtcctttgcattacgtggcgctcagtgacttatttgacttgctattttttgcccagtatcaatgtataatttactggtgatgtaacatacctgtccccaagaaagagtgaagattaatccatcattggctgaggaagccactcaaatgttctttcccgaggtgttctgtttaccaaacctggaaaaacaggttaataataaaacaacaataataaatcattgctattaggctatacactgatgtcatagaaagggtttgataatgtcccatgtttgcctccatcttctgcagagtggcatgtatctgatacatgggccttgaacacaggtggatctgcactgggcccagtactgagaccctccactccgggaaaggagtctcgatagctcctattgtgcagggtagcagggaagcaggcctgatatttcatgctgtagagggattttctgccgtctccaagggcacaaggcaaacatagggagagtagctcttaatttgctctcaacaaaggggctcttgacccacataatgtaatttctcacggagagcctttttgaagaagacctgtctttgagttaggtcaactcattgtagattatgaggcgtctatgtagggcctgtcagacctagagtagctgaaaggagcctttccagtgcagctcgttcactatgcagagtccaaataaacagttgcctctgagttgtttgaaaccctgggccttaaaagagagctgcttctttgaagatgttttgcatccaagggtgctattctgaacatcatttcctgccaagattttccccactgatttactctctgcctctttctctttgtactcatggaacaacagaaaggcatttaagaggggaacaaaaaaaggacaccacttctgtgcaaagccgcgtgctgataacttgatggctggaaaatgcctgttttatcctgaaaataggaaactggttctaggtccaaggcttttgtctaactcactgttaacgacaggcttgttcttcctttcagttaaatatgtgtttttcagcgttacctagttacatccgatctacagttcacgcctctaggtaagtaacagaattatatttgcttgtgaactagtctgtacaaaggggaggctgttctaacatgggtgatagcaacaaaaccgggctgttttcacccagccatggggcaatccagggccaaggtcactgaccttcatgctctcccatcccgtcactggtgaatggcgatgacattcatttccaaaagccttgggacccacgtgtcatttcagggctgttaaaaacccacaaactttgcctatagggagtccaacgcggtggtgatctcactgcaaacaaccttttccctggcctccaatgtgacgctatttgacctggctgataggatgcagaaatgtgtcaactcctgcaagtcctctgctgaggtctgccagctcttgggatctcagaggcggatctttagaggtaagagggcagccctctgggaggatcctac

SEQ ID NO: 30410 - DNA, 2300 bp, Homo sapien
tgattccattcatccccacagaggtttctcaccaatgcccacagtccccattcccaaacagaaagagaaataacatttccaagtggggaaaattaaatggttttatcagggagtcacgtaatcagtgacaacttcatgtggccctgtcctcacccttgctcagtgtccctcaattggcacccatatttgatattggattccaaattagtttggatgtatggggaaaggacagtgttctcagaatgctgtttggttttggtactattttttaggggcctggcacccagcagtgacccagcactcagcagtggcccagctttggcttctaagcagtggccaggttgggtgcagacttttccagagtaacagggcagctttcttggacgtgacttgggcatcccacgcacctgctctgaccctgaacctcctgccttgacaaacggcatttgatgctacacatgacttccttttgcccaatttaacccccaactttaacttcatcctcagaacatttttaactaataccctctttgccaccatcttgggtgttatggaagttaactatcatttaaatatattttctgactaatataaatatattcctaatatacggggttcaagtaacagtccatactcaacagcattatttcctcagcactcccaactggaaaccattctcctctccaccattttcccttccagctgagcacagctggcgagtgaggggcctgggtttggagcaggctgcctggccctcctgctttttgactgtgcgacttgggcaagatgcatgacctcccccaccctccatgcctcctttgcttcctatgtaaaatgggaagtataagaggacctgtcttcatctttgtgcaatgcttgaatgaatacacatcaggcacctacgtctgctacctacctccatgcatatttactgttattattatttttcacaaaatgagatcattacatataaagtctatttgaagcatgctgttttaattcaacaatccctgaagaatatctttattttatagcaccaattcagtgaccacatagttttctttcttgtggatactgtctactgtaactgatttaattgataacctgctgaaggagttttaggtttgttctttctcttcctctttctactgtaaacaatgctgtaatgaacatctatgcagctaaatctttgtccacattcttgagtatctccttcagataaattcaatttggaattgctgcctcaaacccattcacatcacacaagtttcagtaatattgccagagtcttcatgttttatcagaattgcgcattacagctcccacctgcaagagtaggtgtcagggtcaagggctgccagcttttataatagcttcctaccacccaccccaggaggcacagttagcaactttggcgaatatgagatgcttcttgccttttgcttacacccaatcttcctcctctaatcccctctctgaccctgcacaggtgccagaggttcagttgctcttccatgagccccatgttgatctctttctatcaataaatttccatcatttattctatgcacaatgaaatttaatcctgtattatattgttgcttcataattccttcctctggattataagaataatgaatatgggaaaaaaagaaaggtgaagttattattttttaagatggagtttcactcttgttgcccaggctggagtgcaatggcacgttcttggctcaccgcaacctctgcctcttgggttcaagtgattctcctgcctcagcctccctagaagatgggattacaggcacctgccatcacgaccggctaatttttttgtatttttaatagagacagggttttaccatgttggccaggctggtctcgaactcctgacctcaggtgatccacccgcctcagcctcccaaagtgctgggattataggtgtgagccatcatgcctggccaaaattcttttacttgaattcactctctactgatgtatttcacggtgtcttttctgaaggtttacttttcttgtcagaagccagcaaactctccctgatgcatcctcttcttctttcagatgctgcctggaaacattggccagaaagtaacactgaggcccatgtagaaaacatcaccttctatcagaatcaagaggacttttcaacagtgtcctccaaagagggcgtgatggttcagacctctgggaagagccatgctgcttcggatgctccagaaaacctcactctactcgctgaaacagcagatgctagaggaaggagcggctcttcaagtagaaca

SEQ ID NO: 30411 - DNA, 2300 bp, Homo sapien
attgatttcctgtagtaataaaatggtgagtggggtgggcaggacaaacccaagaaatctgcgatattgaaaaaagagacaggtgagattctttggggataagcatgagatgataaagaaaggaatcaacagtgaattaaagacaaggtgggctccgtagtggaccttagtcttgttcatcaagcatctgaccttcctgaccatttgggggttattccaccaatggtcttgaagggagagagtacccccattgtgtgtaatagaaacccaatggaccagacctcttttgcctgtccctttgcagccctggtagggcacatgacctacactaggccattgcgtgctcccattgtaaccaatgaagtaaagataaagagctggtgagaatccatccacagggcagcaggggtgttggcagcatcctggccaagctgttcctggggaagaggctgggtgtgcctccaggcttggtcctgcccttttctgagcctcatcctttagcctcctgatgattctacaaaccaccagtgtcctacaaatatattcttttttaaagaaattttttttttccaatcaactgtcctgactgattcatccatcagtcaaattattccagtgataatttatgagccaggaaagaagtctagccagtggcttgtgttcaatgtagcttggtgacacgaatccggtgctttgctgatgcaaggaagtaaaaaatggggtgaggagagccttcatcaagaagggtgtaagtgacaaagctgaatattaactctaacctatctgtaagcattggacgcatgagtacttggaatgtacagttctggccattgtgcctaaaggaaagtagaatggaaagggcacctcaaataagaaaacaaagatgctttcctgtgggtacagatgagatctggcccaggagggtgaattcatgagtgacagcttgggatctggctgtgcatggcaagcagtcatgcagccacccagccccttagcacttttagccctgagttagctagtaacatcttggaccctgatcttttgcaagttgacaccaagaagaacagctgtgccctcttattctatctgttggtgccttgtgggtcatggatctcattcattcattcgtcatttatatttctgtgttgggcaccaagaattctagggtaaacaagacagaaggcctgcttaaatgaagcctccagattagtggagggggcaccacgataggtgctatcctaacatcatgttggggatgctatggagcactgagaagcaactactgtagtcagggaagaggggatggcctcacagtggaggtgaggttggtgctgagttttgtagcacaattaggagtttaacagacaatgagtagattagggcgtgtgaacagaggcttcctacagacagaaaaatcatgctgatcagactttcagtgtgcagggtgtggagctaaagaggtcacagaccatgaagagccttatatgtcaggacagggggagattttgatatatctgcaacggagacattgtggtcagatttgagtttagagaacagaggcttaggggatgattcagagtgaatcatctgaagatttaaactcatctttaagggtgagcttaaaggcaagaggccaatgagcattgtggttggccagtttgttctcaaagtgtggtctctgggaacgcatgcggaatccagatttctaggccccaccccaagcctactgaaccaggaactctgaggaggggcccagaagtttgtgtttagcaagccctgcagctgagtctggcagacgcttcatttgaggaccactgtgcaatccatatgaaatgtggtggtggattcagctgaaaccatggaatgaatgggggcgaggctggggatgtggaaactgtatcccagggatcagatctagacgactcagtggatgattgcatggggtgcaggtgggtgggtgctgggggggtagaaaggcacaggagcaggttctggcactggcgaatgaaaccgcttctcacacaggtatccctcatgggcttcctgttccttttgggcttatacatctcgtccctggcttcctgcatgggaggactttatggagctccccgcatcctgcagtgcattgcccaggagaaagtgatccctgcacttgcctgtctgggacaaggggtgagtaatcctctttttttggtttgttttttgaaacatgttttgctgctaacctcactgttggcccatcaattggttaagcttttctgatcagagcctctggtcaatttctttggggtgacacagaa

SEQ ID NO: 30412 - DNA, 2300 bp, Homo sapien
tgaatcaaatggcttcccttctttgggcctccgttgcctcatctgtgaaataaaaggttggagtagatgatcgctagggtatcacctagatttaagaatcatgattctaaataactgttttattttttatttttattgtttttgagacggagtcttgctctgtcacccaggctgaagtgcagtggcgtgatcttggctcattgcaacctacgcctcccagattcaagcgattttcctgcctcagcctcccaagtagctgggactacaggtgcgtgccaccatgcctggctaattttttgtatttttagtagacgcggggtttcacaatgttggtcaggctggtctccaactcctgacctcaggtgatccacccaccttagcctcccaaagtgctgggattacaggcatgagccactccatccagtcctaaatagccaaatttaaacaatttttggaagcccgccaagaaaagtgtcgagaccaaatagtaattataaaatgggcactgagtgtttcccaaactgtgctctgtggaactttaataatgaagaaagttttcatttctttaaaaaaaaaaaaaagggttcaatgccaaataagttttgcgaaactgtgtgctgtatttctcttcttagagatggacaatgaatattagcatattataggcactacaatagcccagcaccgaaaacctctctaattaaggttttcccaaccttattttcaattgtggaactttttaaaaaatgtaatatttgtaaaacacctgggcactaatgctctgggaaatagtatttgttctattacgccaaccctaaatgtaactctaaccttaatgatagtgttttaaaattgcactggatgcaaaaagaaagcaaactagagaatttctgtgacacttaacacagacaggaaaaaaatactaagtcaaaataatttttctagctctaactagtgaatgagacatttataattcaccgaagctagggaacattgcccaagaattgtgtggtaacacagaggtagaattttggaaatgacagccacagtgtgtgagcccctataacaaatgtgcaggccaggcacggtggctcatgcctgtaatcccagcactttggaggccgaggcagtcagatcacctgatgttaggagttcgagaccagcctggccaacatggtgaaaccccatctctactaaaaatacaaaaattagccagacatggtggaaggtgcctataatcccaactacttgggaggctgaggcaggagaatcacttgaacccaggaggcggaggttgcagtgagccaagatcacactattgcactccagcttgggcgacagagggaaactccatctcaaaaaaaaaatccaaacaaacaaacaaacacaaacaaatgtacactttgctgtgggaaccacccacattgccccagcaggaatcacccgtgagacttcttgtctgcagtccgagttgcctgcatctccttgtttctggctctttgtgtctgtgatataatctactttctggcttctctgttttgtctcaaaagccaagtttctggccatatctgggcctggctcattcctgtgtcacggtcagtcctttctcctcccactgagcagcatcctaatgtactgcacaacaggcagcctacacagaacctgggggaggagtaaagggggtttgttatggagacagtaagtgtttggaagcaggaagcaattaggatgaatcagtcattttcctccacagaagcatatattgctgtggtgttctcaggggtcttcatgggttaacttctgtataaaagatctgaaggaaggtgtacaaaatgacctgacaaactgtaggaggtacaacaatggcgaggaataaagagcactatgtcatgatatggtttggctctgtgtccccactcaaatctcaccttgaattgtaacaattcctatgtgtcgtgggaggaacctggtgggagggaattgaatcatgagggtgagtctctttcccgtgctgttcccatggcagtgaataagtctcacgagatctgatggttttataaataggagttcccctacacaagctctctctcgcctgctgccatgcaagacgtgactttgcttctccttccccttctgccatgatttgtgatgcctcctcagccatgtggaactgtgagtcaattaaagctgccttagcctcctgagtagctgggatgtgtgtaccaccatgcccggataacttttttattttatgaagagatgctgtgtggtccaagctggtctcaaacttgtggcctgaa

SEQ ID NO: 30413 - DNA, 2300 bp, Homo sapien
aatgcagaggtcattgtttttcaggctgtaaaaacctcaagcacaggaatcccatattattgccgttttatcctggcatcttggaaagtaccgggcacatggttggctctcggttgcactttgctgagtgactgactgggaaacacaccagagtggatcagcatccagtgaggcagatggatggacacagtcctaggaaacgtaatctgcgcagcttgtgaaagtgtgatgagagttgcaggagaatggagttgatggaacagattgtcagagcactgtctccaaagaagaggagtggcagggtggacggagcgcctggctgcacacacacctgttccgcctccctttctttcttcctcccatcctcccaccctataggtagtcatcaaagcctacggggtgccaggaggtaggctttgggatacagcggagaataggatagcgatggtccctgccctcatgaaacagggaatccatgtcagcaatatatgcttttctgattaatgctatcagaacacatgcttcttgttagccgtgtggctgtgggcaagtcaccgaaaccctttgagtttgtccatctgtctaatggaaagaaataccctcctggaagagtgttttttaaaggattagaaataatatgtccaaagtagttattttttctttgagtttggggggaggggtggttccttctctctctccccctgccaactgttttctagaaaatcagcacttactggatattgtagagaataattttggggttttattattttgaagacggtttcttctgttaaacttcttcctgcatcctcttgaactggcagaaataaaaatgctagacttttaaagatatgacactctagaatcctgattgctaaaaatgaaaagcattctaaagtaaataaaataacaaattcaaacagtaaatctgtaatgaccgaatgagcaccattttaaactcacacgtaccagaggtgatcgtggtatgaggaatgagcatggtacattctgaagctcctgaagtaatcaagggacttctgttatggcctaaagcaaacaaacagccaccatacaaacctatatacatttctatttcttttccctcaaatttctacttgaagcaaaaggaaagtcacttcttgctttctctgccccagtaactgtgggtggcagccagtttttggagcagttctggagcaattactctgcaatcccaaattcctagtgtatgaacaaatctgctcagacattatcagggaagaaatactggaacctggattttagtcctggctctgccactttctcaatccttgaccttggggaaatcacctaagcgtcagtttcctcctctagaaaatagagaataataatatctgcctcacagattatttagagattaaatgatgtaataaaacgtatttcctcaattccaagtcaccatcaattttaattcacaccaaattttcaggtggaaaaaagccttacattaagtcctcatgttgcttgtaagacatccaaatttcagaaaatcaaaatgtttttaaaaagttatactcaaaatgagcaactactataaatacgattgccttggcaaaggaagattctaaataaacgtaagacagtcttgttatcgtggtcatcctccctgggcggaggatctgcaatctgtgcctgggtttccctgtcgccaccactctgctaagcagccggaagcagggctgccccttcagcatttctcttgagacctaccgcaccccctcacaatcccagatcagatgccaaagccagtggggactggacaacatgatgagcccaaaccaatccacgctgagcttggcatctgatttgggattctccaccttgcagagaatcggaaagtatctccacaatttcttttggaccgagctgttcttccctttccatgagtttcttttacacctgacctagagcctctcaaccatttttatgtcactgcacagccagaaaatgataatatttgtacagcactccagggaaaagggaggaacagttgggccaagaggccaatgacttcaccatctggaacccattcagggcattccagcgtggcccaccttctccaattagcctcctcaatgaaaaagaaagagggggaggaagaggaagagaaaagaagaagaaaaccctggtaatgttcactgttttttgctttagaattataagggcactttagtttttcgaagcgtctttatgataatggtctggtatagtgatcaaaatacccttgggcttgaagtgccataaacaaacaagttgtgata

SEQ ID NO: 30414 - DNA, 2300 bp, Homo sapien
attctgatgaatctgtggaaatacagtcagcccttcatatctgtggatttgaccaaggcaggtcaaaaatatttggttaaaaaaaaaagcatggttgcagctgtactgagcatgtacaaagttttcttcttgtcattattccctaaacaatacagtataacaacaatttacatagttttttttttttgtttgattgtttgtttgttttttttttaagacaggatctcactctgtcactcaggctttaatgtagtggtatgatcatggctcactagagcctcaacctcctgggctcaggcaatcctcccacctcagcctcccaagtaggtgggactacaggcatgcaccaccatgcccagctaatttttaaaatttcttttgtggggaaaagaataggctctcaccgtgttgcccaagctggtcttgaattcctgggctcacgtgatcctctcaccttggcctggagatttggaatttttgtaattccaaagtgctggaattacaggtgtgagctactgtgcctggccttgaattaggtattatacgtaatctggagatgacttaaagtatgtgggaggatgtgtgtaggttaaatgcaaatactacatcactttatatcagggacttaagcatctacgcattttggtattggtcagggggcctggaactaatttcctgcagatgccaagcggtgactgcataatggattccagtaacgtgactgtgtcagcctgtccgcccattcatcctttgttcacagatggttaatctgtaacttttggggggtctttttttctggcagagatgggttattaaaaatttctttgctgggaatgaaattctgacacatgctacaacatggatgaaccttgaggacattatgctgagtgaagtaagccagacacaaaaggacaagtattgtatgattctacttacatgaaatacacaaaataggtaaatccatagagacgggaagtagatgaggggagttacctctgagggtagacgaaacggggagttagtacttagtgggtacagagtgtctattggggacgatgaaagttttggaaatagcgatgatggttggacaatattgtgtgtgattaataccactgaactgtacagttaaaatggtaaaaatggcaaatatgatgttctatatcttcacacgcgtctttgctggagcagaagcgagaggttaggttctgtcagtgttcccatggcttagccttcccttttgtttttagaagaacaacctctatttttagggattttcacacaaaggcttgtgggcgtgggaagttctcccagctgccctcctgtttctcagaagcccacatggaagcctctcaaattatttaaggtttaggaaatatgccagattgggaatggagataatttaatctctctgtatgttaatttagggttctttttttctgcaacatgaggccctggaaaccttacttcacccctaggaaaggcagttctgggtcttggtgaagggggtaagggtaattcacccctacacagcatgcccagagcgctttcctggcaaaagcagttccacgccctcagagtctggggtcacctgatcacgcagccaggcacacacggagacccccggtaccggggtctcggtcagcttgtccagattcttctccacatctgcccagggggctgcgggtttccctgcactccgggcttatcccgggctttctcagtcctgcgtgcagtgctcacagccactcctcagagccgcacagggtaggctcctgtccctagtcccctggtcccggggctgggcatttccgctggttgcactgtcgaggggggagaggcagtggctggtcacttcgagcctgtgggcttgcggcccctactccctgttttcccccagccctgcccctacccaggtgaatgttcttgtccaggtaggcgcgaaggcccgacccttgcggagggaaagcctctgcagcgcctcctcgccacctgggcccgagactcccggtgctggcgtggcaggggtgcccccgccgggacgggacagctgggacccgcgcagccgagccggggcagccacgtggcggcggggcggggaccgggcgggccgggcgctgggagctggctgtcccaggagcaggtgagggcggaagggctgtggggggtggagagggtggtctcgggacagttcctctccccggcccgcagttaggagccaggcctggggtcacctttgcccccacctccccgcccaggtggatcctctcctaccgccggtcacccgcgcgccggcacacggg

SEQ ID NO: 30415 - DNA, 2300 bp, Homo sapien
cagatcacctgaggtcaggagtttgagaccagctgggcaacatggtgaaaccctgtctctactaaaaatacaaaaaaattagcctggcctggtggtacgtccctgtaatcccagctactcaggaggctgaggcatgagaatcgcttgaacctcaggaggcagaggttgtggtgagctgaggttgcgccactgcactctagcctggttgacagagtgagactctgtctcaaaaaaaaaagttttcctgctctcatttgctgtttcatcctaagaaacttgagaaatagactactttaaatattacagtgtatataaatgtgtaatttcataactctgcaaaagaaaacccagaaaaaataattttttaaactttctttttggggagggaggagttagtgaccccaatctgttattttacaaaatgggcaaacattgccaatctttctgaagtttgaaatgcagaatttgaagtttctcactgccctgcgttctagggaaagaaaaccattctatactagaaaggtgttatttaaaaagtttgatacccagaaaaattaattatttcattagttaccataatgcctgtgagttttttgccactttgatttaactgacattgacatgtctttgtgttagtgttgcagcttctcagtttttatattctacttcattggttgtaatttagtctcagatgatttcctataggatgtaatttcctgcatagtatatgggttctacttagcctgataaatgatctttccaacctcctggaagcactatatgccaaagatattctgatattttctaaagttttaaggaaaattattgggtatgtagttattagtccatggatttattttagtaattgtcattgtttcaccttttctcaagtttattgttcagcttaaggatattttcatttaggatatatagcccagacactgggttataattataatcaatatgtaagtatggttataattataatcagtatgtacgtataatcaatatgtaagtaatcatttgttatcaacctcctcattcctgttcttaatagctaacattttttgagctgttatactactgtgctaggcttctttcttaaattcctacttcacattaattatctcatttaacatttggctctgaggtatattctattatttccattttgcagatgagaatataaagtcgtagaagtttaaatacatgcttatttctcacagtaagaaatgctgagaccagcattaaaactcagctcatctggctgtagaacctgtactcttaagtactattttatgttgcatcacataatggtacatgatctttttttggttagtgtaatagttatgatgcttgaaaattttattgtctaccctttgtaatttattaaatatggatgtttccttgtgttgtcaagtgtgtttattatgccatgttaactttgtcatagtctcatcattatttttcacccagattttatgaagaccctttattattaaaataattttcacatatattctgattaatacaacagtggataccattttttgagtattaagtgctttacatttgctgtcataacaaagaattgatttggggaagttttgtagaaaaaaatcagcagaaaatgattatggaggtaagaaaaaagcatggtagtttaggaatagaaagaaagccactttgattagagctcagaaagcagagtggggaattgcgaagacaggtcagacacaagaaaggtaggggccagaagaatagaggaccctgttttaatttttattcttagaacagcagaagaccaatagtatgctttaaacatgatcagatttacttaaataaacagaggctggctgtaatgtggaattagaagaagataatagatcccagagaaactactccttaggaggatattatgtgataggctagaccacaggatgatggtgtcttgacctttgggtgatgacagtgggaagtggagagaagtgaacagatttgataggtatttagtaggctgaatcagtagggcctgtcaattgtccaaatatggagagaggataaagaagaaaaaagctgtacagttctctcatttgtgcagtttagaggggagaggagtgccatttgtggcataagctgtaagttgaagattgtattagtccattctcacattgctgtaaggacatacccaagactggtaatttataaagaaaagaggtttaattgactcacagttccacatggctggggaggcatcaggaaacttgcaatcatggtggaaggggaagaggcaagtctta

SEQ ID NO: 30416 - DNA, 2300 bp, Homo sapien
tgaatatgcggttaactgtgatgtgtatattttcattgcaatgctctattcccaaataaacattattttcttttagaaagcctctctgttatttaggttgacactgattttgatgtcttactagagctttgtaagatgtcaccattggggaaagcatgggactctggactatttttgcaacttcttgtgagtctataattatttcaaaataaaaagttaaaaaaaaaaaaaaggaaaagtaagtaggctgagtacctacgggtggtgtttagggaagtgagcaagaggagcatggagagccaacctgaagctgagaagtttttccagtttaacttataaaggacctaagcttgctcctcaccatcgcttttgctgttactatccctgtagtgctcttcgttctgcccattttagacagctgtttctctatcgcttgttaggctgctgagcagagaactagatctattcctaatagcaaaccaatcaatcctagcccattggatgtaacctccaggccttgagcccttttcagttattagttttcccactgcctaatactgagagtcggctttcttgctgccagaggtgtttttcattatgacgtctgaatttgatgccactgcgggtgctagaagttgccagaaggctgtcctccagataactgtcccttggctctaacttgtgtcattgttttgttgcaattaacattcagaatatgtgcggtcatcttattaaaatttatattttttaatggagaaagcacacagagagagttgattgtggagctgtggtttactcttgctcttagttacctgtgtctaaattaagctgaacctctgggccttagctatttctaaacaggcatcacgatttactaaggttaatgcctgagggaacattaaccttgcagacactaatctaattcagtgtcatcacaagtgcataatgcaggagtttggaattttgccaaaaagcactattcaaatgaacatttagttggcaaggggtgggaaggcgggtgtggaaaagggaaggagaacaccagaaatggctctatagatattttcatgccttttcttttccctctcccctcaaaggttacgtttaagtattgcagagaggcgctaaatggaatcttcatattattatgaagaaatcccaatgaacgcgttttatcccacggcaagttccagatgctcacaattactcaacattcactgagcatcttttatgttatatggctgaccttgtgctagggtgtgtacacaaagatgagtaattgtaaacgatggcagtatgcagaagcacctcagggcgcctaatgttagctgacgaaggcaccattaaggaggtcacagtttggctaaagggcccccaaaggatgagacaactgtgtaatcctagctctatagagatcattaccaagtctttgccatacaaagtttgggcttcaggtgaaatgagaagggcaaggttctgcccaagagggtccagggccggatctcttgatctgtgtctatgcccacaccctgcatctcagcttgcagacactaatagggtttgccagtttcaagggcgcagggctacatcttccggaaaaggtggcatttgaaggtggtaagaggccaacgactggaggtggcggcgaagggctaggtaagacagaataaatgaaaaagccaagacatttctggcaaataacctttcacctaggtccccgacccttccatttccccaggcctgaaacgctcccgaatccccgagtcctccactttccaagcgctgggcattggttaaggctgtaggagcagggagtcccccgctctaagagagttcctcagttccgatctttttcaaaccgctttcctcccaggcccagcctggggggcctgcggctcgggtccagcttccacggccaccctgggctggtgacacgcaggcgccggaatcgaagccacgctgtgtctttccagccaggtctctgcgccagacgagggcgggcgccgcggagcgcttcccgtgtgcggggcttcccacaatgcaccgggccggcagtggcggcgaccgcggcggcgctctagctgcggcatgtctgcgtctctactgctctgggaggaggaagagaaggaggaagaggaggaggaggaggagggggaggaagaggagaaaggcgcaggggtgggagctgttgccgaagctgccacagcaaaagttctcccccctccccccttcccctcctctcaaggcccctagaaaggttggagctgccgccgcctgcagtcggtgaccgcgcgactcgg

SEQ ID NO: 30417 - DNA, 2300 bp, Homo sapien
cctcccaggttcaagcgattcccctgcctcagcctcccgagtaactgggattacaggtgcccaccaccacgcctggctaatttttgtatttttaggagagtatttgtatttgtaattcatgtattttcaccatgttagccaggctgctcttgaatttctgacctcaggtgatccacccgccttggcctcccaaaatgctgggataacaggtgtgagccaccacacccagcaatacaattttcaaaaggaaccccgtcaagatattcctagttaaatatacacataaccaaatgtacatttgtatattttagagaaaataacataatttttgttattttaattgtagcaacagagtctagctatgttgcccaggctattcttcaactccttaagatggccttaagttgcctcagccttccaaagtgctggggttacaggcatgtaactgcacccagtctagagttttcttaaatctttttatttatttatttttgagacaggatctcactatgtcgcctgggctggtttgagacaggatctcactatgttgcctgggctggagtgcagtggtgtgattatgactcactgtaccctcaagctcccaggttcaagtgatgctcctacctaagccttctgagtagctgggtagggattacataggtgtgcaccaccacactcgactaatttttgtattttttgtagagatgggttttcgccatgttgcccaggctggtcttgaactgggctcaagcagtcgaaccacctcagcctttcaaagtgctgggattacaggcatgagccatggaacttaaatcatttttgaaacatagttaataatggccttctcaaattaagtcagctagtagaaaaaagtctaacattttacatcgagtccaaagctagtttgggggaaaaggcttttgatctttaaatgccaaggggaaaggtattttatctgtcaagagatgatacaattcagtggaataaaatgtgtatccacacagatgacttttgcttctaccaattttatcttttataaaaccctgacatggccgggtacaggggctcctgcctatatctcagcactttgggagccaacggggtaggatcgcttgagcccaggagtttgagaccagcctgggcaacacagtgagacttcatctttacaagaataaaataaaaaaattagccaggcatggtggtgtacctatgtagtcccaactacttgggaggctaaggtgggaggatcacttgagcccccagaggttgaggctgcagtgagccataattgtgccaccatactccagcctgggcgacagagaccctgtctcaaaacaaaacaggccgggtcagggtggctcacgcctgtaatcccagcactttgagaggctgaagcgggaggattccttgagctcagaagttcagaccagcctgggcaacatcagaccctgtctctttttttttttttaaagtaaaacaaacaaaaacaaaaaaaaaactcatgatccttttgtggttcataagcatgatgattgggtattcacacccacgtgtgagatgtgcctccctcaaaccttgttacaacttcaaccattacccatctgacagtaaaaaaaaaaaaaaaaaaaagtaaaattttaaaaatcatgtcttatttcagcatcttatatttttaaaaaccaatattttggtagatgacaaatttataccattaataactttatttttttttctttcctcaacttttgttttaggttcaggggatacctgtgtaggtttgctacatgggtaaattgtgtgttgctggggattcgtgtacaaatgattttatcacccagggagtgagcatagtaaccaatagctagtttttcgaccctcgccttcctccgaatctgccccttcaaggaggccctggtgtctattgttcccatctttgcgttcatgtgtactcaatgtttagctctcactgataagtgagaacatgtggcattaatcactttaaaacatagtatgacagatatcattttcttacagagcatcagatattaatatgtatggatcactttgttaaattaacaaaaatcatctgaaaatcagcacaatatttcatttatttattgtataagtttggcaaacagcacaaaaatccagcaacatttaaaacatataaaaaagtcaaatgctaaacaggactagggatttttttttacatcattagaaataacgagtacacattttaagattctgcaaagctagcaaaatgaagatgcttgccttctgaacatatactacaaacacac

SEQ ID NO: 30418 - DNA, 2300 bp, Homo sapien
tgggttcaagcgattctcctgccctagcctctgcagtagctaggattacaggtgcatgccactatgcccggctgatttttgtatttttagtagagacggggtttcaccatgttggccaggctggtctcaaactcctgacctcaaatgatctgcccacctcggcctcccaaagtgctgggattacaggcttgcgccaccgtgcccggccttgtttttctcttttttttgagacaagagtctcactctgttgctcaattcactgcaacctcccacctcccaggttcaggcgattcttcctgcctcagcctcccaagcagctgggaccacaggcacacaacaccatgctcggctaattttttgtattttagtagagacggggttcaccgtattgtccaggctggtctcgaactcttggcctccagtgatctgcccacctgggcctctcccaaagtgctgggattacaggcctgagactcccggccaagaaccattttttattttattatttttctttttttctcacgcttaacttgtggcttttaattttttaatgctcaacttttctaattttcccacaattaacatgtattatgtgtatataaaatagggggaaataaccatcagatccattctgccctgattttaaaatctatttttttatgagacggagttttgctctgttgcccaggctgcagtgcggtgccacgagctcggctcactgagatcaacctccgcctcccgggttcaagtgattctcctgtctcagcctcctgagtagctggggttacaggcgcccgccaccacgtccagcaaatttttttagtaaagacggggtttcaccatgttggccaggctggtctcaaactcctgacctcaggcgatccgccggccttggcctcccagtgttgggattacaggcgtgagccaccgtgcccagcccataacagatttatgaacaacttagcacttgaagattataaatgagctgaggttttaggaatgaatgaaaatttgctcccaggacagataaagcattccaggaagagaaaattgtgtgttacagcttgaaataactaagtgggcagaaaaatgtttctgtacttgaaaaattgagacccgactttgtatagaaagtacttcaaggtaccacaatctgttaccaccagtgagcatttcccatccggttgccatagtgaaagcttgtcaaggaagcaggtttggaaaattttaaaaagggatgtttgtagaaaattatcagaggtctccagggcttcatgaaacacttacaacagaactcaagccctgcttcaacagaacgcttcactttcctcaaaaccttgcaaaggccaggcgcagtggctcacgcctgtaatcccagcactttggtaggccgaggtgagcggatcacaaggtcaggagttgcagaccaggctggccaaaatggtgaaaccccgtctctactaaaaatacaaaataaataaataaataaataaataaaaattagccgggcgtggtggcgggcgcctgtaatcccagctactccggaggctgagacaggaggatcgcttgaacctgggagacggaggttgcggtgacctgagatcgcgccactgcacgccagcctgggcaacaagagggaaactccgtctcaaaaagaaaaaaaaaaaacttgcaagtattaccttttgctgaatgtgttactcaacctgctgaaagttaacaatttatagagctctgatctttccgggagaaaacagacccaataataactggcaaggcagaggcccagaaggagcaggtcagactacgcctccaatttcttttgagtttcgttggctttaggatcgccgtgcctacttcaagtgttcactttccccttgcctttctctttgtctctctcttcaccagctgcccctgcttcctgggtctcctggcttaagcagctgaccaggtcctccgcgggcttgcgtgtcctcccacccccggttccgcctccagctgcagctccgggagccctctaggttgacaagaggggcgaggcgatggctagcggaggggcgggcgtcgctagctgagagactggttggccgcgggcgcggcggcggcgcaggcgcactgggttcgccgcgccgaactgcagccatggagcaggcacctccggaccccgagcggcagctccagccggcgcccttggagccgctgggctccccagacgctgggctgggggctgcggtcggcaaggaagcggagggggccggagaagagagctctggggtcgacacggtgaggagaaggggcgg

SEQ ID NO: 30419 - DNA, 2300 bp, Homo sapien
aaagagttctgagaaaggcacagagaagctgcaaagactgattagtttaggagtgagaggtagaggaaagggcattcatagtttaggagtgagaggtagaggaaagggcattcatagtttaggagtgagaggtagaggaaagggcattccaaagtgatagaagagtctaaattgtgagttgtgaacgtgaattcatgacttgtaggaattgtaagtagttcaatataaattttctcttcttacaaagcaacatactcattatagaaaatactgtagagtcaaaagaagaaacaaaaaatatgcattgtcctaccaaccagaaaccaccactgttgatatattagtatactccccatcccaggttttctcttttttcttcttagtttttgtttcttttgccctgttgttattggaaaatatacgtttgtatcttttttcactttacatcaaaaatgttttccaatcatatgctatttataaatttgcttagtatttatattcctttgaggagacaagtgtattttggtttacttaactatatccctgtgttgaacattggatgagttaggcttagctatgaaatttgggttaattctagtgttggtaatcataattctcagtcaaatgaaacagtttgtttccagtttatactacttaattatttgcttatttttaagacaatatattatatattttttattttatatttcttctcactctgttgcccaggcgggagtgcagtggcaccatcatggctcactgcagctcaacctcccaggctcatgctattctcctgctttagccccccaagtagctaggactacaggcacatgccaccatggctggctaattccttttagtttttgtagagatggagtctgtctgtgttgcccaggcttacttaattttttaaaagtatgtcaagtaacacagcactagatattagatgctcaataaatacttgattaattaaatactaaatttcatttgtggccgggcatggtggctcacgcctgtaatcccagcactttgggatgcggagtcaggcagatcacctgaggtcaggagttcaagaccagcctggccaacatggtgaaactccgtctctaccaaaaatacaaaaattagccaggcatggtggtgagcacctgtagtcccagctacccgggaggctgaggcaggataatcacttgaacctgggaggtggaggttgcagtgagctgagattgcaccactgcactccagcatgggcaatagagcaagactctgtctcaaaaaaaaaaaaaaaggataatacatttcctactcctacatttctgctgtagtagtctgagcatcccttattatagcactctataaccaagcttctgtgaaacctagatcagcaactgaaatcaaatggaacattttccattattgattaggcatagaatccactttgttaaactagtcgagggtaacaagagacatttgaatcattaaccgagaagatgacaggtctccaaatgtgaccactgtcttcactgggtcagttattatttattcagtagaagagtctttcagtttaagttgtatggggctttttaaaaaatgatttcgaaaaaggacatgtatttgcaattcttaaattagatccgggggattattttgattggttagacaattgttgctgagagtaagactcgatcccaaattgaaacaaatcttactgtttcacagtcccagactcctcctgtagctgtgcctctctaaagcctaattgcatattttttaatcagtagagggacaaagacaacaaatcaactgttaggttgggaatatacttcgtgattcacagacttgtccaagaagtaaattcagtcctattcagggttgatttcttttaaatagtatctgatatcaagttgcaagttgctctgttgtaaaatacccaatcatggtgctcatgctaatgagatataagtggctgtcttgcagggtctcttaacaggtttaattgcttttaggcttgtaggctcaaaacaaaattgttaaaatccacatctgccgaactttctagattatgagcaagtttcagcgaaagttttctcttactccatcaggaacgacaatcgagtggttagaaccaaagatatctttatcaaaccactataaaaatggagctgaccagccctttgcaactgatcagagtaagccggtggcagtcccagaagagcagcctgttgcagaatctggactattagcgagggtaaggtaatataaaaatatgattttgatgtgaaaaattaggtatcactgaa

SEQ ID NO: 30420 - DNA, 2300 bp, Homo sapien
atggacatgagttgctgaacatatgcatgtatatatctcttggttaggtagctaagagtgtaattgttggatcataaattatatttacttatgtctagtagatattgccacactgtatttcagagtggttctgcgtgttcataagtttggattaatgggagttggttcctaaatttgtatacaaaaacatttatacacacacaaagcacactatatatgcatgtataaatgtgtatatattaatagataccatcatacctacatacagttcatcctcttatgaaacctttttttctgggatgggtaaatgtttgatccttaactatggtacatgttttcagggactgttccatatatgacactgatttgcttagtaggatcattttgtacacctctttcacttgcccccgatgagccatattaaaaatcacctgggctgggctcagtgactcacgcctgtaatcccagcactttgggaggccacagtgggtggatcgcttgagcccaggagtttgagaccagcatgggcctcatggaaaaaccctgtctctactaaaaaaaatacaaaaaattagccaggcattgtggcacacacctgtagttccagctacccgggaggctgaggtgagagcctcagagcctgggaagtcaaggctacagtgagccgtgattgcaccactgcattccagcctaggcgacagagtgagaccctatctcaaaaaaagaaaaaaaaaatcacctggaacagagcctctgaaagctaaaagagtctgtccactatatagagtttctatgtgaactaaactagtgttcaaaggatggtccattagagagccttctgctcacacctgaaggtcattaagcatcataaattcacttttcctctaaaaaattggcttgctcatcaatcattgttactccattggttctattaggaaagctggacaatgctcctaataaaagcagagtgtattaaaatcttttaaactgaaaagcttgcatccagtacttggtccaaaagcaacataacaggaccagaaagtttggttaggaaagaggaagcaggaaagccattatgcactcatagtaggttcaaattgagcctgaccaaaggtataagaagtaagtggttgagagcccagactggaacttaatttaactttggaatgaagtatttgattttcctgttaaggatcttctagaatctttctgataacttgatggcttaatattcccttttttttttttttttgagacgtagtctcactctatcgcccaggctggaatgcagtggcgcgatcttggctcactgcaagctccgtctcccaggttcacgccattcttctgcctcagcctcccaagtaggtgagactacaagtgcctgccaccatgcctggctaattttttgtatttttagtagagacagggtttcaccgtgttagccaggatggtctcgatctcctgacctcgtgatctgcctgcctcggcctcccaaagtgctgcgattactcttaataaaaagtgccaggtcttttaagttttgttgcttccaaagaaaaattgcagctgccttagataacaatcttttgcccaattgataagcaccattaaatgttcattaaatgaagatagccaaacgaacttttaaaaagcctaatatggcctaatatgtctttttttttttttttttagacggggttttactcttttgcccaggctgcagttcagtggtgtgatcatggctcactgcagcctcaacctcctgggctcaagtgatcctcacacttgagcctcccaagtagctgggactacaggcatgtgccaccaggcctgactaatttttaaaattttatgtagagttggggtcttgctatgttgcctaggctggtcttgaactcctgggctcaagttatcttcccacctcagcctcccaaaatgccgggattataggtgtgagccaccatgcctagcctagtaggtctttaaaaatggctcagaagctgaatctggtaattaaaatggcaactgtatgtatacatgttttacagaaatcatgagtaggacccacagaactgttttttccttagatgatgtctcatgctgaaggacaacaaagagacttaattagacgaattgaatgccttcctacttctggccatcttagttccttggaccaggatctcttaatgctcaaagctacttccatggcaactatgaactgcttaaatgactgctttcatattctccagttacagcatgcatcacatcagaagggctcattgccttcaggtaagttgtcg

SEQ ID NO: 30421 - DNA, 2300 bp, Homo sapien
aaacctctcagacaccgagttgtagaaggaagggctttatccagctgggagcatcagcaagctactgcctcaaaatctgagctccccaagtgcacaatttctgtcccttttaagggctcacgacactaaagatttcacatgaaagggtcatgattgatttgagcaaacaagcggtacatgacaggggctgcatgtaccggtggtcagagagaaacagaacagggcagggagtttcacaatgttctgctgcacaatgtctggaatccatgaataacatcggtttctaagttatgagttgatttttaactactgagtttaggccaggcaggcccaggcctggtttccggcctggcgctgggctgcctgtctttggttttacttccttgctgtttctttttttcttaaaacaggtactgagtataaaacaatatgagagggtctctctccttcctcaggctcactgcaacgtccgcctcccaggctcaagtgattcttctgtctcagcctcttaagtagctgggattacgggcacgcaccaccatgcccggttaatttttgtatttttagttgagaatgggtttcaccatgttggccaggctggtctcgaactcctgacctcaagtgatccgcccacctcggcctcccaaagtgctgggattacaggcgtgagccactgtgcccagcctcaagtcatgttattataaactaaaattagcaattaggagagactttagaaatctacccatgcactcttgttttacaaatccaaaaccaaggcctaaacaaggtgaaagatttgtctggggtctggaagagtacctagctctgttctgagatctctaatttccatgacagcttctttttaatttataataatgattggctttactccaatgtcatgcttgccccccccccaccccaagtaactaaaacgtacagatgtttgcttcgttcttgtactttcttatttttgtaagctttcttcctaaaatgcctggaacggcccctcaaatggaaggctaggacgtggttaggaaggcgggcactcggccgggcgcggtggctcacgcctgtaatcccagcactttgggaggccgaggcgggcggatcacgaggtcaggagatcgagaccatcccggctaaaacggtgaaaccccgtctctactaaaaatacaaaaaactagccgggcgtagtggcgggtgcctgtagtcccagctacttgggaggctgaggcaggagaatggcgtgaatccgggaggcggagcttgcagtgagccgagatcgcgccactgcactccagcctgggcgacagagcgagactccgtctcaaaaaaaaaaaaaaaaaaaaggaaggcgggcactcacacaccagaagggaactctctagtgctgctggctcctttgtttcttcctccttcactgtccgggttcctcgttccgttgcggcgccctccctcgccctccctcgcccatcagccagtcgcccagctaccagctcccagagcctccgcctccttcagggacccgccgccctgacccaagatggcgccagacgcttcggctgtgagggaagtgagctcacgctactccggaagggaaggcgggaagggagcagggggcggggggtggctgacccgctgtggggctgtggggctgtggggctgtgggtggggcggcggccgcggccctggcattcgcgcttgggtctggagatagcgcgagagactcaccggctcctgggaacccagtcgagggcccgggccaggggcataagaggaagttgtcccgagtggctcgcctctggccctgggagaggcggccccgggagccggcgtcccgcccccggcggcctcattccccgaccctcctccccggctgcgcgcgccggccctggctgtatctcgggggctgcggcgggaactgccgagcgggcttgactggacgcactgcctgaggacctgcggaggagacgagggagcgcggcgggtcagccccgaggttaggccgcgggtcccctgtccgtggcgctccgtccttttcccagccgtcttggctacagaatctgcgacctccccacactccttctcttttgagtatgtcacttaagtcttctcgccggatgctttttcctccttgcttttgccggaaaggagagagatacatgtgaaggatatctgtcctcgttgcttcccctgccctctcaaaagtttaacttctgtgggaatgtgtatcttccttttctggaccatttgacagtcccgccccagccgccgtgtgatttagcaaccggtatcatatt

SEQ ID NO: 30422 - DNA, 2300 bp, Homo sapien
tgggttggtgtgcacaaaagagtagaccgcagaccatgctgcttctcctccagtctgctggggccccaagagagtctgcagcccttggccagggaccggctgacacaggagaacaaaagatctcaggctgggataacatggtggtgcagttcatcctctggagctccctgtgagatcagactggagccagtctccagctgagaccacatctcacttagctccttccctgccatatcctgttttccttactcctatctcctgagagtcctgaatgaattacatgcactcaatccgtgcctcaggctctgtttttcgggaacttgacctaagacagatatcttagtactaaatactttgcaaggcttcagaagctctgctatccacaggcaggtgagatattaccttccctaccacctggcagtcatagtctatgatgcaactcagctttgtggaagtgcttctctaaagaacttcccccaatttaagatgatcttaatttgcttacttgtttactgtccattcagctgctctaaaatgtgagctccaaatcagggaccatgtctggttggttacccatttcctgggacctagaacgggcctagctcagagcaggtgctcactattgatggaatgcatgttgaaagaatgcatgaatctcatctccttttgtgggtgaaaatctcatcctattctcactcctgattaactttctttcttttttttttttcaaaacggagccctgatctgtcacccaggctggagtgcaatggtgccatctcagctcgctgcaacctctgccttctggattaaagcaattctcctgcctcagcctcccgggtagctgggattacaggtgcacaccaccacgcccggctaattttttgtatttttaatagagacagggttttgccatgttggccaggctggtctcaaacccctgaccctgtgatctgcccgatttggcctcccaaagtcctgggattacaaacatgagccaccgtacccagccactcttgattaacttaatggaaatatttagagattctttcttttctgggttctagagtcttctctgtaacctctgcaggtaatacattttccttcctgataaagcatttctatggttgctttcacttgcaaatcctctaatacttatttattccatttctgattggcattagacataattctcaatttttagtgacagcacttttgttaacttacatataaatcgactttgccttgaaatgtgacattgactagaaggacgacacttctaacatgttgtagaacatagtttgactggctaatttattatttagaagaagctaatattgccattatgagggacttaggtggctctgaagaacaagttgtatttctgatgtttgcaatgttaaatcacagatattgccaatgtgaaatagtttccgtatgctgtgttctcaatacacaccttttccaaggatatcccaagctgtagtcttaggaaactgtgatttttcttatttggtctcataggaatttggggagctatgcgggatctccataaaatgagctccagaaagacacatgtgtgcgcgcacacacacacacacacacacacacactcacacatgtaccgcaccacaattgaatctgtttatttgggacccatgattattttcaacaaacacttctgagaaataatctgaacacttaattggatgcaaaagagtgagtatttactattctaccctttaattagcataatcaatgtttccagcagcaaaagcaattggaaaatcgctagttttattaggttcattattctcccttagcgtagtgtggcatcagcatggctattattcttaaattgcctccttaaaacaagggctggtgcttcttacaggccattcctaactcttgggttttgtagagagtccaaaactctttagaacctataattcaaggaaaggctccactttggttttgcattttgtctggtctctttggctgacagaatttatgtcaaaaggtgcacatgtttgtgggaggctcatggacagcccatcacgtttgtgctttggtaggaagtacgtgccattaaggggaaggagttagttactgattctagggaacaattgggtagaaagagatggactccctgtgtttgaaattcagaactcaagcttggctctaagtgtttccttgctttgctgtgctccaggggagtccttgagcagaaggaagcaagttgcctgagattcttcaaagcccgcagcccttttggaggttagatggttattctcagagccttt

SEQ ID NO: 30423 - DNA, 2300 bp, Homo sapien
acccagacccatccccggttaggacttgctgtggattctcaggtgactccatctgaggatacagggactgagagggtgtatgcaatatctcagacccagaaactgttgattctgtctaaaaacacagcaataaccacatcccaccctcttgatttagatgaaagtgtttggcggaataaaagatgaacctttttttttctttgtcagatcttgcgctcatttggttctggtggggaacaacagctgtgagagaacaagtgtattcaattagaattaattccccctcttattctcacggctgagcagggctcaagtgcctctcatctgaaagaggtaataagatttaatctgtctcctcatctaccttctgcaagtatacttaacaaattagctctcgggactcttccaaatggagttttatgagggatttgctaaggtaaacgttttagactttgaacacaattcagatttcaggggcagtactgaaatctgaaccgtgtcgctaactgccctgcctttcaactcaagacacaataactttgaactaaaataattatatttttgttgttttccactctgtccccacgtctatatcaccaccacccccaatcccgccccccaggagctaactcctccttcctgtccctgcaagatcaaaactcctcctggaagccctgctagctctgtctgctcgccttcgtggcagatattgctattgtactttcatgctcatttgtgtggtaagtacttcaatgtccacttcttccacgagcccctgagcccctggagggcctggaccacacctagtttttctcactgttacacctcccttgccagacacatggtaggcgcttaataagtatttggtgaacggatggcttgtttggtgacagtccaaaggctgggggacagacagaaagctccctcctatcgggccccagacgggtggcgctgatggagaggaggctaggataacgcctccaggaccgaagcgcgcacccgtaaggcccctgccaaaaagaccttcctgaaggcggaggaactgcgagtgcctacgttggcccaaggcctgacactacgatcccggggaccctcgccctaaccggccccacctcccgggccccaaacctggactcggccccgcccgaagctccggatcctggggcccgccgctggccccgcgtcggcagaccgtgggctcgctcctgggcctgcctcaaaccctccgcaggtaacgcctcccgaacttgagccacactccaatcccctcctcaaacccctccccgtttctcacaccctggacccctcgctccgtctcggccccgccccaagcccagctccctctcggcccctgagcccagccccgatccgcctcccagtcccttggtccctgccaacaccggaccctccctaagctccgcctcccagggcccgcctcctgagcgcagcccgcagcctagactcggccccgcctcccggaccctgggcccctccccacgtcggcctgtcctaagatccgcctcccagagttcgagcagtgcctggcaacgtgctacgacatagtcaacgccccgccctggccccgcctcctgagcccttctctgggtctggccttagccccgccctaagacctgtctcctgggctctgctccgactctcgcctcctgaacccaatcatcgtttacccccaccctaacgcccgcctccaggactcttatcctgcccccacgcaaggccccgcctccaggacgcctccaacctggacgcttccgaagccccgcttccaggatcgccctgtcctggccccgccccaggacccgccaacctgaactctccccaggacctgccccaacgacgcttatcctggccctaccccaggcctcgccctcatgacgctcatcctggccccaccccaagcccccgcctcataacgctcatcctggccccgccctagagccgcccccacgactctcctcctgaccctacccgcaggccccgccccctctctgcccccgcgcactgccctgggcccgccccgtcttcagtccaggcccggcttccgcacggtctcccggcaacactgcggccccgcccacgtcatggcgcccgaggagaacgctgggacctaactcttgctgcagagtttgcagcgccgctttctggcggcgcgcgcgctgcgctccttcccctggcaggtgggcggcggggcgagcggagaggcccgcagggctcgcgggagtccaggggcagacgggatgggtctccgtgcagaagcccccgacacgcccgccacgtgagtg

SEQ ID NO: 30424 - DNA, 2300 bp, Homo sapien
agagctgagttcaattcctgggtatccttgttgactttctgtctcgttgatctgtctaatgttgacagtggggtgttaaagtctcccattattaatgtgtgggagtctaagtctctctgtaggtcactcaggacttgctttatgaatcttggtgctcctgtattgggtgcatatatatttaggatagttagctcttcttgttgaattgatccctttaccattatgtaatggccttctttgtctcttttgatctttgttggtttaaagtctgttttatcagagactaggattgcaacccctgccttttttttgttttccatttgcttggtagatcttcctccatccttttattttgagcctatgtgtgtctctgcacgtgagatgggtttcctgaatacagcacactgatgggtcttgactctttatccaatttgccagtctgtgtcttttaattggagcgtttagtccatttacatttaaagttaatattgttatgtgtgaatttggtcctgtcattatgatgttagctggttattttgctcgttaattgatgcagtttcttcctagtctcgatggtctttacattttggcatgattttgcagcggctggtactggttgttcctttccatgtttagtgtttccttcaggagctcttttagggcaggcctggtggtgacaaaatctctcagcatttgcttgtctctaaagtattttatttctccttcacttatgaagcttagtttggctggatatgaaattctgggttgaaaattcttttctttaagaatgttgaatattggcccccactctcttctggcttgtaggatttctgccaagagatctgctgttagtctgatgggcttccctttgagggtaacccgacctttctctctggctgcccttaacattttttccttcatttcaactttagtgaatctgacaattatgtgtcttggagttgctcttctcgaggagtatctttgtggcattctctgtatttcctgaatctgaaccttggcctgccttgctagattggggaagttctcctggataatatcctgcagagtgttttccaacttggttccattctccccatcactttcaggtacaccaatcagatgtagatttggtcttttcacatagtcccatatttcttggaggctttgctcatttctttttattcttttttctctaaacttcccttctcacttcatttcattcatttcatcttccattgctgataccatttcttccagttgactgcatcggctcctgaggcttctgcattcttcacgtagttctcgagccttggttttcagctccatcagctcctttaagcacttctctgtattggttattctagttatacattcttctaaatttttttcaaagttttcaacttctttgcctttggtttgaatgtcctcctgtagctcagagtaatttgatcgtctgaagccttcttctctcagcttgtcaaagtcattctccatccagctttgttccattgctggtgaggaactgcgttcctttggaggaggagaggtgctctgcattttagagtttcccatttttctgttctgttttttccccatctttgtggttttatctacttttggtctttgatgatggtgatgtacagatgggtttttggtgtggatgtcctttctgtttgttagttttccttctaacagacaggatcctcagctgcacgtctgttggaataccctgccgtgtgaggtgtcagtgtgcccctgctggggggtgcctcccagttaggctgctcaggggtcaggggtcagggacccacttgaggaggcagtctgcccattctcagatctccagctgcgtgctgggagaaccactgctctcttcaaagctgtcagacagggacatttaagtctgcagaggttactgctgtctttttgtttgtctgtgccctgcccccagaggtggagcctacagaggcaggcaggcctccttgagctgtggtgggctccacccagtttgagcttcccagctgctttgtttacctaagcaagcctgggcaatgtcgggtgcccctcccccagcctcactgccgccttgcaatttgatctcagactgctgtgctagcaatcagtgagactccgtgggcgtaggaccctctgagccaggtgcgggatataatcttgtggtgcgccgttttttaagccggtccgaaaagcgcaatattcgggtgggagtgacccgatttcccaggtgagtccgtcacccctttctttgactcggaaagggaactccctgaccccttgcgctt

SEQ ID NO: 30425 - DNA, 2300 bp, Homo sapien
gttatttattgtatcctgttatttattgactgatagatcaaggataatctaacctacgcctctcaacctggcctcctacagacagacatcaaatcacctcagtcagacagtgctatgaaattcctcccttgtgtttaacctgctactctaaaattctattttatttcatcttccatctccagctgttagtgctttgtctgaaaaacctgttcttctgcacaaagatcattattattcattcctgtcagtattatttactcagcatgaaagcaggaagagattggcacaccttcatctcatgtgcatacaacagaacagactccagtggccagagcattcttgttatcctggaagatgcacctgcagccctcaagcctccagcctccccctcccaacctaaggcacactctgttggtcaggtgcctgtaccaacacctggtagcccctccacagaggcctcagaaagataggtgatagctagtgactaggtttctttcatccccagatcttgccctgtgggcagtggccgtccccagaccatccaggattctccaggtgtgcaaggacctgcaggattttgacaaatgccagcagagtggcctctttacaaatggatgacaacaggctgtgaaaagctttctgcatgcataagccaaaaatctagttcccccacttgttcactgatgcttaaaattgctttagggagagacaaaggctttcatctcacaaccagagaaagctctgaagaccctgggtgaattaattgatttagactaatacacactgtagtataaatggactgaaggattacatgatgcaatgagcagctttcatatgggtgtgaagtgacacggggtgtagcagagaaagatggggcttttcttgcctctttgggtgcttaaaaagaacagtcttgaggccaggtgcggtggctcacacctgtaatcccagtgctttgggtgaccaagggggggtggatcacttgagcccaggggttcaagaccagcctgggcaacacggcaaaaccctgtttataaaaatataaaaattagcctggtgtggtggcacacacctgtagtctcagctacttgggaggctgaggtgggaggattgcttagacctaggagattgaggctgcagtgagtcatgattaccccattgcattccaacctgggcaacagagtgagactctgtctcaaaacaaagcaaagcaaaacaaaacaaaacaaaaacaacagtcttgaaatcagaagacctggagacaagttgggccctgggccctactgccagctgtttgatcacaggcaaaattactcgaagccttgagcctgttttctaaaacgaaggtaatatctaccttcagagtttactgtgaaactttgatgtcatcatgtttgtaaaagtgccctggcacagtgaccacattctaccctataaatattttctatctttccctgttgtccccaggcatctcaggctctgttcctatccactccatgcccctttcttagcattataaggtcaagagtgaggaatctgggaccacgcaacccagattcagatcctgactctgtcacttgctgactgtcatcttggacaagtttaacctctctgtgctcagttccctcatctgtaaaaatggggataacaatagtacttgcctcatggggtgacagtaaggatgaaatgagttcatgtgtgtaatgcacttagaacaattcctggcaccaaaaacgcattgtaagaggtgttgttgctatgattcctgaggaattctcacctgtccactttccacaagccgaaagatcaagctccacttctgccctctcacctacaaaagcgcaccgtcaatggctacacattccgccccacccccaacgcccccagcccgggtttcctaacgtccccagcccagtccttaaccctccaggccgtctggtccttccaccaccagcaaagcccaaaacagctttcagcgtcccctagcagcgccctagcgggaccctgggaacccgccgctgcaggagaggcggggcggctctgtgacgtcgcgcccggcgctacccctggtgacctggcagcggagcccgcgcagggtttgccaggcgaaggcggagcgctaacgtctaacgctaacggcggtcgtgccccgccgctgctgtcacccccggccgctgctgccctccccgccgaggttctactgctctccttcttaagaagggtgggaggcactcggtctctccccacacctctcgcctgaggccaggcgccaggtgtcgcctgaagccagacagccggtt

SEQ ID NO: 30426 - DNA, 2300 bp, Homo sapien
acgttagtttcaaacccatttgattgttcttgtgctgccgttttatagtaagcaaaatgacattgcttagtattgtccctgacatttatggaagaggcattccactattgtagactgcttgctctcgtattgtatcacgtgctataatttttttagacatccatgaaaacttagtttgtagtttaaccacaatgaaaaaggagggcatgacctaagagccccctccattctatccagacatgaaaagcactgctcagatggttgtatgtgacttacttaaaacctgtagcattttagagaataaaactctgcaaagtgtttccaagacaaaatacgtttttaatccattgcaagtaagaatttccctacatatgtgttgtcaatgaagaaacctcttaccaggtattggcaggacatatacttatttgtcctctggtaggcatgtgttacaactcaaatttgcaatatatgtgtataaccatggacctgatcacttgcaaatgaagctcaataacccaaagaatgaaatccatgattacagctttgcttccatgttgtctaaccaattccacaagaagtccagagatgttgctgctgagtgttactctacccgggcagcacttctgtggaatgaggtgctgtgtgtctctgtccctcccatttataccacccaagtctggaagtctggtttataaagcctgagtccacaccctgctcctgttgtcacagtgcacccacaccccgcccaccccaacactgatctgtgtgcagagatttctcaagcacattgttaaaggtgcccttcctgctgatgacctccaagtggtgaccggcagttactcctttagtccatgtagctttcactctgccttgctatgtggcttagagacaggcaatcgttagcccatcattgtatggcttgaccctaaagtgggcttttacaaaattccctctatattattttcatactacctggatctggaggaagtaatggagggaaaaaagcagggcggaacagaaatttgtggttcatggatcgtcaataaccaggcttttgatggagacagaccctgccatgctgctttggtgacccacatgtcagcggctcatgtccattccctgctgcaggcagcctcttttcatcttatgccagtcctgaaacagaactcagtacttgttccacaatgcccccaaacaaagtccactccacaaaacattgaggagcaggcagatttcactgaaaattttgagggaagatggagaaacagttttattttacaggcaccatatagcttaaggttgtctcaaaccttctttggcttctcttctctcctgagccttgcacagtgccctgccaaccctctctcccttccctcttgaagccccaagcctcactacatacggccagaaatccttcctgattcaccccaggatgcttccatctcttccctttcctcctttttcatttcttcagagatgggggtcttactctgtcacccagtctggagtgtagtggcacaattatagttcgctgcctcctcaaactcctgggctcagtggtcctccaggctcaggctctgcagttgccagattacaggccgtagccaccattcctgtgctgccttcccctttcttacgtacattactttttagttctcttccaacttctcttcccaagattatatatacacatgtaacatatatctgtgtgtataaaacattcagagatgactggaaaaaaaccctgaacccaatatgctccagggaattgcatacccaaacttttcttggttcttcctcatccttagagaagaacaaagctttgtattctctaagcattctctgtgccctaagtggagagtaacacattcagacttttcccatatgtaagtgaactaaacacaatgacacatagaagccactttacaaaggttcctttctctacctccttccctcagaagaagggggaaggattgctagaacagccagaggccactggtgtataggatcctcctactctctgactttttttcttgtagttattttgaggccctgtcccgtggagagacgcctccggtgagagagcggtctgagcgagtcgctttgtgtaactgggcagagctaacacctgagctgttaaagatcctgcattctcaggtaagggccctgctgcagcattgaggagaatgtagggacagtgttgaggctgggtgggtacagacgaaagccctctgttctcctgccagtcagctgaccacttagcaccaccctaaaatacactaaaccgtggactgaaagta

SEQ ID NO: 30427 - DNA, 2300 bp, Homo sapien
ctttctaacctgtctgaggagactgtggctgctgtgacggagcccccagtcagcggcttggcagcagcagacatttactcctcgtggggctgcaggctggagcccgaggttgggcgtctgcggggctgggctcacagctgctccctttgaggctgcagtcggcccttctcgctgtcctcacacagtggagagaggtgggagctctttggagcctctttcataagggccctcatctcattcgtggggcccccatcctcatgacctcacctcccaaaggcgccacctcctcaccttgtgggtgaggatttcaacatgtgggttagggggacagcagtgttgagtgcacagcaccacactcccacatgcacccacgtcctctctccccttcccatgggccccggctctgcttgtgtagctcagattgtcttgttgcatcatcttgctgcctcacctccctgctaaaatgtcagctcctcaagagtggggacccagtagttcccacctgctgtctgctgctcctttctcatgccaaacacagctggtgcttaacgtgtatctgcgacacacgggagacagatgcgggcagacataccccttccttggggctcgcacatgtgcagggaaagcagttgccacacgttggccacgttgcatggttgtccattggtgattcagttgttgctgggtgtctgctgtgtgcctggcacggtgtagtgctggggatatactgtcaacaaaatgtgttttgattttatattctagctcaggggcagacaataagcttatgaatatacaggacactagagtgagtgccacatgtcgcttttgtcctgaggcctcctctgaccaacactaaagtgaccattccagccatgctttacgttagtgtcctgttttactcacctcacctcaaatgtgtgttcacacatgtgtgtactgtctctccccacacccgacaggcatttccactgatgggaacagagccttttggttattgtcatcacttaaaccagggccaggcttataaccagcttgcagatgttcgctgaatgaatggactctcctccagctctctcctgggtcacgtgtctttgtgaatcttccagaccacgtgccttgctttggttcagtgaaagaaggaaaagttgataacttcataattgaacctgtgtttatacatccattcccccacctacttgctcagtcagtatcctctgggctcagctctctgtgggttacccatgtgggctattctcattcctaccaggcagctaatcaggcccattcctgtgccagtgcatggagggtgtaggccagaagaggactgtgccaaagcaggctgcaggtttacaaaccacgtgtccctgctcagggtgttggctgaggctggctcctagtcacagcctgcgcaggcatggacggatggtggatgccatgacccagcctggtccacagatggggcgggatgaatgtgccagactttccagagaagaacagtccaggagaccctcagcataaagtctcctgaaaacaacacagtctgacagtcctgaaggccagccctgtctttgcagggacttgtagagaacaccattcccagctccccattttacagaagggaaaactgaggcccagagatcggatgaagcttagcaacacaagcaaaatctgtattgtccatggctgttcagaagcattgcggttacctcaccaggcagtgttgaagaggctatcacagaagcctcagggtagtggttttcaataggtgcccccaaaccactggtgttcctttaaatggtccttgcaagattgtccccagctcactgaatcagcgtgcgaactcggattcacttacagctggcattcaaaaggagacacagggctgtgacttgttcacaagatcaggcaaggcacaaaccagcttgtagtggcagcttgaggatggcatcaggtggtgattgtaattatttttagagttacaagatcctgggtaaagtgttaaaatgccaatagccacaacacagagtatcttcttagagaaccaagtgagagtctgttgagtcaagtcctaggctgtggatggggactaggagatcacatgtgatagtccccttcagagcacagtctgaacagtctgaacaggaaggaggacttcggaggcatggtagccacggaaacgtgagcctcacctcttcagtgctgcccccagaaatccgccaccactgcacgtgcttcccagtgcaccatggacagcaccgctaagctcccagtgcaggactgttcctgggagacacggggcc

SEQ ID NO: 30428 - DNA, 2300 bp, Homo sapien
gttacacagatccctagggcaggggtataatgcagccaagttctttgctaaagtgtaacaaaaggaacctttgctccagtttccgaaaagatcctcatctccatctgagacctcatcagcctggccttcactgtccaaattattaccagaattttggtcacaaacatttaacaagtcttgaggaagttccaaacattcccttatcttcctgtcttcttctgagccctccaaactcttccaccctctgctcgttacctaactccaaggtcgcttccacattttcaggtatctttataacagtgccccactcttcagtaccacttttctgtgttagtctgttctcacagtgctataaagaaatatctgagactgggtaatttataaacaaaagaggtttaattggcttacggttccacaggctgtacagcatggaagcatgatgctggcatctgcttagcttgtggaaaagccccaggaaacttacaagcatggggggaatgcaaaggggagtagcacttcacacagccaaagaaggagcaagagagaggaacgaggtgccacacacttttaaataaccagaactcatgagaactcatgatcaccgatgacttcaccaagggacagggtggggggtgggggtggcggtgatgttaaaccatgagaaactgcccctgtgatccaatcacctcccaccaggccccatctccaacatcggggattataattcaacatgtgacttggtggggctacagagccaaaccatatcactcttctccccctacatggtggagctctttgtttctgtgtccttctttaataacgtttccaggtcagcattttggattagaggtgccagtgtcgatgtccagatcagggcagctcctggcgcaggctgtggtgtgtgtttggcaggacagagatgggaacagagcctggaaggggagggtgtgagcagggtgccaaaggagagaccaaaagtgtgtgaagtcctcccgtgtgactgctctgtgtcgtggggtacaccacatggcaagtgaggtgtgttgtctgcactgccgggagttgcagaggacttctgctcagaccagtgagagtggagttgccagcaagataccaggtggcccctgaccaaagcctgagcagatgatggagaaatagattctgctcttgaaggcagtgcctagcaagggagcagaggtggccagcgtggtttcggaggagttgagttcaaggcaggtgtggggtgtggtattagtttttcctggggtgagggcctgtgagattttagggtaagggaaaggaggcagtagcatgtggcacccggccccttgcggtgagtgaggtgtgaagggcagggagtgtggctgtggccccggggccccccttcatgcttctgatttctgtccaacaggtgcaggccactgtcgtggggctcttggctgctgtggctgcgctgctgttgggcgtggtgtctcgagaggaagtggatgtcgccaaggtggagttgctgtgtgccagcagtgtcctcactgccttccttgcagcctttgccctgggtgagccatgccccagctgtgagcccccacccgctccctgctcctctgaggtcccacctcagagctcattgtgttttcagtttctgggggtgtgagtcccactgctaatgggactgatggtgggctcagggttctcactggcagggtgggacgagccagctgggtcttcatggcccaccttgtgccctcacccaggcaggggtgtgtgccgctcctgccaccactcgcctctgctctctgctgtgtaaagacctgtccctgctctgcaggtctcttcagctggtcacactcccgtgctgaggcctgacacctgcacagagcaggcttgttcatctgtgcagtcagcctgttggttttaaacacttattgagcatgaccttacacacaggcctgtgatgggctctggaggctgcaggtgtcctgagggtaaggcacagatttgagcttccttttcatgtcttcagagaggcctttctaacctgtctgaggagactgtggctgctgtgacggagcccccagtcagcggcttggcagcagcagacatttactcctcgtggggctgcaggctggagcccgaggttgggcgtctgcggggctgggctcacagctgctccctttgaggctgcagtcggcccttctcgctgtcctcacacagtggagagaggtgggagctctttggagcctctttcataagggccctcatctcattcgtggggcccccatcctcatgacctcacctcccaa

SEQ ID NO: 30429 - DNA, 2300 bp, Homo sapien
gcctgcagcagaggggaggagcacgggcatggcccccgtgagggtcatgagaagttctgtctgcagctgcagcatatgaccatgtacttgcaagaaggaggctcacgtggatgtgtctttccagattgcaaggggtccggatgctcctttctcaggcagtgtgttgaccacacactgtgtgagcaagggccatcctcacagtgcacctgtgggttgtgcctgtgaagagcacacagtggttttgtgaggagacagattagagggacaaagggccgtggtgaaggcagcgtctgtgggcaggagtgggggacagctgtgggagaggtgtggggacaggcagagtggatgtgggactgagatggtaggggctccgagtgaggcttgcatttctggctgcacctttccttgaggcaggccacttgggagaggcaggcttggaagtggcagtcctgagagactggtggagtgagatacatgctcatccctaccagagcctgggtatatgatctgaaagctcagaggagaggtctgggctgtgagaggtttgggagttgctacatctgaaatagcgagatcacggatgaggaagagattccccaaatgcagttaactacggctatgtaacgaaggacacccaagcttagcagtttgtttaaagccaattattgtttgatgcggaatctacaggttgggcagggcccggtgagaagaaccgcctgctctgcgtgcgtggtggctgttgggccagcccaagacggcccactcatgtgcaaggctgggctgtgagcaggaccctggcatacggcctctatgtgtgaccacgtggtcttcctcacagcagagtggctgggagcatgagcagcccaagagataggacatagaagttgtcagtttcttaagatccatgcctagaaactgactaccacagcgtctcttccactttgttctctcggttaagctgtggggacagagggaagagggggtcagaaactctagctctcagtgggaattgtgctggagtttagggccagttatgcattgctcctatgaggggcttaaaaatatctgttgaatgaatgagtaaatgaagggtgtgcacaaagacgcagtgcaagaaatattgggggcacgaggggaacaggtgctggagaaattcgtctggagttcggttgcagggacagccttggggaggccggtaggatccacactggggagggcagtggactccaggctggggtctgcacttaagcctgggatagtccgacgggagaaccaggtaacgtgcccactagggcgacagtttagggatgggagtggaagtgaggcctagacccgaccacagtgctgggttcagctggtgtgagtctgacccccagcttcgggcttctgcctgccccagcctgccctcaggcctgaacattctgttcctggtgcctgtggaatgcgcagaggacacacccaacaacagaaccccaggagtcagaggtggcttcccagccccttctccttctctgggtgaggaggggtcagcagggccagtctgacatttgtagctgaagaaagcgaggccactttggaagcatgtttatgagtcttccaggccatggagggagaacaggcctgcgtttttttctgtgaacacagcttcctgtggccatgaaccccctggctggacacaacttgagatgacccagggcgtggcttcctgcttggggacccatagactgcttgaccttgaggaataaaactcgaggtctgtagagctggcctgaggaggcagtccctctgtgctgatctctccccaggccctcctctgccaggaggggaacagcccagcacacttgtacagggcgaggtggcagcagacctccgtgtgggcactcaccaaggccaggcaccacgtgggcttcagctctgtccagcccaagccagtatggaccagcctgctgggctgctgattgctgtcaaggccggtgcagagggaccatgagcctccatggcagactggcagagggaggtcccggcggacacacagccactgtctgaggagagcctgaccttcagggagggacagcagggcctggcagagtctctgtaatgaggccgtgagtcacactggcctttgttcctcactcatctgtgctggccctcagccgaggggctgttggggaactctctgcaggcacagggcacctggtgactgggaagcttctgtttgtgtggacttcttgggaacagcgtcctggtgtgggccaggaggagaggactggagcaccccaggctctgacttcgtgctcctg

SEQ ID NO: 30430 - DNA, 2300 bp, Homo sapien
gagctcctatgaggatctgatgctgccggtgatctgacaggagagggaacctgatcaggcagtgatgctcgccgggagccgctcaccttctgctgtgtggcccagttcccaacgggggttggggacccctgctctaaaggatctcttgtacatcatgagttgctgctctcttcctgcttctaagattcttggcaggtcttggtgtgctctctcggagtttactctacttggaattcgtggagctctatggatgtggaaattaatgttttatgaaatcaggaaagtttttgcccattatttttcaaatatctttctgccttcccccttttcaacatttatattgttatgcttgatattcttccatagttctcggaggtcctgtttctttttctttattctttttcatttccgttcttcatactgaataatcactcttgatttatctttcagttcagcaattctttatattctccctgctcagatcagccatttgctcttctagggaattttacattccagctcttgtactttagaactcgtgaatttctatttggttatttttaaaaataattttcatctctatattgatactctgtattcaagtagacatcattctgaaacttttctttgcttcttccggtacggtttcttaagttcttggaacatatttaaaacagccaattcaaagttttagcctccttcagggacagtttctattaattttttttaatgggccatactttcttatttcttggcatgtctcatttttattgttgaaaactagacctttaacagtatataacgtgacaggtgtggaaatgagattccccccttcccaggatttactgttgctgcttgttgttgtttgcgtagtgatttttctggaccaatcctgcaaacatcctccattctctgttgtatgtggccacggcagtctctgcccagtgccagctgatgaccggttacagatttccttgaactccgtgcctggaactccatgcagggaatgagtgtgcctcctggtctttacccagtggctctgtgtgcacactgggtacatccagtccggtgctcaccagagcctccccagcctttacctgctgcttgtgcaaagtgtccaggaggtacaaacttggggccttcctaggaatttcctgagtgtgttcctagccatgggtgtggcactatccattggtggcctattaggttggtgcgaaagtaattgcagtttttgctgtcaaaagtaatagcaaaaactgcaattactttcgcaccaacctaatagatgcccagagtgtgcgggaatttttcgaaacccctgttgacatccccttcctcagcttttccttttaagtgttttcattagtctgttgttcaccccagctggtagccactgtgcctataattgttttctactaacttctcccagggcaaaaggttttgcaccaggtgaactccaagtggggttaaatacagacagccctccaagtggggtcttccagggatctccagatgggtcaaaaaataattctttgggcatggggacttgtaagaactccagccttgtcatgcccttcaggctgctggctctcactgcagttgcaggctgtcaattttcaaggctagggcagagctggagagggtagtgggaccaggcatgttagaatgtcaccagcatcttgaatgttacaaagtgatctttcttgctgagagtcagcaatttttcttgaatgggtattcctggatgccttgagcctttggtatcagtaagagttctgaaaaagatgattttgacagtttttgctgggttttttttaaattgcttttataggagagagaattttcagaggcccttttttgctgactttagcccatatatgtttgtgcttttctgtatgttttgtgctcacacatgtgcatattaaacaacaaactattgtaaattggggtgcaggaggctggtggagcaggtgctgagtaagggctgtgggttggatgggaccatgccggcctggggctggacaggtgcctgaggctccttgggtgttagcgccatgggaatcaggaacttggccctacaactttgtgtctcccactgtagggctgccaggcgcccagctgtgcccagatggatgggacagagacccggcagcggaggctggacagctgtggcaagccaggggagctggggcttcctcaccccctcagcacaggaggactccctgtagcctcagaagatggagctctcagggcccctgagagccaaagcgtgacccccaagccactggagactgagccta

SEQ ID NO: 30431 - DNA, 2300 bp, Homo sapien
aaaacaaagaaaaagaaaaataggttagatccaaacagtggtttttaatttcagtacaaaagtaaaagcagatttaaagcaggcagaaaatatagagaagaagagaacttaggaactctatagtgtacaggttgaccttagggctcttttccttaatgtaaatgtgcacaaggatcattatatttccattttacataagctctggcaagtagacgcaccataaaaccaacagagtgcccgaaatgaggtcattctccttgttttctcctcattcttagatcatttgtttcccacctttttttttcttagaagtaggaactgagctgtggcctagggtttttgtgtggtggatcaatgtgtgctgcttgtgggcaggaccccaccatgtgtcaccactgagttgtttccaccctgttacatgtctcagtttctctctccagaggtctattacctttgagagggctcaaaatgatgggtgatcagtccttatatgcattcctggacaagccatttttaaaattaatttttgttggggatttccccatagggctgctgcatgtcacaggatgtcaacccccccccagacactcccacaaggcccccagtcacccaggagcacgttttggctgggaggagcaaatgcctttctctttggagttgagaaaactcagtctctcatttacctatgaaaacaacagttcaattcctcacacaaatgcgcagacaagccgaatcaagattaattttgggagaaaaagcaataaagaaaaccctttagaatgtgtctctgaactagaattagaatccttaaacaacaacttcctaggagaaaaaccagctcacactaaacgaaggactgtcaaccaaagggcgatctggggctcaggagaacttaaccagttccatcgggggagaagctagaagtctgggaggcttcaatgggccccactggtatcttcgctccgagttcaggcaactcctttggggtcctgagtcttctctgaggccccacgctgggtgccaaattattgtggaagagtcaaactctgtaaaatatttgaagagatttattgtgagccaaatatgagtgaccacagccagtgacacagccttcaggaggtcttgagaacatgtgcccaaggaggtcggggtgcagcttggtttaatacattctgaggaggcatgagacttcaagttaagttcatttaagaaataaatttgtttgatccagaaaggcaggaaaactcaaagagggggagggtggttctagggtataggtcaacttaaacattttctggttgacaattggttgagtttgtccaaagacctgggattaaagaaaggaatgtctgggttaagaggttgtggagaccaatgtgttttatcacgcagatgaagtattcggatagggtagcaggcttcagagagaagaggctgtaaaatgtttcttatcagacttaaagtctgtgttgatgttaatgcaggagagggataatgaggcatgttcggcctccacttccccttatggcctgaaccagtttttcaggttaaattctaaaagtcctggctgaggaagaagtccattcggatgatttggtggttgggaacggggaggtgccttatcatttattttttggtttaaaatataatgatatattttaccaagtcttgtgaaccatcaggcctccctcaggcccggactgggaattgccaatttcgttaggtgtgaccgtaatactatgagaatgtttaaaaaaataggccttactgattaaacatactcgagtatttaaaggagaatttatccactgggatgctttaaaattactctgggaaaaaagggaaaacgaaaggcatgtgtggggtgaagcacagacttgtcgttgttgtttttaaagcaaaaggcgggtcccaagggaagttggctgtcggtgggttcccgttctccgtacctttctaccttgacagctccataataaaacctgcagccgcataggcgcctctcccgtagcgctcccgcgggggcgccagtggggccccagctgcgaggagggcccgggctcgcgagactcggtcccccacttccgtccccgcgatccccggctcccagccccccgggcccccggcggggctctgcgctgccggagcttgggcgtctgctgctgtcccggagcgccaagtcgtccgaggtccggccgcccggccggggcggggccagggaggcccggccttcccgcttcctgcctgagccgcaggcccgcccctgcgtcctccgcccgcctctttcccgccgccgcctg

SEQ ID NO: 30432 - DNA, 2300 bp, Homo sapien
atagctcactgtagccttgacttcctgggctcaagtgatgctcctcagcctcccaagtagctgggactacaggcatgcaccaccaagcccagctaattttttgtgtttttcatagagatggggtctcatggtgttgcccagactggtctcaaactcctgggctcaagcaatccacctgactcggcctcccatctccgtgctgggatgactgacgtgagccactgtgctctgccttcattaagtttttatattgatttcaagttgaaatgataatattcttgattagttgggttaaataaaatataataaaatatactattaggattaatttcacctgcttcttttcaggttttttttttttttcaatggagtctcacagtgtcacccaggctggagtgcagtgtcgtgatcatggctgcagcctctgcctccctggctcatgcgatcctcctaccttagcctcctgagtagctgggactacagacacgtgccaccatacctggataagtttttaaattttttgtagagatggggttttgctatgttgcccagcctggtctcgaactcctttaatgtggctaccatcaaaaaaagtcccattgtctatgtggctactgtttgaagctttcattctatttctatggacagaagtgatctaggtcaactcatgtcttcatccttggactttggcctcaaattgactggtgtcatctcccagactctgtcactaaaccacaatatgacctgggccacacccatgccttgggtcccccaccagttccattacagcagtttgatagtgcaggggttctggtctccatcactgacaagctgggagagccagccagggccagaccacaggtggagccctgactgacactggagcctgccccagccctgacactgaacttctgggggtgggttttggcacctgcactttgagtgacgtgggtaggggaatggggtaactgcaagtagtcactgcaggtttgcctctcctaattcaaaagctagctggtctcttcctctgaggtgtgtaggttgtagccatgtctgagcacatgtgagtcaagtccagggtgagggctcaggaaatgtcagctctgagcactccagagctggacagagggtttggggggcaagatatgttgatctgcctcaccatggtaaccattttaccatcaatatgtagttcatgctataaccaggcatgtggtggcacgtgcctgtagtcccagctactcgggaggctgaggtggaagaagcctgggacacggaagctaaatgagccgagatcacgcactgcactccagcctgggcaacaaagaaagcctggctcaaataaataaataaataaatagaacagaacaaaaaaaaaagtacctcaatttgaacattttatttaaaaaaataaatactaggctgggcatggtggctcacacctggaatcccagcactttggggagactgaggccagctggtcacttgaggccaggagtttgagaccaccctggccaacatggtgaaaccccatctctacaaaaaatacaaaaaaaaaaaaaaatagccaggtgtggtggtatatgcctatattcccagctactctagaggctgaggcaggagaatcgcttgaatccggaaggcggaggttacagtaagctgagatcacaccactgtactccagcctgggcaacagagtgtgactctatctcaaaggaaaaaaaaaaaggctgggtgctgtggctcatgcctgtaatcccagcattttgggaggccgaggtgggcagatcacctgaggtcaggagttcaagaccagcctgaccaacatggtgaaaccccgtccctactgaaaatacaaaaattagccgggcgtggtggcacgtgcctgtaatcccagctactcgggaggctgaggtagaagaatcgcttgaacccgggaggtggaggttgcatgagccaagatcatgccattgcaccccagccggggtgacaagagtgagactccatctaaaaacaaaacaaaacaaaacaaaacaaacaaacaaaactaaaaaacgaaatcatgctatgaacctcaaatatacacagtaaaatttattaaaaaaaaaaaaaaaagaagagcaaagcagagctctgagcagcttcctgccccagcatccctggttctgctgctttcttcttcccaggcagccgtgtcacacagacctgcagctgagatgggtgccatctccctgggttgcttctgcagaggaggcctctcctccccagtggagcctcctacctgccggctattgactgag

SEQ ID NO: 30433 - DNA, 2300 bp, Homo sapien
gttgcccagtggagcctggctggggtgtgggtgagggggcaggaatggagagaagtcctatgagctgctctgctgggaaggcagaggtggctgcgtgtgggtgggttatggagaggggccagtttcttatccaccgtcccacaggtctggaagctgagaaggatggagtgccggtattcaagtactcccggtggcgtgcaaaaggacaggctttgcctgatgtggtggcaaaataccaggctttgggggccgagctcaacgtcctgcccttctgcagccaattcatccccatggagataatcagtgccccccggcatggctccatcatctatcacccgtcactgctccctaggcaccgaggggcctcggccatcaactggtgagatggggcaaaaacacagggggccatccccatacatgtccctccatcagcctgacttgtcactttccattagcccaaagcatttctagggctgcagagtgggcatcgtgcaggtgcctgtcctgtggctgccagatgtcagccacagaacaggctgtgcaacgttatcaatgagtgaaggctctagagcactgggagcaggtgttgctaagcactctgcattcccacagttattggagaagctggcactgtcagtgttcccatcccccagctgagacagagagggcaccagaaggcgcagggacagagagggcaccaggaggcgcaggggccagggtgccaccccaggcggtgggctgggggtcctactctaacttccactgccgctgctctgggcagcacacttcgtagaaagagataaagatggagcaaaggatggcctccacaaggtactctgaggggacagaattcccaagacaacaaatggggtgacaaggcagatgggtggtcaaagagggaagacatttgagttgagaaaagagagtggatttgtagtcggactggtctgttgagattcaggctctctgatctttgtgggtgtcgcttcacttttctgggccttagtttccctatctgtaaaccgagtatacctgttatccctgctgtgaggactcagttacataaggcatatagagcttttagcacaattcctggcccatggttgttatcaatacatgctgttttccttcttccgtttcccgccggagccggtgtcagtcctacccctgggaagagagggcctcctggagggtggcaggtccacgggcctgtacccaggacatcctccgtggcccttcatcgtggactccaggtttcactcttctgcttcctaggaccctcattcacggagataagaaaggggggttttccatcttctgggcggatgatggtctggacaccggagacctgctgctgcagaaggagtgtgaggtgctcccggacgacaccgtgagcacgctgtacaaccgcttcctcttccctgaaggcatcaaagggatggtgaggacctggagccggccgcgccctgcccgccccgacgcaccctcaagcatcctccctagacccagcccaccgctcctggaggccaggaatctgttccccaaattcaggattctggagggagaggagctctcacttcaaggtttcagaggcaggattaggacaaacagtgtattgtattaggagggaatcttgctcacaacggacagaacccagctcaaaaagcgtttggcaaaaaggggacattttggggcccgttcaatagacaaggaaggctaaaggcagggactgggtcacaccctgctgaatccaggagcttcaattatgacatcgttaggattctatttctctctccttcactcgttgattctccttttctctgtgtgatttgtttcattctcagtttggctgccctgaattagaggaaagatagccactatagctcaaggattctaattcttgattccagggaaagagaaacactttttctcctagaattcatcaatcacaaatcaggggagattctgattggccagcttgggggtcatgtgatcctcatgagccaatcaccagctggggtgatggagtgctctgataggctgtctccgtcacatgcttcctgctgggaaggccgtgacctgtggtcacatggcctgagcggcagggcggctcagtcacctgggcagctggtactgctgagaggcagggtggcaggctatgggccggagcccacagctgcaggaggggcccggggatcatatgtgagggctgcttgcccctgcccgaggacaggctggcagggacggccacaggcagaggtgctgtccaggcatgcagcaggagggaaggaggccctggg

SEQ ID NO: 30434 - DNA, 2300 bp, Homo sapien
aagaaaaaaaaaaaaagaaaggaaaagaatagaaagaaaaataggagaaagcgcgcaggaagggacagactgagaatatgggaactctgcactccgtcctcaattcttctgtaaacctaaaactgctctaaaaatgtctactaattgaaataaataaatgaatctagctctatagttcacatcttactctaaaatacagtccaattgggttaaaaataaatacttgaaaatcaaatataagaagaaaacattaaattattagaaaatattggtaaatattgagttatacaaacctgacactgtcaaaacacccaacaagtaacaaaccacgataattgtgtaaggcttaagtttgtgtgtgtgtgtgtgtgtgtctgtgtgtgcatgcgtgtgtttatctgcagggtaaaagcctagaagaatttacactgaaatgttgaaagttactgggtaaagggttttgggtttcagaggtttttgacgactgtaattattttgttttcttaactgaatgttctttttttatattgtacatgattacttctgaaaaaaaaaaataaaagagtatgtcgttccccccctgcagggaggcagagtccaggtggccaccaaggggctgttgtcacagtccagggaaagccagaatggcaggcacgggagccttgggaggggcctcaatcaggcttgccctttggccccagaaagagcaggggcctgcagtgaagcccatagagccccttgtgggccgtatgggccgcctccaggcctccacctcctcccccagtcatggccgctcagtgtcctttcacttggtggtgtggggacactgggaggcttcctgggcctcccaaccctcctacccaattcccagcccaggcttggctctccaggacccagcttctagtccctgtgaggctgggccaccctgcaggactgcagctctgggccctctgttctggtgctagggccctggggcccatgaatgcagttctagcactcgggaggctgaggcgggagaatcacttgaacccgggaggcggaggttgcagtgagccgagatcgtgccactgcactccagcctgggcgacagagcgagactctgtctcaaacaaacaaacaaacaaacagcagccaacattctccgagggtttcctagggccaggcgcggggcagtctcatgtaattctcaagcaatcttgggaggcaggcactactgttcattgcccctcccgattttagagacaagaaactaagattcagaacacaagaaacttgcccaaggtcaaggagaagtggaggcgtggggaggaaacaaagtcacctgacaccagagcccatgcctccaaactccaagtctgggactcctgattaaattccgtctctgtctgcactttgggaagattctttcctctcctaggcaagtgcccgcggggcctgagctctcgatagcggggccccaggagccacgttgtggggtctgctatccggcctccctctgcacgcgcgaccgtccacttgagcgcagtggctggagctgggactccagcgcagcccctgagcgctcacgtcgacccctccaatcacaagaggccctcgtgccaggcccccagatttggccaatcagggaagacctttccctgtcacagaatggggtcgaggggcccaggaaacaggtagtccccagtcacaaatcatcgcgtcgccttcgctggtccctttctcttatcgagcctcagttttctcttccataagccgggccagcagtgcccaccccacaggttggcgccagctccgtaagggccctaccaccgcggccggccagatcctcggcgggccagtcctggcgctgcggtcatttagcctgatgacccctggccaggttcagcctcaattgctccaaagaactccggacccgtaccccgagcccggcgtcccagcggcgaagttgatgggccccgcaggagcccttgcggtgagaaccgagtcctggagcccctggagcccccggagcccccggagctgcagccggggcagcctcctttccgccgggagtccagcgctctcgagagcccagaaactcaccgcgcgcaggagttggtgcgggcgtcccgggcaggttagacttctgtgagccgcagccccgaaactgaggttggtgcagacccgtcctgggagccaggaggtgggacctgtccccgccagtccgcgagctctggttaaggccagagcccgtgaggggaggggcgcggggcgggcggagagtcagccgagtgggggcggcgctcaccggtggtgggact

SEQ ID NO: 30435 - DNA, 2300 bp, Homo sapien
tttcctaatacatctttttggggtgtctaacctccaagccattgttcagtggttcctgtcgcccatctgccttctcaattttaactcccaagttcagaacacaccactttcccattgcaggcccctaacactcagccagttttcctacagattatatggcacaccttccacacacagggcatgcattcagccctggggacttcccaggagaataagctagtcttcgccatcattgtccagagacatgttaatcaagcaatcccagaagcagtgataaaattgcagttgaaggcagggtgcagtggctcatgcctgtaatctcagcactttgggaggctgaggtaggtggatcatctgacgtcaggagtttgagaccagcctggccaacatggtgaaaccccggtgaaacgtctactaaaaatacaaaaattagctgggtgtggtggcgcatgcctgtaatcccagctactcaggaggctaaggcaggagaatcgcttgaacctaggaggtggagggtccattgagctgagattgcaccattggactctagcctgggtgacagagtgagactctacctcaaaaaaaaataaataaataaagttgagagaggttcatgaagaaaaattacaggcctctctgtgatcacataatggaggaatctgtcctagtaaggctgaggctagggaaagcttccctgaagtcatggcattttagtaggaacttcctgaagaatgatgggggttctctggacaaagatgaacggcacatggaaactttatgagtcgagaagttccacagatatgagggacagcagggagacctgcaggctggagcctaaagaacaaggggacagtgcctgaaagtaggctaagtggatcagcaggcacaggccacctcaatcctgggtgcccatactggcttatgtgagcaaaatacatgcattaagccattcaacaaacatttatttagcaactgctacaagccatcactgtgtattggggatacaacagtgaatacatctcacaaatttcctgtcctcaaagagcttacagtctagtgggagagacagacaatgaacaaacaaagaaacaaggaaatatcagatatacagttaagtgctgtgaaggaaatagaacagggtgatgtggcagggagtggctgagggacttccttagtttgtgtgacctggaacagcctctctaaggctctgcatcagatatctgatatgtgataccatatgggagcaggctctgaaagaacactacaagtagagaggtaaaggcaggggctgcagcaagcctgatgtgttcaggcactgagcagagagagggccaggtggtcgggacttagcgagagggtcgcctcaaaagaagtgaggcttagcagggcacggagcagtgcggccgcaggtgtggtgggaagggtgttccaggagaaggagccacctggacacaggcttgcagtcatgaaacaatacgcaattatcactcccggcattctacatggccttgcctgagaccgggctggccaggatctctgggaaccaggaggaggggtctgcggcaccaggactgagtagaagggagagagtggagaaggggaattgcagagagaaaaccaggggctgtttttctctcggagaggcgggtaggcactgggcgggcagaagcgccgctatccacccggatgcgcagctgctaaggggccgcctctgcaagcggctgcaaattcccggagggcagcgtctcctttcgctctgctgtgtccgtagcacatggcaggtacttggcccatcaagagtgagagagggtgagcgagtgagtgagtcaccggcttggcgagggtctcctctgacccacttagccttgccagcgctcagaactgccagccctgctgggtgcttgggacttttcaaagccctgggaattctccaagggtccacagtaagtcttcttgacctaagcgggaaagagcgcaggcccctgcggggttggcttttacatggcatttatagacccgcccggagagggtgcgctgcgctcccgccatagtcccaccaccggtgagcgccgcccccactcggctgactctccgcccgccccgcgcccctcccctcacgggctctggccttaaccagagctcgcggactggcggggacaggtcccacctcctggctcccaggacgggtctgcaccaacctcagtttcggggctgcggctcacagaagtctaacctgcccgggacgcccgcaccaactcctgcgcgcggtgagtttctgggctctcgagagcgctggactc

SEQ ID NO: 30436 - DNA, 2300 bp, Homo sapien
ggttcatgcctttagacaactgtcaaacccacacatctctttgagaaaagcccttctctctcttgggcttctgctgagactgctgtcaaggacaactgtaagcttcttagaaatcctactatttaacaaaatattctgaggtgtccctttgttctctttgaagattttacaaaagatctcatgaccacactcttggcttcatctttaggccatcttccttgcactggcctgcatttgctctttgcctggaagccatttgttagttttagcatcatatgacatctggagaagctggacattttcacagcccaagttatggttcctttttatttaacaatccttcctttggcttatgtcccttctctcacattttagtataagcagcaagaagaagccaggaggaggcaccttcaacaatctccttaatgagatcccccagttcatctggtacattttctactttccacatgatttcggaacactttctgcttaaaattccctcctctcctgctccatacctctaagagtatggattcctctctgatttcctaatacatctttttggggtgtctaacctccaagccattgttcagtggttcctgtcgcccatctgccttctcaattttaactcccaagttcagaacacaccactttcccattgcaggcccctaacactcagccagttttcctacagattatatggcacaccttccacacacagggcatgcattcagccctggggacttcccaggagaataagctagtcttcgccatcattgtccagagacatgttaatcaagcaatcccagaagcagtgataaaattgcagttgaaggcagggtgcagtggctcatgcctgtaatctcagcactttgggaggctgaggtaggtggatcatctgacgtcaggagtttgagaccagcctggccaacatggtgaaaccccggtgaaacgtctactaaaaatacaaaaattagctgggtgtggtggcgcatgcctgtaatcccagctactcaggaggctaaggcaggagaatcgcttgaacctaggaggtggagggtccattgagctgagattgcaccattggactctagcctgggtgacagagtgagactctacctcaaaaaaaaataaataaataaagttgagagaggttcatgaagaaaaattacaggcctctctgtgatcacataatggaggaatctgtcctagtaaggctgaggctagggaaagcttccctgaagtcatggcattttagtaggaacttcctgaagaatgatgggggttctctggacaaagatgaacggcacatggaaactttatgagtcgagaagttccacagatatgagggacagcagggagacctgcaggctggagcctaaagaacaaggggacagtgcctgaaagtaggctaagtggatcagcaggcacaggccacctcaatcctgggtgcccatactggcttatgtgagcaaaatacatgcattaagccattcaacaaacatttatttagcaactgctacaagccatcactgtgtattggggatacaacagtgaatacatctcacaaatttcctgtcctcaaagagcttacagtctagtgggagagacagacaatgaacaaacaaagaaacaaggaaatatcagatatacagttaagtgctgtgaaggaaatagaacagggtgatgtggcagggagtggctgagggacttccttagtttgtgtgacctggaacagcctctctaaggctctgcatcagatatctgatatgtgataccatatgggagcaggctctgaaagaacactacaagtagagaggtaaaggcaggggctgcagcaagcctgatgtgttcaggcactgagcagagagagggccaggtggtcgggacttagcgagagggtcgcctcaaaagaagtgaggcttagcagggcacggagcagtgcggccgcaggtgtggtgggaagggtgttccaggagaaggagccacctggacacaggcttgcagtcatgaaacaatacgcaattatcactcccggcattctacatggccttgcctgagaccgggctggccaggatctctgggaaccaggaggaggggtctgcggcaccaggactgagtagaagggagagagtggagaaggggaattgcagagagaaaaccaggggctgtttttctctcggagaggcgggtaggcactgggcgggcagaagcgccgctatccacccggatgcgcagctgctaaggggccgcctctgcaagcggctgcaaattcccggagggcagcgtctcctttcgct

SEQ ID NO: 30437 - DNA, 2300 bp, Homo sapien
tgggggaatggtgtacctggggagtgagtgtacctcaggaaagggtgcaactggggagagggagcacctgggggaagggtacacatggcaagttggtacacctgggagaaggttcacctggggagtaggtgcacttggggagacggtacatctgtggagagggcacagctgggggaagagtacacctggggagggggtgcacctggggagtgggtgcctctaggaagagggtgcacctgggggaagggtgcacctaaggagtgggtatacttggggaaatggtgcacttgggggaagggtacacctggggagagggtgcacctggtggaagggtatacctgaggagtgggtgcacctggggagagggtgtacctagggagtgggtacacttggagaaagggtgttcctgggatgtgggtgcacctgggggaagggagtacctgtggaaaaggtgcacctagaaaaggtacacctagggaaagggtgtacctaggggaaaggtacacctggggagtgggtatacctggggaaagggtatacctgggagaaaggtacacctgggaggtggctgcacctaggagatggacacacctgcgggaagggttcatcttggggagggattgtctcatctccctatcctttccctccccttgtcattcaaacctctaaaatacaagcttttctcaacttggggcttggggacaagggtcacagagtcagtaaccattagaagcagtatgtaatcatttgtgtgtactgcatacagtggcatttttctctagtgagacaatttgtgactttagaatgagctttttcccaaagattgagaatcctgggatgtttattcaatttcactcatgaatgcaatggtttattaaagaatacatttccagaggaagtgatggtcagagacgcttgctaagcttctaacagaagcttgcagccctgaaggctgcctgcctcctcctggaggtcatacccagatctatgctggacacccaggtcgtgcaaagctcagaggtcagcagggctgcctctgccagctcctttcatggaagctgaggcacaagcctgacaacttgttcacttgcagctgacttcatgctttttgctttagcacatacttgagagaatgtttcaattggagtccaatcagaccagccatcctactttgccattttatcacaacctcagcacatacacaggaaagttttagcagttcaacagaacatttttagtcatttggcagaagtagtatgccaatttgcaaatttgctggaaatttcccaatatacaatctctgttaacaagctcattacaaaacttctcacagcctccctgggggattgtactaggaactagatgtatccaaggcactaatgttgtttctagatattttatttttattgtgattgtaaaagagatctttgttcactttattttgtaaagggttgttgcaagtatatataaatgcaacttatcactgtgtttattttatatccagccactttattctcttactattatccctaaatacttgctacgtctttgaggaatgcccatatttttctgccctgtggacatcacttcttgaccaataaattgggagttcagtgctggattctgagcagggaagtgatgtgtgccttctaagcagaagctctctgggtatctgttactgcttttaaaaccatcccactgtaatcccagcactttgggaggccgaggtgggcagatcacgaggtcagtagatcgagaccatcctggctaacacggtgaaaccccgtctctactaaaaatgcaaaaaaaaattagccaggcatggtggcaggcgcctgtagtcccagctactcgggaggctgaggcaggagaaggcgtgaacccaggaagtggagcttgcagtgagccaagatcgcgccactgcactccagcctgtaagcaagactctgtctcacaaaaaacaaaataaaacaaaaaaacaaaacaaaacaaaaacaccatcccaacacagagtggcttaaaataatggttcattatgatgtaatggccctgtggactgggtgcggtagttctttcttaggtttcttatgtgtggtagtcagtttctggctgcggctgcacaccacctgaaggctcagctgggccggatgtccaaaatggccgagtcgcacagtgagcagtggattctgactgtcacctggagcctcagtgggggctcttcactggagcactcacatatggcatctccacatggcttgggattctcacagcctgacagctaaattccaggagggaacatt

SEQ ID NO: 30438 - DNA, 2300 bp, Homo sapien
ccaaatggttttataggcaaggtcatacaatatttaaccaatataatttatatccttccaaggcccttttctatacttgattatgtagaagtagggaaggaattgctttggaagaaaagaaacttagagattttcactgctatgaagataaatctttactgtttttggtcatctgttttgaagagcaccacctgactttgttctctcctttctgccaaggaatctcaatgatagattctccccactatattgagggagcttttctccttagatatggtttggggtaaatgctgtacctagctgtagggcattaaagattgtggtgaaaacttgggctttacttactctgagtgagttgggagctgctggaagcttctgaacccagaagggacctgatctgactcaggttttaacaggaccatcttggctgttctccagtttctagccagtggggcctcctccctgtgtgctgaaggtgctaacgatgtgtctttgcttccaagctttttctgaccttttgctgcagctttcaccaaggagatgggaggcactagactgagagtatgtgaggagtgaagaccgagggcgggcagggcagatggagaagtgctgtggctatgcccaatccagacctgcactgagacaaaatgaggaatacaggcctctatctcttctcttatgaaaatggacaaattccactgttctgcccaggctagccagggctgctgtaatgccagagtggtcattccaacttctgtgaactagaaagcctctcaccatcctcaacacaaatgtccttaaagccctctggcaacgcattggtttggctcctagtggcagcagcagctgaatccctggcactgacctggtgcacagtgtccccagatccctggtcaagcaagcctagacctatagcattccagagagcctggaaagggtatggttaaaaattcctgttctagcaatgtcttcaagaagaagcaggagaaaatgctccccacctcccagtgccaggaggggagaggaaggaagctcagtaggacagctctgcacaggtggcctgggggtgtctgcaagatgacctggctctacctctctacctgctccttcccagctgtggggctggggagggctggtgccctctctgagtcggtttcttcatctgtaaagtgcttggctgaggatccagctggagtgtggattaaagggcacagcagggtgcctagcaccgtcagcccacgtgtttttcttgggcaagccactctgagccttactcttcctgtctctaagcgggaacccaaatgcgagccaggattgctgcggactaaagcagtctacgaacgcttttgtagactgcgaagcattgtttggtcttcagaaaggtgccccagagacaaggtgtcattggtttcaggtggggggggggggggccggtcagcaaacctccttagtcctggagggcagggtggcagcgcagagcgcgcgcaatttccggagggtaactgattgtcctgctgaaagcccaataccgtatttatccaaaaatacgtccttctaggcaagtgatttatctgacactcagcgggggacagagctgcttgtaccgcgctggggatgaaggtggggacgtgggccagaccgggccagacaggctccccagcgcttcccgctcaatcacgcagactgcactttggggcgatctcagagcttttcttaagtcttcaggccagtctcacgttctcaccttgggaaccgagctttagaagccggccctcgtggacgccgcgagacagcggcgagaggtgggaagcaaggaggtggctgcgggccagggaccaggcagcgtgttggggggcgtgcgcgtctggcagctccgggatccccgagcatccgccgctcaagtccgggagccgcgcgggcgggccggggcggggccagggcggggccagggcggggcgggacgtgtgacgcgcagcgcgggccaatggggcgcgcgcccggggccgagcctcctgcgagccttcgcggcgcccgctgcgtcacgtgagcggcggggagtgagtgcccagcgagctgcgggcgggctagtgctccgccgcagcgacccgcgggccggcgggcgatcgagccagcgcaggacccgcggctcggcccccggccgccgccggaccgagagtctagccgccgcccccagcccagcccgcccggccgcaggaccgccggggcctggccgccggtccggcgtgcgccaagttcaggtgggagaggcgcggcggggccggccggccgcgtggacgcgg

SEQ ID NO: 30439 - DNA, 2300 bp, Homo sapien
gccagccagccaccattgctccaccaatcatgcatctgattttaaaaattagcttttaatcagcaaatggtatttctagttagacctgttaggctaagactaaaagttccaaatcaggtcacgttttctaggtggttttctttctaaccttgtaagctaccaagagcaaaaacaaaggccagaacacacaaactgacagataacttgcctttattatgaagtacacctttggacttgtggggtttttttcccaaagcttgtgcatcattgtctgggataactgcataaaatggaaggacgattcctggtgagaggcagtgtgttctaggtaagagcaaagctggaatccgctgtctcactgtgtccctgctctgtccacaccggcaactcatgcaaaggcagggtgatcatgcaggtgaaatgggtggattggtgtcaagtgcgtggaacagtacctggcacatagaaaacactctgtaaggttcatggggagattcacgactgttcataaactgatctgttgatgacaatgaatgggcaggagcctgggtacctttgttctctttgggtcacttatgttctagcttcctaaaagtctcattagagcaccttgtatttagataaaccattacaaaaacacttacttttctacttgagtcaccagtttatgaagtgcttcttgtggtttgctaaaacctaaatcggagggacaggtttttgttctgctttgatggtttgtagggagataaggctgcagaggtaggctggggccgggtcattgaggactttgaatgtcagtgtaaggagcctctctcctaagggtaaagggacaacttgtctttcagcacatttgacaatagcagctgtaacgaacacacacgtgcacacatgcacacacacacactacatgtgcacacatgtgcacatgcacacatgcacaaatcacatatgtggcttaacacaatacaacattcttcctcccttgtgcaaagcccactgtggatattgcaagttgggacactattctaccagcgaagattcagggatccctgctccttccatcttgggagctcctcctcactcccacccccagctccaatggagttcctgttgtggatgtggtcttcccacccactacaccggccttaggcagagcctggcacagctgggatcctcactgggactacattgctgggctgcagactgctccagagtccccccagaagcccctaaatgtccctgaaaagatgagtcactgactgtgctttcagctccaagcagcctttatcaatctctcaatccccatagatactgggaaaatctaggaacatgttcagaactcaaagaggggtcttctgctgctgctttttgtggggagacaggatccctgagctgggggaccagacatcctggtgcccctggcttcaagcagctggtggatctgcgcgctcaaaacttgccctggtctgtatggcctcatcctctcgcttgtcccactatgatggatctcgctcgctccgtagagcagtggctttgcaaccctagccagcactggggtcgcgcgtggacttgtcaggacacacattgctgggctccaccccgagtttctgattctggggcgaggattgaaaacttgcttttctaacgagttcccagcattttcgatgctgctagtcctgagaccatactttgaaaaccgcccctctagaaagtgcgatccctccccaggaaagaagcagggctatttttgctccaaaagtatccatcctgcacgccctcttcagtgcttggcacgtggcgaataaaccaatcaggatgaaaggagccaacccaagtgcggagtgttgaacctcagaggaagaaacccgcgttcaccaggcccaggcctgggccaggcgctgtcctggcggcgtcagggaggacatcgtgcccagagctcggacccagcagcccggccccgcgccctccctgtcccgcggcccgcaggcccagccctcaagcgcccagcctccgcggcctttgtggcgtcacagccagcctgaagaatggttgccttggagacgtaaacccaagagccctgctcctggagctgagaactgcagcgcggaggcttcggagcgagccggggcagtcggggtcggtgggtgcgctcgcggtccggggagagggggcgcgcggggtccgtgagggcgcgtgggggcggcggcaggggtgcgaaaccagggcccgaggggcgcgcgtggccgggagcggacttgcaaggcgccttccaaggctgcccgctcgcatgccacttgctt

SEQ ID NO: 30440 - DNA, 2300 bp, Homo sapien
aagctgaagggccccaggtaggcctgggcagcctccctcagcgtcgccctgtgtgagatcttggcaaatgcatgcaattccactagggcaggcatgtttcatccagggcctagcgccagctgaccacctccttggagcccagcctggcatttgtggtcagaggggtgctgagagaagctcaccttcacggtgacaccttcctcatggtctgttgtgggttgaactgtgtcatcccaattcgtatgttgaagtcccaacccctactgtctcagaatgtgatcttgtttggaaataaggtctttgcagctgtaattcactaagctgaggccattctggagcggggtaggcctccaatccaatgtgatggggtccctgtaaaatggggaaatttggacacagacacacacaggcagaattccacatgggcaggaaggctgagatgggagtgatgcttctacaagccaaagagcaccaaggattgcctgcaaagctctggaaaccaggagagaggcccggaatgggttctcgctcagagcccttggagggacctagccttttggacaacttgatctcagacatccagcccccagagcttgagaaaacaaatgtctgtgactccagccccccagtttgtggtggtgctttgttacagcagctgcaggcaatccatatgccttgtttcaagggaagtaggcagatctatgactcctgcctagtgtttggtttagagctaccttaacctgtgagggagctggacaggctccgaagctgcccctgacctctgagagtgcccaccctggcccggtacttactgtcattggtcatgttcttggagactatagtggacggtatctcagacatcttggctgaggcccaagaggttgatgcaaggcttctcctcttctaaaggagatcctcacctgaggagtgacacagtgcttgagcctggtggtccccaagcccagagcttccttccccctgggtggctgacagccaccgacatttgctgagggctcaccttgtggggacacctgccggctccctgcctctcccacccgagggtccactctcacctcctggacttggctctagctgcctactttttctgtgcttagaacacatcaatcttggcctcaagcctttgcattttcggcctcctcggccaaaaaatattctcccatacccagctgggggtgctgggcttccttctcttcaattccgagctcaaatgtcacctctttagagagacctctcaccatcccatccaaagtggtttcttcctccccacccccatgtggcctttattttcttctctgcaattcccactatctgattatcactttaaaaatccattcgttgtctatttccccctaaaatgtgagctccatgagaacaggggggtcttttctgctcatccaagctcctgacatacccttggcacttcttaacttcatccattgaatgaattttcatttttgcaggggaggaagcagagattcagcgaggtgtccaaagtcacagtcaggaggggctgcctctggaaagggcccccactctaagcttgtgccattcctgccgcattcctgctgcagccccctattgggtgagcctggggttcgcagggtcgcctcctaacacccgcgctctgcaaggccccgagccacacagcgaggtgcacagggatggtaggacagatggggtggatggtagatgggtgtgtttcaagcaagtggcatgcgagcgggcagccttggaaggcgccttgcaagtccgctcccggccacgcgcgcccctcgggccctggtttcgcacccctgccgccgcccccacgcgccctcacggaccccgcgcgccccctctccccggaccgcgagcgcacccaccgaccccgactgccccggctcgctccgaagcctccgcgctgcagttctcagctccaggagcagggctcttgggtttacgtctccaaggcaaccattcttcaggctggctgtgacgccacaaaggccgcggaggctgggcgcttgagggctgggcctgcgggccgcgggacagggagggcgcggggccgggctgctgggtccgagctctgggcacgatgtcctccctgacgccgccaggacagcgcctggcccaggcctgggcctggtgaacgcgggtttcttcctctgaggttcaacactccgcacttgggttggctcctttcatcctgattggtttattcgccacgtgccaagcactgaagagggcgtgcaggatggatacttttggagcaaaaatagccctgcttctttcctggg

SEQ ID NO: 30441 - DNA, 2300 bp, Homo sapien
tccagagcaccaaacccaggggcagttccaaatactggtttcagggaagcatcctgtagaataataccgacattaaaactttaatgagccgggcttgccagcttacccttcctgtgcagagatgtgtctaggggtggacgctgagatgttctgcttgaggtacatcagagaggggatgtggggcatggatggacatctctcgtagaaagtcctcacctttgccagccctctgctgttgtcaaagaatgtattacttttcaggaatgagccctatgtatgtataagcgtgagcaattcttttcagctattgactttttatccctagacgagttgttagctgggaagaaaaataccttctgatgcaaattagtggtggtgtttcttctcagtgtaactggtgtctacaggactacctgagacactgaattaaatgtgcggattgaaaagaaattcctgtgattttttttcatattgtatgctgatacagaagttgaaaccaatttagcttgtcatgagatattctcgttacagcctatcttttttcctgttgtaaaagtaatacaagtaaattgttaataaagatagaatcattttagttactggtttaggtataaaaggaaagtgtaaccatgtctagcaacattagtggaattatttctgattttgcacccaattctgattttcccatgattcgaatggcacatacattctagcacacattttgcaaaggaatattaggattcagtcatatttcttgctttgtaggtaacttagagcgtggcgtacacatttggcattgaatcatgatgaatggctcagttttatcttgtttatgttataaaacttgataataaatacttgatatacatcatttaaaatcttgcctgcttttaaaagaaatctggagagatacactattcactgcctgccttaatttattctacagtggttttcatattattattattttttttttttgagagggagtctcgctctgtcacccaggctggagtgcagtggcatgatctcggctcactgcaagctctgcctcctgggttcatgccattctcctgcctcagcctcccgagtagctgggactacaggcacccgccaccaccactggctaattttttgtatttttagtagagacgaggtttcaccgtgttagccaggatggtctcgatctcctgaccttgtaatctgcccgccttggcctcccaaagcgctgggattacaggcgtgagccactgcgcccggccaatatttctaatataataacatgtttcagtatttttatttgaatttaaaaatgaagccaggccttttattagaaagcaagcgtaatgcgactgttctggctgcagcaccggccctgctgctggggcttcgtgggcaggcagttccccctcacttgaataaactcaacctgcagctgcaaagttgtgatgacacatgagcatcttattttaaaaaagtttttaattgacaagaatagatgctgaccatgtctaattctagcaagaagtaatatttagacacaaatacatgaactaactggggaagaaaaccaccagtcagtcccactcctcttgaaaagcatttttaatataattttgcttttaatatcataattatctatcaaagtttctgatatattttgttttgatttgttttgcattactaataattgcagttgtaacagttcaaaccaaaaatgttaatgcctagaagttaaataaaagttaagtttatgtacatatttttatatgctagggtgataaaagacttgaaagcatagaaatgcattcaggtaaaattctggaggtaagtgggatagtatacaagctcacggaggatataggcacgcttcattttttgcagttgactttttttttgctttttacaaattgaaggtttgtggcaaacctgtatccagcaagtctgttggcaccatttttccaacagcatgttctcacttcatgtctatgtcggtatttgttagcaataaagtatttttaaattaaggtatgcattgttttagacataatgttattgcagacttaatagactgcagtactaggaactgatgtgaagtttcctcaaggaggggtgagtaagttttgtgccccaggcacctctcttgccccagacccagccctgctcttctgtctgaagcaagtagagcaattagaaaaagagaaaccaggcgtggagaacagtcagagatgatccagagcgagggttgctgggttttctggaacactgatggatgaacagaaaggaagtattttgtaatggaa

SEQ ID NO: 30442 - DNA, 2300 bp, Homo sapien
attactggggagactgaggcggaagaatcgcttgagcccaggagatggaggttgtcgtgagctaggatctgccactgcactctagcctgggtgacagtaagacccttgtctcaaaaaaaaaaaaaagaaaaactgcagattggtgactcttacgaagatagatggaaatgttctaaataaaacacacttaggatctggcaatatatatatttaatgtactattctgaccaaatggagcttaatcagatagcttgagaatgatttaatgttacgaaatctgttaattgcattatctcaataatagatcggtgaataactttattattctctcaacaaatcctgtatttgatttacaaaatggatgggaggtttcagggagagcagttggaagcctgtgtgctcacctgttaggaacgagagtggcaacagcagtggggaggagtgctcggctcctgcacctgtctcgatggcagagcccacaggcttggctgacagacgtgggatgaaggaaagagaagcctctcactcttcccacagcattgtagtgcgatttcatgcagaagtccaagcaggttccaggacaattgtgtaagaagctatggacaagaacgtctaagaaaacggaaaatgacatagaggatttgcactgtagctaagacttcacgcaaggctgtggcagctgaaagcatgttctggtgctggggctgcgtggcagagccaggagcccaggatccagcgcactgggcaccgacctgggacctggtcatctttgcgtgtggaaaagatggcatttccagttattgacaggtgaatgctggccttttagggaaaaaaaaatattagaattccatacagaataaagaatgaagatgagaggttaaaggtttttctaaggcatgaagagctgtgggggcagcctgcccttgttctttttgtcgtgtgtccttcacatgcagtaactctgttcacgcctcacaaaaaccctatgaggtggagacctgccatcaacccttcctgcacgggtgccactgaggccccaaggttaaatcatttcccagagtgtatcagcagaggcacagccacagagacacgtccgcacagagagctttccagatcaccagtaacagcgtgagatcatggtgcagaaggtcatgaggaggatggcaacgagcgagacacagccggttggtgctcacaaggacattggtagatctgactgagggccaggtcggctaggccttcccaggtgacaggagcccagtgccggccttggtgcacacagcgcgtccttgtgctttctcaggagagcttcactggggacactctgtgatgtttttggagggtcatttggtaatgtgttcaggagccaaaaaatatgcataatattcagtcttacaattacattttttgaatttatctcaaggaaatcccagggatctgtgtgaagctgcacatgctgctgctgctcagtgcgggactgtttataatatttgtaactcaaatgtccagaagaactgtacactctgtgcatgttttcagtaagttcatatttgtaagaaaaagtgggtgtgttgagagacaaatttttgtgtacatttacctggaaacaagcagtagtacacatatgcatgcatgaagtggtgttttcctgagtgttaagattgtgaatgttttattatgatcatttctactttttctattggaaaatactttgtgtaattaaaacatgaagatggagctaccatcaaaatggtgagcaatagagcactgttcctcctggggtggcctggtgggcctgagggactcaggtggtgatgaggagtggccttgagtccctttcctttccatgggacagtggggacgagagctagagtgatgaggcaggttaagtgtgtgcctacctccctgtggctggagcactgttgtggccaccccgggaccccctgagcctggtgtcgccctggcttgctggtcccagcctagggagtgggcccctatgggcagagggtgaggtggctgtgctggcactgcagctcaggcacacacacactggagtgttccaatgggtgatcaggttggatggagccttgaaattaagtcagtgatgtaatttttataatctgtttcactttaaaacaaaaatctttgcacacctggtccaagttttctcccctttcttcctgttgctgccatgatgaaagcagaagggaccaccctccagggagagcagcaggaagggagatgcgggtaggggccctgggtcagcaggggcggtcagtccggaggtgcacccccattta

SEQ ID NO: 30443 - DNA, 2300 bp, Homo sapien
aaatccactgttagtttttagaaaaagatttagcagtttccattaagcactacatcccactattccatttttaggaaggacagatgcttgaggccataggttaccagctcttgtttggtctttaaaaatgcaagtaagttgctaacattttcaaataagatttcaacataactctgacaatgccacaggacacacagtttggctccatgtacacgtacctggggacagtggcagtccccaggtctctgccatgccaagatcaggccccaaggccattcagcaccaggcacaatctctgctttcctgacaactggcctgctttgcttatttaccttagtagccttccaggtaactgacactggtgtttgaacgcttaactttcacaaagcttgtttaggcaaataaaatatgttcatactgatgctgggaattttgttactaattttttcccttaagttcaaataaaactaaggagttgataaaagggtattctgaacagaaaagtaaaaccaagagcacagaaacacctgctgtgtttcttctgccagtaacagtgacagagaaccctcaggcccttgctcgtccggctgcagcacacacggcctcacctgcattgctccccgctcctctctgctttttttccttggctagttgaatggctcggtaatcagttcttgctgagcccccactttcctgagaccaaagaaaagcatgtcagtcacttatctagacacaaaggaagggtagcaagggagctacagaagtgccataagcctgcttctgggacatatccgagctcccaaaaccagagtcaccagcaaggcacacaaagggccaaacgctacatccacttgtggcgagggccgaacaaacttggagctggaacaatgtatgtgactttcttatccagagaagcaaagttcattccttcatagtctaaaacatagccaaatattttaaacagaaacttttaaaatcaattacatacttctctgctttctgaaacaaacaccgagccttgcctgggtaacccagggtcaccttaccgcgacacttttcacgctgtttcacacacgtgcatggcaggcccggggcaggtcccaccttagagacccactgtacaggctgctctggtggcaggggctatactttgtcaaagtcttacacaaaaataataatgatggtactgaattcaggaacttgcctgagggagtcagacagtactcagaggacatcagctgttgcaagtctgtgaacgtttcctaagaaagacagtttaacacttatcgctatgaagagaaaaagagcagccctcaaagctcgtagcatacctgggacccattcaccacacaccatttgtactcagagaagcgaggtagcccaacgtcacacagctagcaagaaaatgaacacggggttaagaccaaggtcttgctggcttctctacctccacccacagctgcagctgcaccagggagcttccatttcccaaggcaccgaggcacacagtcctggcaccagggactgactgagcacttgtctctgacctgtggccacctcccatccctgcccagtcacctgtacacttagcaactactatggccgcctaagcaaatgccggcaagcatggctctgccaccgacaagcaagacaccagaaatgcagagacagagactgtcctcctctctgactgaaagaaatgaaaggtggctccatggagcctcagctactatgtgcctcacaactgatcctactgcaaaagatgtaacattttttaaaagttgtggtaaaataagatgtaacattctcaacaatataaatgtcaccatcaaatttagcctgtgccacaaaaaaaatccctatctgatcattcccatctaggtcaggaaagtcagactatctcctaagaatctttaaattattttaaattaaattatattaaatgtataattgatataaagtatattaactgtccagcctcaaaactggggaagtactcttataatcctccaagaactaaggctcataaaccccaccctttttttttttcttgttaattctaattttaaaaaagagtttggtatggttttaaagtttccattgaacctctgaaggtggcttatgtctcgactcctcttctaggactggtcatgagctgacaagcatagaggcaaagtatctcaacattacaaaacccccaatcttcaaggaaaggagcacattaccatggagccacaggactccaaaggacctcagaaagcatttagccaaatctccttatgcaggaaataaatgagaat

SEQ ID NO: 30444 - DNA, 2300 bp, Homo sapien
ctccaagaggagctgcagcaaagactcctgttaaacatcctgcagcctcatgttttccaccctgttggagccctgaatgtttctgtcggaggagaagtattgctgtggaattgttgaggcttagctgctttggccaggggttaggattgaggtgaagattacaaagcagggaacctaaggaaattgcgaaaggaaaaagaatccaaacagcaagggacagggctggcagttggagggtgtcagggaggaaatttggatatgtagaggatgcagcatcacccccaaggggtgaaaaatcctggctagtaggatgatttgtagcctttcaaagatcaaccctaccagacaaaatcttgttccttagtatttgatttctctcatggggttcttgggtctcagtgtgtgtgcaggatcagtgctccggagccggccagtagatggctgtgaacggaggactttctctttatcggttgctccatctccaagtcatgttgcaacaggtggccagcgtgtgcctattggctgccattagctgccttcctgtggtgatcacaaagccaagcattaatggtcttccctttttagagagtgcttctgagtcatgttttcccttgtctgcttcagtgtgaacagggtctggtgggtgtgactagcattagctatgttgtataatttttgccacgctttgagcagggtttgtgttttccttgttcaggctgtgagaagacatttatcacagtgagtgccctgttttcccataaccgagcccacttcagggaacaagagctcttttcctgctcctttcctgggtgcagcaagcagtatgataaagcctgtcggctgaaaattcacctgcggagccatacaggtaatgagctagggaacgcacagcatttggacccaagatttgtcttcatcgtagctgttggagttgtaaattttatgctgtataattttttcttttataaggtgaaagaccatttatttgtgactctgacagctgtggctggaccttcaccagcatgtccaaacttctaaggcacagaaggtaatccttacattttggtttgcattatcaggtttgaaaatgagtggtttgtcagcagcagaaaccaatgaatgaaatatctgtagacattttttaagttgttaaaaaaggagctcagtgttgatgatttggaaaattcagaaaactgtaaaaagaaaattgctcagaatctcatcacctgaagtcagttttttctgtgtatactttttttaaaaaaagctaaattggcatactctgttcttaaaaaaaaaacaattccaggttttttttttaacttaacattgtagaataagctttcttcatgtaattacaagttttcatggtggtaatgacaaccctggagactgtgtccaggtgacactcagcactttacatgtgtgtcttctaccttcccaacaacctcaaagctaatgttcttattctccctgttttacagtgagactcggagagattcagtggtttttctgtacttgcacagctgggctctgaggatttaatataaaaatgtcacttaggaaaagacacagtctttacaagttggcttaagagagtccttttggcattgcagctgatgctctgtgcacatttctcacgaccgtctgtcgctcggaaagcttgttgatcattggggtttctaaacaatagaaacaccttcatcaatacatttgggactccactgttcttagattagcttatattagattgaagtagcattaattgtttgatgtgtgactctggggtcagcttagtcattaaagtagaatttttatggggtagctaaattgcaaatctgctcacatggattaaagacagaattaagattttccgaaatgtactgatcatttttgtaaatgcaaagtttgtgttttggtatgttttgtagaattttaaagaattatggtgagttgtgtgaggaatcacagctcctttatttttctgtctggcaggaaacatgacgatgaccggaggtttacctgccctgtcgagggctgtgggaaatcattcaccagagcagagcatctgaaaggccacagcataacccacctaggcacaaagccgttcgagtgtcctgtggaaggtagattttaaaacattgctttgagcagtaaactaagtgcaatgccaacatttatcctgttaagtttccgttgtttaaaggtaaatgttagctgcttaaagactgactcaatataagttgcagcattatgtttacttacctcattgagttaattgtactattttgggagcagtg

SEQ ID NO: 30445 - DNA, 2300 bp, Homo sapien
attacgaggtcaggagatcgagaccatcctggctaacacggtgaaaccccgtctctattaaaactacaaaaaattagccgggcgtggtagcgggcgcctgtagtcccagctactcgggaggctgaggcaggagaatggtgtgaaccccagagacggagcttgcagtgagccgagatcgcgccactgcattccagccggggcgacagagcgagacaccgtctcaaaaaaaaaaaaaaaaaaaagtccactgcctgttctttctcctgtgtgttgacctgcagttgttgggaatgtaggactccaacacagtgagctcttcaccaggatgggcagctttccctgctttcacagggatagggttcctccagaagggcaagaaaggattcctccctggaaaggcagaagaatggagtcggctgggtggcagagcccaggtggggattgtggtctgtggtgagggcccaggaggaaggaccagtcattcaaacagaaactggaatgtgtgcctagcatgcccctaacctgtatatgcacacggctctccttataatgtccttaaacaagaatttttaaaggatgagatgagaattatgaacgggttttattattttttccctcgcatatgcctgtggactgtcttgcgcattcctcttcagagagaatgtggcttgaggccactagctcaaagtctttttcagtcatacactcttgggaatctgatggtggctgtagaccctttccctgctaaaagagtatcattctgtgtatgacactgggaaggtcagggatcccgcctgcttccaggcatgaggtctcttgagggttttgtgttggctgatccatgaggcttcttgtgttgagatgagattagatggttagatgagattagatgtttagaagcaggagcaggaccagggaagcatcatcaaagggcccagacctgagttttctgaaggcctgagccagggagtgggaatgatgagggtctctagcaggtgagattgcagagggagaaccaaagggtgtaattatctatgggggtgtggggggttcttgccaaggcagagagagtctgtgttcagatttacatgaccaagtgtgtgaacacaccgaagcccaaaataccctggaggtattttgggaccagattgaggccaaagatcagcatttctgagttagatgttgctggggaaagtagggttccttgggctgatacttttgggcagtgctatgccatgtacatctgtgtggcagttcataggcatgatagtatctcgttaaaggctccaagaggagctgcagcaaagactcctgttaaacatcctgcagcctcatgttttccaccctgttggagccctgaatgtttctgtcggaggagaagtattgctgtggaattgttgaggcttagctgctttggccaggggttaggattgaggtgaagattacaaagcagggaacctaaggaaattgcgaaaggaaaaagaatccaaacagcaagggacagggctggcagttggagggtgtcagggaggaaatttggatatgtagaggatgcagcatcacccccaaggggtgaaaaatcctggctagtaggatgatttgtagcctttcaaagatcaaccctaccagacaaaatcttgttccttagtatttgatttctctcatggggttcttgggtctcagtgtgtgtgcaggatcagtgctccggagccggccagtagatggctgtgaacggaggactttctctttatcggttgctccatctccaagtcatgttgcaacaggtggccagcgtgtgcctattggctgccattagctgccttcctgtggtgatcacaaagccaagcattaatggtcttccctttttagagagtgcttctgagtcatgttttcccttgtctgcttcagtgtgaacagggtctggtgggtgtgactagcattagctatgttgtataatttttgccacgctttgagcagggtttgtgttttccttgttcaggctgtgagaagacatttatcacagtgagtgccctgttttcccataaccgagcccacttcagggaacaagagctcttttcctgctcctttcctgggtgcagcaagcagtatgataaagcctgtcggctgaaaattcacctgcggagccatacaggtaatgagctagggaacgcacagcatttggacccaagatttgtcttcatcgtagctgttggagttgtaaattttatgctgtataattttttcttttataaggtgaaagaccatttatttgtgactctgacagctgtggctggaccttc

SEQ ID NO: 30446 - DNA, 2300 bp, Homo sapien
tgtatttaacaaatatgcaccaagagtcttcctgggcacacacagtgaataggacacagttcctgggctccaggagcctacattccagagagggagagacagtgaaggagcagggaaggaactcaacaaaacaacgggtgatgagagctctaagagcaaacagatcagacagaggtgggaatacgggactgggtaagcatgtgctttggatcagaaggggcgcagagtcctcccagaggaatcagagatcagctgcgccaagtctctgaggctggaaccagcttggcttgctggatgaactgggaaaaagaggtggggtgcgggggaggggtggggggggcagcgggagagtggcgggaagtgagggcaaacaggtaggggagggtagactagcaaggccataggcgccttcgggagcaaggtggaggtgagcataatttgatgtgcaatttttagatcataaaacggtgccccgtggatgggagcgagtggagcggagggagaccgatgaccagctagtagttatttttcaggtacccaggaataaagtgcgggtttggatctgagtggtggtgaagttgaagtggaggagtccagattgaatgcggaggtgtacggtgaggtgggggagggtgaggaccggaaacagtaagtaattaagctgttgcagagtgaggttgtgccaagtttagtaggaaatacagttggaaatacaggcaggggtcctgcgtatcagggaggccccgtgtgccgagcaaggacctgggccaaagcaaacgaggtctgtgcgccagcggcggcaggcgagcttgcacttaagtgagctgggggtaggcgtccggcctgttggacaggttcgaatcctggatctgccggctgccgagtgactcgagctcgccgtccctgtttcctcacccctgggtgaccgcgcacgcttaatcagctcggacaggtacagcccctgggacgcagtcaatgcctacgagaggttgcctgttaagtgtctgaaatattaatacgattcgaagtcaagacaagcctcgtcttccacgccagcgggaacgagaaggaatcgctcagcgttgggagcctcaccccgtcccctgtcggtcccgtgccccgccgctcgccctcgtaggtgccggcgctccgccccccgaccccgcgccccgccccccgaccccgcgccccgccccccgaccccgcgccccgccccccgaccccgcgccccgccccccgaccccgcgccccgccccccgaccccgcgccccgccctagtcggtcccggcgccccgcccccgcctccgcctccggcgccccgcagcccagcctcacgtcacgtcagcccagcaggcctcgcgcatcgcccggcggcgtccgcgcacgcgcggttccgagccggactctacgccggggcttggcgcggatcgcgtcccggggcggcgcacgcacacctgggcggggcgcgggcagctctgcgtccgaagctgctccgacgccgtcgctgggaccaagatggacctcccggcgctgctccccgccccgactgcgcgcggagggcaacatggcggcggccccggcccgctccgccgagccccagcgccgctcggcgcgagccccgcgcgccgccgcctgctactggtgcggggccctgaagatggcgggcccggggcgcggcccggggaggcctccgggccaagcccgccgcccgccgaggacgacagcgacggcgactctttcttggtgctgctggaagtgccgcacggcggcgctgccgccgaggctgccggatcacaggaggccgagcctggctcccgtgtcaacctggcgagccgccccgagcagggccccagcggcccggccgccccccccggccctggcgtagccccggcgggcgccgtcaccatcagcagccaggacctgctggtgcgtctcgaccgcggcgtcctcgcgctgtctgcgccgcccggccccgcaaccgcgggcgccgccgctccccgccgcgcgccccaggcctccggccccagcacgcccggctaccgctgccccgagccgcagtgcgcgctggccttcgccaagaagcaccagctcaaggtgcacctgctcacgcacggcggcggtcagggccggcggcccttcaagtgcccactggagggctgtggttgggccttcacaacgtcctacaagctcaagcggcacctgcagtcgcacgacaagctgcggcccttcggctgtccagtgggcggctgtggcaagaagttcactacggtctataacctcaaggcgcacatgaagggcca

SEQ ID NO: 30447 - DNA, 2300 bp, Homo sapien
tgaggagcagagatgccacaggcccagtatgagaacaaaccttgtccttcttcattcacacaacacaacacaacacgccccagtcaccaaagtacatgtgggctttttccagcagccagcttttcagctgggtgtctcctccagctaggtgtcccagtcagctcaactctgacaccacctgctggggatggcatgagatcccacaggttgagggctcagtcccacaagatcgcccccaacttcagatgctgcaagcacaggttgtggtctgtggactgtggttctgaccacagtctggctataaactggggattccagggttcatttaatttgctactgtggctcacaaaactcagagaaaccctttattattgatgtgtactggtttcttataaaggacattacgaagaatatagatgaacagccagatggacaagatgcccaggatgaggtgtggggaagatgcacagagcttctgtgccttctctgggcatgaccctctccaggaatctgcctgtgctcagctgctgggaagctcttctgaaccctgtccttttgggtttttagggaggcttcatgacctacacaactgactaaatcattggcctttggtgatcaactcagccttcagcttctctctcctccccaaagtcaggaggctgctgaaggttccaaccctctaatcacaggttggttcccttgtcaaccagccccaatcctgaggatatcagggatctgccaagagtcccctcggtagaacaaaagagctctgctcctgtcacccaggaaattccaacagctttaggagctctgtgtcaggaaccagggtcaaagatcaaacgttagaacaaaagattctcctagagtttccatctaccagggcctcaggagctttgtggcaggaacagggaagagatcaaagcctgtttcttattctatcacagtctcacatcacccccattaagggcgccctccctgtgctgcaaaagggccagcgtggatgggagggtgctagagccagacctctgggtcctcagggctccaatctcagctccccccatgactggctgtgtaaccctgggcaagtcccatccctctctccacctgtttcttcatccttaaaatgggggcaacgaacccctcagggctgacccacaggatgctctcagaggagcaagcactcagaaggcagctgggcttccacgtgcgggccctgcactggggcttgcctaacggcactccaccgccttgcagctgagctgtccatcgccacccacttgtgtagacaggacatggccaaaggccacagggctggtcaggctcgcactgggtacacccaggtgtgttgcttcccccggactgctggaattcagcttcggccacttcttggctgtgtgagggagacccgggccttggtttctccatccatagcatagggctcatgaagagtgctttctggcagagttgttaacagatttgggaatgagggtcatccctcaggcaggtccttcaaaaagagctttgggagggggtagagtggtgtgccccccagcgggagctgaagagagcacacttgccactgagggcccccactgcacctgtcacccagccctccagtggggagccaaggagggcacacctgctgctgggtgctcccgctccacctgtcaccccaccccccagcaggaggtagcaggaggaggggctctacactctgtgtccggttcagtgtcacatggcttcccatctcctcatcatcaagatgcagatccccacatcgaatgtttggtgtggtgcaccagagggctgccacagcacaccccagcattagagccccacccacccccaaagctgtcccggacagcacagccctcctggaaggggaagtgagcccagcccccctccccactgtgaagcctgccctcccgcagagcaatgtcctccccaggtcagcgctgcaagtgccctacctgaggccagtgaccctccgacctgcacatggctccctgcacaggccaggcgcccaatgagaggctggaggaggtggccctggggctagaggtccctgccctatctgcccagtctcttcctggcctccccacagtgctggcctctgcctccatctcagtcacacatgtctagcctccaggcgctgtgctctggcctgcccctgcggcccctcccagagaaccggggacgccaggctggggtgccccatgcccctgtcaggacccccagcctcagccctgtggagaaacaggtaagcagtgggcccgtgctcccgaggccttggcctctag

SEQ ID NO: 30448 - DNA, 2300 bp, Homo sapien
aggcctcagcacggagtgggtgttctgtatctgtcgaatgaatgaatgaatgcgagtccctgggagagggcgtcttcgcagggaagctccctaggccccgggcgtctagccaggcatctgcaccctcccaccccaagacccaagaccatctcttcctttctccagggaccccatttccagggacatctccggatgaagggctgagatgttattcccaactttggccaccaggtggcagcatataagggcaaagcgcgctgaggattccaggctggcagtgaggccagggaatgccggtctggggaaatttggaaggcacctttggatgcgagttaggtccggcagggaatgcagatgacctggaatccctgggtcctgggccagtctgggggtgggctagaggttccccaaggccagaaaagtcatgataagaagcttctagcttactgtgagtctggactcccacccctgtcctttgagaacatcatcaccatttaaagctgtatctcaaaaccagcagaactattatttgcttaatattcttccttaaatagatcttccacaacttaaataaatatagtagggagaaatttttatttcaccactttaacagaaaccagccacttgccagaaacaggcagtaaccataaacaaattaattactaatatcaaatacttacctggcactcactgagtgccagacactgttgcaaacatttcctgtatctcatttaatcttcacagcactgaggtttaggattatccccccgtacaggaaaatgggaaacagagaggtgcagttaatttcctaatctcccacagcagtaagcggcaccaggtgggtttggagtcaccacatttttcaagaacagtttaacaactggagcttcgagtgtggaataatagacactggagacttggaagggtaggagagtgagcgaggtgggagggatgaggaattacttaatgggtacaatggacattatttaggtgatggttacacggaaagcccagacctcaccactgcatatctccatgtaacaaacctgcacttgtgtcccttacatttatacaaaaaactccaaaaaaaacctacagtgtaatgtagtaccctatcccatgcactcacactgctaaatgttgtttccaacgcactcatccgcgcacccagtgccagctgcaccctcccgttccctgctagcctgacttctgggcagcaagaccctgcggttagacgtgggctcctgcccacagggctagctggatgtgtgtgtctttcaaaggctggactttactctcacctcgccccctccaccccccaacacacacacacacacacacacacacacacacacacacagtccctggcaagtcctcagagctcacgtggtgcccagagaagttgtgggtgacacgatgaggcacaagctccattccccgggggatgtaagctgagaccctacctctctgtgcaaaggctagtgccacctgcatgagctagattcaggcaggacctggagaccctggaggaaagcaaggctgcagggtagccttgggtcggggagggagggacactcttaggcctcttactgagggcgggggtcccggagagccatggacagggcaacgctctactaggctccttggttcatcccagatcagcccttgggcccctggcatctaaggcagcaaaaaggcaaggggacaccgcccggggtggggcacgccaccgcgacaatgcctcttggccttgggtggataatggcacccctgggcaaaccctaggggcggggcccagaggcgaggggcttccccaatcagtctccgccctagcgccctggacttcggccccattccattgggtgagggtgggggcacgaaaagaggagcgggcttgcggccccaccgtgtcccgcctcctcagtccccagcgactcgcaggggctggtggggctggggtccagctgccgtgctcccctgccctgcgccgcgccgcgcgtcttggtaggcgctgcgctgccggggccgggtcctgggccagtgcaactccgcccccagccgtatccagcggactgtcctccgccgcgcgcccggcacagcatggggaggcgctgctgccggcggcgcgtgctggcggccgcctgtctgggcgccgcgctcctgctcctatgcgccgcgccccgctccctgcgcccgggtgagtgcccgccggccgagccgcgcacccccaaccaaacctggctcctcgcgctttccaccgcggcctgacccctcgacagcgcgggggacacctgttgtct

SEQ ID NO: 30449 - DNA, 2300 bp, Homo sapien
catggtgactcattaatccatcaacccatcaatccagtaaactaccaatggattaattgatccgtgagggaagagctctcatgacccagtcacgtcttaatggttgggtcatctctcaagactgccacattgtggattaaatttcaacatgagttttggaggggacaaatattcaaaccatagcacccagggaacgctggaaatggtgcaaggccctgggctttgtatgtccctccagtgggggaagggcccaggctgggggaggcctcatggggaaaccagtggcagctgcagccccttcccaggtccactggagttggccaccccattcctgctggcagggcctctggacacagccctgggggagctcagagacaagtggcccaagacacacccacactcacacattcacacatacacatacacacaattcctctcacacactcatgcacacatgcacactcttacactcatatactcacttatgcacactctcactcatatactcacacactcatgcacactctcacagtcacacacgcacaaaggtgggaggcagcacaaggcccagggcttggctgagctggtgtgggcttcagtccttggcccaggtcagggtgaaagagtagattttccccaagttgtcagtgccagaatttagcacctcctacacagtgcactctcttcaccttatgccccatgtagcccctcactcctatatgcaccactaggaggtacccaggctctgtgggcactctcatctgatcttcttatgccacttggcaacagggaaacaaaggcttggagacggagtggtttgagatcagacagctgcagtctcccagagaaaatggcccaatgaagcagataaactccaaaaaatcagaaagtaacaaaatacatttatttcaaaaccatgaccgcccagctcaccaaagtcccataaaacctgtgaccgcattgcaccaggggctctgttggcatggagcctgaagacccagcgtcttgccagactgagaccgaaggtggcgcctgggtagggccagccgcgtgggagaggagaggagacccgatggcagtggaaggcagctcccacctggctcccgggacggccccatcgtgaggccagccaagggagggctttcgtccttggccgcagctgtccttgccagggtgggcgaggtggggaggacacaggctcgggccacactgacaccggtgtcagcattatgttctgatgcaccatgaacaggttcaggggcagggctgacccccaaaatggcctttaaaagcctaaaaccctggttatcaagtccttgcccatctacggggcctggagaggtgcctgtcagctggagcaagtggaggaagcaggcctcaggcgacaggccgaggcaggcacacgcgtgcagggccacctgagatgggctgcccccaagcctggccaggtgtgccctgcgcccgctggcccggcggccaggtgagtgcacgcagtggctcttgaagaggggtcctggggccggcagcacctgcattccccgggggtcttgtcggaaaggcacttgccccgcgtggccacaggacctccaggaccgctagagcagccgcaggtaggagggggcggagtagttgaaaagcaggaagtccatcttgtagaggtcgaagaggcgccgctggtagaaggggctgatgtcccggaagaggcgcgctgccaggtcgcgggaggcggcggctccccggggccgcggcggcccagggaagctcaggtcggatgcgcccgccaggcccagcacgaaggccgcgtcctccgccagcgtctcgaacttgcccacgacgtcgtagcggaggcgacacgggtggcagagcgcgtgcgcgcgctcccagtgctcgttgaagggctcctcacgccgcgtgcgcgggtccagcaggtaggccaggaactccgcgaagcgcacgtcgtggccgcgggcccgggcgtcggggagcgcgcgcggccgcaggcgctgaacgatgcgtgcaccgtagcgcctctggaaggcggcgctgtaggggcgcgcgagcttgttgcggtaagccgatgccaggcgctcgaagggctcccgcacgaacaggaaggccaagtaggcgcgcaggcgccggttgatctcggcggggctgaagtcggccagtgagggcaggcggccaggcgcgtgcgcctcttgcgcggagatggcgcgcgggtcgccgcgggcttggccgctcagcgccagcagcacgcgcttccagttggtgcaggccaccttgggcacgtagcagtagag

SEQ ID NO: 30450 - DNA, 2300 bp, Homo sapien
atccacaagggaatttagaaaatgccttgatatgaattaggccaggcacggtggctcactcgtgtaatcccagcactttgggaggttgagatgggttgatcatttgatgccaggagtttgagaccagcctggccagcatggtaaaaccaagtctttaccaaaaatgcaaaaattagccaggcgtggtggcacctgcctgtatttccagctactcgagaggctgaggcatgagaatcacttgaactcaagaaacagaggttgcagtgagccgagattgcgctactgcactccatcctgtgcaacagagtgaaactgtctcaaaaaaaaaaaaaaaaaagaaaagaaggaaagagaaagaaaaaagaaaatgccttgatatgaattaaaagaaaaactcaacataccaaatgttatggtatgcagagaaagcagtgctaagagggaaacttgtagctattaatgtctacatcttaaaaataagaaggatcccaaattaatgatctaactacacaatttaaggaattagaaaacgaagagcagactaaatccagagctagcagaagtaaggaaataatgaaggttaaagataaatcaagtcgagaatggaaaaacaatggagaaaatcaacaaaaccaaaaggcgatttttgaagtgatcaaaattaacaaagctttagctagattgactaaggaaagaaaaagactcaaattagtaaaataagaaaggaaagtgggaggtattactactgaccatacagaaataaaaaggattatgaaagaatacgccaaaaaatgtcacgccaacaaattggataacctagataaaatggacaaatttctagaaacaaaaaaaaaaaaaaccaacaagactgaatcagggagaaatagaaaatatgaatagactcataactagtaaagagattgaatcagtaacgaagaaaagccctgggccacatgatatcactcgtgaattctaacaaacacttactaaagaacatacataaatgtttttcaaagtttttctaaaagttgaagaggtgggaccatttcctaactcattctgtgaggccagcattgccctaataccaaagtcagacaaagaccctacaagaaaggaaaactaggggccaatatcccttatgaatacacatgcaaaaatcctcaatgaaatattagtaaatgaaattcatcagcatattaaaagtgttacacactattaacaagtaatatttatccctagaatgtaaggattattttttcataatgaaaatatcaatgtactacactacattattagaatgaggaggaaaagacatgatcatttcaattgatgtggaaaacacgcttgacaaaattgaacactctttcatgataaaaacactcaactccttaacatgataaaggcaatatatccaaaaatcccacagccaacaccatactgtatagtgaaaaactggaaactttttctctaagatcaagaaggagacaaggatgcccaccttccccagttctatttaacacagtactggaagttctagccagagcaactaagcaagaaaaggaaatataaagcattcgaattggaaaggaagaagtgaagttacctccgttcacagatggcatatagaaaaccctaaataatccataaaaaccctgttagcactaataagtaaaaagccgtagggtatagcagacagtggcacaggtgaacagcactaataagtgaaaagtcgtagggtacagtagacagtggcacaggtgaacggctgaaccacttccagttcagctccttcactgccttctccttcctcaaccccctgcaacctggtgtccactcctccacagaaacagcttttctgcagcctcagtgtctgtacctatttctgggcgtctcttctgtatgcagaacctgaacagggagaggtctctgctatgaagagtgcagatgtggatgcttctgtctgggtgcgtggagctgagaggctggccagccctggcccatgtgctgctgactttgcagtcactccctgggccagaggggcttcaggctggagtctgagcctcatgggtcagcagctgtgatgtcaccaattgtgacctcaagggcttctgaccttgcagtgagcttgttggcactgcctgtccggggaccctggggctgctgttcctgtggtaatgtggcagctgggaccatggccagcttcagtctgcctggcgtcacataagccagcccacagggtcctgcagcttgtcctttctggctggaagctctgggcatagcctgggactgggtctttccag

SEQ ID NO: 30451 - DNA, 2300 bp, Homo sapien
cagggtaacacagggaagggcttttgctctttttcttttctttcagaaccattttgcacattttaaagacacattaaaatggcagtggggaaatcaattgctcttccacttgacttcccaggggataggcatccagccaccatctctggagcccgcaaagcctggcctgccccttgggctggtgcacagtggttcactgcacctcatggtgatgctttaaggaagtcctcaccaggcaagtctagaggcttggggaactgagggcacttggtcactagctggtggcagagtgggaacctgcacccactcctaactctacactgcatatgcggctcataccacctggcctctccatgtgttctggacccacctgcttcctgattcacacacgggagaacatttgcgaggggaaggaagtggtggtgacctatgcccagaatgaattctaatttctgagtgttaaaggtgccacctgagaacatcgggaaacactgagccaaggggaaagtcctgtcatcgagtaggagatgacaaatgcagcgtgctcattaagatgctgtgagtgcagccagaggcagctctgtgcatgtgggggctgcaactgtcacatggcctggagcttgccaggccccaagactctgcccacatcatctcagcccccacttcctggggccctgatcgcatttcagacttgtgccctgacaggtggcaactgcaggggagaagggaccctgtggatatttctgaatgtcactggacccatcaatgtctgtttccttcaggctgcccatgtcaatgacccatcaatgttgtgtgatgggccaggctgtgccatgcaagagtgtcatggtctgtgcccctgattactccccctcacggctcaaagaggaggacccaagctaatgtgaaaatcacaggcactgtgattgggtgctagatgaaacttcacgcagggacccggccagccctgcgacctccctgagggcgacggctggggacatgggtcatgtccacagattagtctcagggaaaaggaggatgcacctgacttcaaggcccgtagcttccacacactcccccctcatcctggacatgtgtcctcacctgaacaatggccccatgactggttgtgcctcatgggacccaggagatggagagacgcagccacacctcataggagcagggcggccagcctcattctctgccaaatccgcagcgcccagcacagtatctggcacatgacaggcactccagcatcgctgagtgcacaggttaacaaaaagcataaagtacctactaggctccttcccctgctctggttattgcatgggttccgcctagaggacttaactgaaatgtaaagaattgttgagaagaaggaaactccaggtttttgtttttggttttgttttttttttttgagacggagtctcgctctgttgcccaggctggagtgcagtggcgccatctcggctcactgcaagctccgcctcccaggttcacgccattctcctgcctcagcctcccaagtagctgggactacaggcacccgccaccatgaccggctaactcagtcactgcaggcaagttcagctccgaggtcttccactcatccaccgaaatggacagaggattcctcttctcgcggtttcagagtccctttgttaggggcggctctggaattctatgtagaagggaactgacgggtagcaacctaggaaactcattaaagctgcattgcaatagcaaacgcaatatatttatttagcttgtgtgatctaaacttttaaaaatatcaatctttccaattcacacttcccataaaaattgaagaacgtatattttaaggtggtttaaaggggctgttggggattattaggagtaaaaggcattgcacagaggccatctcagagcgccatcgccaagattgggtggtctccggacgcaggcacaacctggagataaagaggctcgcgcttggtacccgcccctttgcgaagggcaggtgacacctaggctgcgggcgggcgggggacccaatttcgcatgcgcggggcggtgttggggggcggggcgagcggctgcctcgcggattcgcgcgggtggtgagagtggccagcgagggcagcgttcgccgcccctcaggccccgtcccggcgccgcagccgcctgcgtttcggtttgtgagcaggcccggccgggccaggagcgagagcgagactctggagcggtcgccgccgcagtcgcccgggccgggaaaggcgggcgatgcccccaaccgccgctcgggccatgtccga

SEQ ID NO: 30452 - DNA, 2300 bp, Homo sapien
tgatcagacacagagttgagcgagatgcacggagctcacactggggtggccttgcaggctgctcccaggttctgtgattcagtccgttctgattgggacttctcagggagagctgccgctgaaaagtagctgtctcgttttctgccagtccctgtcttgcagtttcacagaagacctcacggggtgcttctctaccgccagggctgcagcggcaggtggccagctcaggacgtggcatcctgggactgcattctcactctgtccccaagttcctgcacatcccaaggttgctgactgcccctctttgatcagcttccattttcttccctttgtaaaatgtgcaaattggagatcaatgttcggtgagatctagctgagcactgacatgttatatcccaatccctgctcctggccagcagtggggcttgtgatgagaggtgggcagggcactatttggggtaggatttcccttgtccactgctttctagtgctggcctggagggctctgccagtgaggtgataggctggtgctgagggtgaggcattgctcacggacctgagcagagggggggctctgcagccacgtaatccaccacccacccctctaccccagccccgaaccttgcaggtataccctttgctccctggctcgaccagcatcatgacctatgacttgtgcctcatcttcccggccctggccaaggctgtcgtttacgtgtcagacattcaggagctgtacatctgtgtgattgataaggtcagtggaagcttcatgatggggccccctcagcagacctgcaggaacggagagtgaggcggctgtgggatgtttcctatggccttcacttttgctcctggggtctgcatcccttcccctgtgagcttgcaaagctgtcttctatctccttcgctctatgttaaggatgcagagtccctccagtaaggaacttcttcatcccaggtgacatccccatgaggcttggcagtaaatcctgctggaagttgcctctaaattagctgtgacctgggaattcttgtcttttagctggtgtaggttattaaccagccaggcacatgtcttgctgagcatggatttccccctgaaaatacaggttttgggttctctggagtttcagtgacaaatgagtacagctcacccacgccaagcaccattgcaaaaaaggaaaaggaatagatctcgttttatctttcacgtcaatagcgaaattttattactccaaatatctgaggtgactgaagctgggcttccagagggttgtggtcgggatcctgagtggatagaagggctggtaattaaaagggcatcttaggctccttaagaagctaatatgctctatccagcctcacatactcctcctataatctcatttccactgctgtttgctaattttctgtttcttcactgtgtatttctgactctcatttcctaaggttcttatcatattctacactgccaggtgtgagctattcagtcagtgagcatttactgaactcctactggatgcctgctgctgttctaagcagtgtctcatctccctaattagtgtattgttatttaagagtagggagtggaacttatgcctgtaagtatccccagccaccctcccctgacccaccccttggaataagcgcttcatcaattttcatttgctgactggctgatagtccagaggtaaacctgggtgactcatccctgattcccaggtctgtgggttgaggttggtgatgctattagtatctcagaaagtcatggggcaccatagatggtgagattggtctctcagaggccatccctgagcctctgtctgcacgatgcaggcggagattgggaagacagtgaaggcaaacatccgcatgctggacttgcacaagaatccccttctggccaaatacttcccattcatggacctgaagctccgagcagcttccccaattgtcacattggtgtgagtcctcctgatggtcacctcctccagcagagatgtcacaaaggcaactcctgaagtaggtgattcctggacaaggggagctctgaggtcactcatgggctcattatgtggtgtggggctgtctcggggtgttaggttatgacaggagcagcactgcagccacaagccatggcagtcgtggcccggggatcattccaagtctatttacagcagcaacattaaaccagccctgccaacatcctccctgtgcttgggccacgctggggctggtgagcatcattaatctgtgatctgaagcacgtgggtactgtctgtgcctctagatggact

SEQ ID NO: 30453 - DNA, 2300 bp, Homo sapien
aataaatcaaaaggggaataaacaagtatcttgagacaaatgaaaatggaaacacaaggtaccacaacttataggatgcaatagaaacatttttaagagggaagtttatagcgaaaaatacctacattaagaaaaaagaaagacatcaaacaacctaattttatatctcaaggaactagaagaggaacaaactaagccccaaagtcagcagactgaaggaaataaaaaagatgagagcagaaatagaaactagaaaaacaacagaaaagatcaacagtaaagatcaacaaaattaacaaaccttagctagactaaccaagaaaaaaggtaattcacataaacaaaagtataaatgaaagaggagacattacaactgatatcacagaaatacaaaagatcataatcaactactatgaacaattatacaccaagaaactggataatttaggagaaatggacgaattcccagaaacataccatctatccaaactgagtcttgaagaaacagaaaatctgaacagaccaataacgagtaaggagattgaattagtaatcataaacctccaaggaaaagagacaaaggaaagcccaggaccaggtctgaccacatctttactcagttttccccgcggcccccggtccccacccctcttagcctgtctccctaacttcctttctcctgaggtgctcccccaggaaactccttgcaccagaatcccctacgcaggctctgcttatagggaagaaatggacgacagaggtgatggagtggggtgcgccaatgaagtattttgaatgaaactagcagacacctttgttcctaaagattccatcgtcacaccagctctgggatgtttactagcttcttcaccctgagctattctcaatctcagagccttactgctctctctcaatcattctctcctcctcacccctttctttccaggttgccaataggagctccaaatattttctggctatttcatgtagccatctagttttcctcagctcggcttcaggcgcacttttgcaaatcaaagccattcagcaactcagaggaacaaaaaggggcttatttgaaggtagcagtgtctatgactggcaaccgtctgtgtgctcccttacacatagggtcctgtgtaagaagcctacacacaatgcctggcacactgcactccacacatggtatgtacactccttgggcaatgcctcctaacggcttaggaccattccctgtcctcccggggcgtttagaataaaacccacactcagaccctgcctcacaagacccgacatgatttgggtcctcaccactcctctgccctcttctcactttccagccatgggatgacccctctttctcttttcctgcctgagactcccaggaaacctcttcccctacctttttctacataaatcctactctcccgccggctcagttcaaagcttcttcctcagaggttgctctggccactgaaattaaaagaggcctccttctgttcattttactagtggcatcgccatgcagttttccgtgtattacagtcagtttccttgcgtgcgtgtttggcttttcacttgttttccccttgcactgtaaacctctcaagggcaggacactcgctgtcttgaggggcgctgtaatgccagggccaggtccctgctcgtctggcgctcagcccgtgctgctctacacgtgtttgctgaatgaatggagcagtgaaccctcagaaattcgcctccagatgagcgccttggccgtctcggcgtctcctggcctcagaacatcacccttggctctccctcaagggggagctcccaaagcgagaacgtgaccctgtcctgcacccagccctccactccagggcctccgccggtacacatcttcggcctcagcctaacgcactctagcaggcacagaccgccacgcccccacccctccagacggaaggactgcaatccccacaaggcaccgcgactcagcgccacccgattggtgaagcctctggcgtcggccaataggacgtggctttgttggcgtgtgccgcggccgcgcgagtcctggaaagcgttgttggcccggttgctctggagccgggtctcgggtctggtggctgccggccctgcggcatctcgccatggggagcacggagagcagcgagggccgcagggtgtccttcggagtggacgaggaggagcgggtccgggtgctgcagggtgtccgggtgagcggcgccgcctgggccggggcgggcgtggaggccgcgggcgcgggggggaggtgcggggcggagcgcagg

SEQ ID NO: 30454 - DNA, 2300 bp, Homo sapien
gctgggaaacaggctcatactcaatatgtgtgcttcagaattgttctaaatttccgtgcgaaaggggagactctgccaatactgaagaagggaaaactcaagccatcctttacccccaactcctgccatcaagaagaagagtgtgtttggtttaatgtccagatgagaagatcgttggtctcaggtgagcagtgagcatgtaatctgtgtgctgagtgaggagtgcgaggggctaactcagtgggtgtggtagctgtcactgtcttgggatcttccctggagcaagggataaaaagatgggataaatgcttttcaaatatgtctaaaaatatttggccaacaggtgttgattaaagaagaggaaaaaaaaggacttaacaattattcagctcttatgaggtgccaggagcttttcacacttgatgctgttagtcctttccccagtatagatagagaaactgaggctcagagaggcaaggcggctctgccagggccacacacttagcaaggttcagaattgggattcaaaacgaggtctctctggctgtaagtatctaatggaatagttaatgtatatgatggcttatctaggacttattgtaggctgttgaatgaatatctcctgtctcttcctctctccagaaccttactgccttttcttattctaagttagccttatccaggggtggtgtccatggttcagcaatggcagagcaccttcatctgcaggcttggtgggcgccgtctctaccatctccataacatcccactcagtgccagttatccagtagctgcttttgaatatttgtggaatagatgatgaaagctggcaagatccttcctgcaaacttgtgctgcttgtttcctgcttaaacctctcagattctgagccgtgaagtcctcagggcctgttttacaaaggaagaatggtattctttcttgcctttgccaagaggaagatacaggaagactggagagtcttttggttcttagaattgctgccatcttcatgtgtcattgtgctttacttcctctttccactttgtagcatctttggaaacaggactcaagtaatgcctcctggtggtctgacccagagaaagggggagggctggtgtgggaccagaaattattagagccagctgagttagggccaccacaccccttttcagaaggagaagggaccacaagaggggaatttctcccccagccaaggtctacagatatggaaagggtggggaggacctcacattagccccttgccttcacagtcatcactttgggttatgcacttggcagatacagccctcgtattgtgctagatgctccccaagtggctaagaaagttacgggaaggaatgaggcacatagtgacacagtattcataggcagtaggaagtagtctgttgcatgtgtgcatgcatgtgcccacatgccacttgcatgcacatgcacacacacatgtacatgcacatgtgcacatgctcatacatatgtctctcagcgctcaaagcagagtaaaagccctgtactctaaggacttgttagttaaggagccatattagggagacagtttccttccgaagttgggggtacatttcatatactgtgactggctccaaccccttcaggacaccttgcctccttccttggcacgggtacagacactcagctctttccagaaactcaatacctccctgaaagacagaagatttgccacttctaaagatctgcataaatgtgttaaatttgaaaacagtttctaaacaatattttgaacaagagcagctttgttagaatcattcacacagtgctttgcacgcgatatgtctttgatggagacctactgggaagcagtgtggcgagtgggaagaatgtgggcttcgcaactatgtagacctacgaaagtccagccttgctgtctgatagctatgccatcttgagttcagggcccttgtctagcatccactcaatacttagtggtataataatgatgagtccttggagaataaatatacaacctctcgagaagattgttgaaaattacagcactgtatttgctggcctgtgttttgcttttgttagaattaccaataacgtggccgggcgcggtggctcacgcctgtaatcccagcactttgggaggccgaggcgggcggatcacgaggtcaggagatcgagaccatcccggctaaaacggtgaaaccccgtctctactaaaactacaaaaaatagccgggcgtagtggcgggcgcctgtagtcctagctacttgggaggctgaggcaggagaatggcgtg

SEQ ID NO: 30455 - DNA, 2300 bp, Homo sapien
attcattcgctcactcacggggatttattgagtcttcctgggtccctggcttggcttggggatgcagtggcaaccacccagagccaggccctgctctcacagggcagccattctggccgggagaatgggagcaataagtaatagagacccttcacgagtcctgtgctgcagatgagaacagggtgactgagcagggcggggagtggagacaggggcacagaggcctgggggaggggcaggcagccccacactgcatgtgggcaccaggcacagaggctgatgggactgtgcccagctccctggtagacttggagaaggcatccatcttcaggcctcagcttccccatctgtaaaatggggccagaccatacaaggggtgtctgggatggtctgtgcaaactggctggctgaggcttgaactcaagactcaggactcagccttgctgtagccggctccagccaggagtgggtgagaggccccagcacatcaggcacatccagggcagcaggccctactgacaaccaagggggtggcactgctgactatgccttgtgggcaggtgtgccctttcctctttcatccatgagaaaagagctttcatgccccttttgcaaatggggaaactgaggctaggaaaagggagtgtccccatcagagtcatctgcctacagagtaacagggtctagatttagcccagtgcttggctgccagttgctaggcagggtgtggtgagacttttccagaggcagtggaggccaggacaggatatggggactcccgccaggatctgggcagcgctgacctcgtgtgcaggtcagaagagtggccttagcctctgcatagggacctggctgtaggtggttgtgggtggagggagccgagtaccctggcaatccaggaaggaggggtgggcattttgtggagtttggggtggagtcaatggaccttggtagtgagtgtgaccaggaagtgagggcccgatgtggagcaaggcaggagggggccacacaggtctgggtgggtatggggtgctgaggctgggaaggggtcactgtggaggggtggagtgcagggagcacctgccagccttccctgtggaggaattcctctttccttggagttgggtgtgaggctgggagcaggactggtggcttggatagagtgctgagagtcagggctggtgggccagggagcctgggaaggggccgtgtggcggggcacccgtcggctggggtggggatgtgggtgggacacattgcctggcttctggactgcaggtctcaaggtttatccagcatggggcttggggtcccaccgagagcagcccaggctgccacctatccacagtgagaactgctgcctgtgtggcctgggcctccatgtcctccgtggtgcctctgctgtgggctgtcagggcgtgttcgggggagaggcagggctgtggaggtgggagtgagcactaaagcccatctatgtcaagcttctgtaggggacggtggtggagtatgtccccaccagcctcaggcagggagctggtgcccaccctgggagtacagagctgtggggagggtcctgctccccagtgcatagggaggctctgggtgaaggctgctctccaggttggtgtcagatgttggtgtcagctggggtcccattccacacctcaggcccttgtcacctgccttcctgttcctggcctccgccagtgatggcagggcacaggtgccaacggagtgacctcttgccaggtgtcctggggatacctggtgcaccccacagcttatagggcctcaggccagggaggtgcccagtttgcccctggctcctcctggtgggtcaggttctgcctcctggaggtgcagtgggcacgcccagcactggaagggctcacactgggagatcataatatcatgggatgggccatgcctgcattcacatgccctcttctgccccttccccagggctgaagctcctggcaccatgatgctcaccccagcaggaccagagcaccgaggcccaaggccccagcctgccatgccgctgccaccgcggagcctgcaggtgctcctgctgctgctgctgttgctgctgctgctgccgggcatgtgggctgaggcaggcttgcccagggcaggcgggggttcacagccccccttccgcaccttctcggccagcgactggggcctcacccacctagtggtgcatgagcagacaggcgaggtgtatgtgggcgcagtgaaccgcatctataagctgtcggggaacctgacactgctgcgggcccacgtcacgggccctg

SEQ ID NO: 30456 - DNA, 2300 bp, Homo sapien
ggggccagcttcagccagcgcagagtgtggccccacagggtattataagcagagagggtggcagtggggcactgtggaggggttgtctttaggccggatcagacattccatggagagccggggacatttgggacaggcgctgagggatgtgtgggcagtggagggagggagagggaggccagtcttggccaagggagccataggaaggggacacagggaggagggaggcaggggtgaccatttgggtgggagtggtgcaggtacaaggggtgcgggctgtgtgttgggggcttcacagcccatgcccatgaccccagcccaccctcgttgttagtggggtaccagtgtcgggggcaggcaggggccaggagctgttagatctccttaggtcatcactgccctcctccagttctaggaggacccctatatatgcaagggaggacacgtactgggcgcaaggacatggcctgaggctgagaggcgcagacagacatgctggagctgggcgccccctggatgggactgagatgggcctagggctgtttccatccacataactggccagtgactttttgtttttgccaccatatctggggtttttttgtttttgtcttttttaagatagatgttattgtttagagcagttccagattcatagtaaaattgaacagaaggtacagaggtttcccatgcgcccgctgctcccacacatgcacagtctccccactgtcagcatccctaggagaggggtgcatttggtccagtcagtgaacctgccaggagacatcttcaccacccagtgcccctcgtttctgtgcgggctcactcttggtgctctgcattctgtgagtttggatgaacgtaggatgccatgtatccaccgttatagtgtcacacagaatagtgtcgctgccctaaaaatcccctgagctcacttgtcatctctccctccccctgagcccttggcacccgttgatctcattgtctccataagttatgccttttccagatgtcatgtagtggaatcgtgcactgttaccgtagccttttcaaactggctcccttcacttcgtaatctattttgaaggttcctttatttattttcatagcttgttgctcatttctttgtagtgtgccacaaacttaaaaaaatttgttatggtgaaatacacatgacataaaatttaccatcttaaccatttttaagtgcacagttgagtggtattggatgcatttacagcggtgttggccatggccacctgctccatgactcttcatcttgtgaaactgaaactctgtccccattgaacacccactccttgttccttcctccccagcccctggaaccattctactctctgtctctgtgaatctgacagctctagggacctcatatgagtggaatcatgcattgtttgtcctttcgtggctggcttaatttcatcagcttaatggggaagcaatccaggtgtccatcgacagatgaatgaataagcaaaatgtggtctgtgcatacaatgagatagtagtctgccttagaaaggaaggaaattctgacatgctgcaacatggatgaactttgagaacacaaactctttttaaacaacccaaatccttttcattccttgctgtctttagaaacaaaaactttaactagaaaaggaacccatgccattttagcacatgtaaacaacctggaagggaggatggagaagtgcttgtcgtaatgtcatttattgaactgcccatattatccttctatttgaaaagtggcactttttgttgggcagtttttgcacattcctgagtggggctgggaggagtctgaggtcttccttttccccgtcactgcacgagagattgaggctgcgacaagaaaaggactgggccttcctcttccctggcctctgagctcttggaacctcctttgcagcctctaggctggcctggctgaagaagtgggtggagtggggcggggcctgctgcctgggttgagtgtgaatgcccggctcagcctgagccttctctgggtacacctggcttgtatggggcaggtgctttggggtcagctggatctgggttcagatcttggcttctccagtttcttgctgtgtgaccttgggccaatatctgcactgccctgaccttcagagactagctgccgtcctttcactctctgaggccaggcctgggaaccctcggacaggtgtctgactttgggaaaccctcaaaggcttcctgtcacattaatggctctccatccggatctgcaccccttttcctcctccttcgtggctaac

SEQ ID NO: 30457 - DNA, 2300 bp, Homo sapien
tctgctgggctttgggactaaggctgtacttgcctcccaaagagttgggaagtgctgctcatttctccttgccaggaacaccatggctggcactcgacgggtggaggggcaggttgggggtaggcccgggggtcctggctgcagcctcatgccgccacccccgcaggagtgcgctggggagccgctgttcatgctgtactgcgccatcaagcagcagatggagaagggccccattgacgccatcacgggtgaggcacgctactccctgagtgaggacaagctcatccggcagcagattgactacaagacactggtgagcgtggctgccctctgtcctgggtgccctggtgccccccaccccccagttgtggggctgacgctgcccccttgctccaccccgcccgcagaccctgaactgtgtgaaccctgagaatgagaatgcacctgaggtgccggtgaaggggctggactgtgacacggtcacccaggccaaggagaagctgctggacgctgcctacaagggcgtgccctactcccagcggcccaaggccgcggacatggacctgggtgagcgggcggggccacggctgcccggggtgtgtgctggagcagaggggcagggccatggcctagtactgagcttggcggggaaggccaggccagtcctccacaccaggctggtctggagggcagtggaatggcgagtgggctgtccagtcccaggttgggtatagagggtggctgccctgctctgggcagagactctgggaggtggtgggttccagtgcactctgggaggcagtgggctcttggagccctgagggggatactcaggctcatgagaggggcaggtggagccattgagggccagaggggatgggacgggtttggggtggggcccggagtcctgctgcagatgtgactggagaggctgggtccccacagaagcctcggtgccaggctgaggagttggggccctaaggcttgcggaaggcagggcagacccccttaggctggggctgctgtggcagattgggagggctgtggcacattgcaggggactatggcaggttaagtgtgctgcagcaggggcggaggtatgtccctgccctgtgctggtgctgagagctgcaggcaggccccgtcccactacactgctgtgatggaggagggaaagagggccccagcggccccaccctccagctccctcctcccccagagtggcgccagggccgcatggcgcgcatcatcctgcaggacgaggacgtcaccaccaagattgacaacgattggaagaggctgaacacactggctcactaccaggtggctcccggccctccgaccctagcacaggcctccctccccttggggcttccacagcgcagccaccaatgtttgcagcatgtgggctggacagcagctggatctgtcagggagaggaggggaggtggtcacttatgtgtgtggaccgtcccaggactcgagctgggcttgtgggattgcctagcatccctgggctgtcctgatatagagttccagactgagtgaggtggctgcctccaggcacagcactagggtgtcaccggggtccccagccggggagtgggagcctggtggtgcaggggcaccctggtgggtcacagggtccctggccctctgcccacaggtgacagacgggtcctcggtggcactggtgcccaagcagacgtccgcctacaacatctccaactcctccaccttcaccaagtccctcagcagatacggtgaggggccaggcagcgggcgagagggcagcgcatgggtccctggcctgggcaggacgtcccccgggctcccacgctgcagcagccggacgggaggacccaggggcaggtgtcaagcctgtcactcgcactcttggccttaccctccagctctggaggctgcgcctcctcgcgactgtgtgtccgtacacaattatgccacctctgtggtgtcatcggctgccccaaaatcccacatgggtgggggtgccatccccagctttcagatggggaaacaggctcgggcggggggtgcggggtgccagccaacgcgggcgctgacagcctggtgctgcagagagcatgctgcgcacggccagcagccccgacagcctgcgctcgcgcacgcccatgatcacgcccgacctggagagcggcaccaagctgtggcacctggtgaagaaccacgaccacctggaccagcgtgagggtgaccgcggcagcaagatggtctcggagatctacttgacacggctactggccaccaaggtgggcctg

SEQ ID NO: 30458 - DNA, 2300 bp, Homo sapien
aggagggagcagagcctctctggggcgaggtggatgtggtgctccggcctcggccgcgcagagcacgcggtgaatctgaggatggcagcggtgcagcgggcatgggtgctggaggtgggagtcggtggcaacgggcccagaccgacttgagctcctcttgcccggctacgggctttttgcctctttctccagctgccaaccgggccccgggaccctcagactctgccgcctgggggcagcttggaaagctgggaatgctgacacccccagcctcttgtcctggtctcaaggggacagcccaagctggctacccctccccctggagggccctggcctcacccctcagcccctcagaggtcagcccttctcccatgaaggccactgggcagctcttgccaggcaatgaaggtccttggccagcctgagcacccagtgctgtcccggcccctgagcaagcagctgtgtgcgcagctgtggtgtggcaggtaccatcacctccacacaggaagagccgggacccgaccgggtgaggcaggggagggagggccgggcagtcgctgcactgcggcggcccgagcaccaccggacactccacacgcatgcggtgagggctgtcccggtccctgctcagctgtcctcacgctgcatcatgctggatgatcacagctggggctcagctgctcagggccatcgtgtccaccacctgctccagcttgctccgcagccgctgccgccgcgcctgctcatccttctccagggctgccaggatctgcagggccaggagaactgtcagcatgccgggccaccagcctccatgcactcagcaggcccagggcagatgcctccagagtaggtgccagaggttcaaccccatctacccctggccaaaggaccttggttgtgagcctggaccctccaggaccccaatatggagaatgagccctgcccctgtcatcatcctactctcaccccctaaaacagcaggctctgatcccttggctgcctggccatgctgctgacatgtccccacccagtcctcacaccctggggtttctgtgcccctttaaagcagagctccccagagagcctcagctcccctttccctggtgagccccaggaccccaggcttttgtccccactccccaccctaatacatgcagtctctggctgctcctctgctcccctggggcacctgcctgaggacagccctctgcctcctgtctgcctcctgtggcaccctggggaaggttccttgcctctgctgcacctgccctggcctccccagggtggctctggttcactcccgtggccttcttagccctcagagccttggcacaggccgagactgtcctgccctctggccccgtgctcccatcctgtgcggcccaggagccagttctccttcctggatacctcctggaccccgtccccaggtccatgtacgtggcctcactccaagtcagcagaaaagatactgaaaggaaagctctgccaagagcctatgcccagccctggagatgctggcccagactagaaaaccctgaaatgagcccctcagggaagttgctcaccacccacacaccctctgcctcaggaagaagctgccatcccatcttccccacccctgaccccacatggctgcacacagtgactccaccacggccttctctgctcggcctggcaggctccctcctggccccaaggaaccaggtggccagagggtgcagaggagtgaaggtggtcagtggcagcccagagattcagggaggagtggcagggcggggcagagcaggtgactctggcaggggccggcaagccctcctagcccagcctgtgggctcccacggtgttcacctcatccttgtacttggtgatgtaggagtagatctcgtgcaaggcgctcatgctgttgaactggctcaggtgcaggcgggactgctcagccagatacgcactcatgtcctggtcgctgatggctggcatcttggcgatgtctgcatagtacctgcaggtgagtggccaggtgggcacatgagcagagtccaggctgcccccgggcccctgcccccgacccctgcaccctccacctacctctccacccagctcttgtagttggggatgtccttggcgtagagcagcttgttggagggtgagtccttgcccagcttgtgctcagaggtggagcaggagtccatgaaggtctgggccaccaccgacaagcaggcgtccgtgatgctgttcttgtgaatgtcgaacacaaactgtgggttcttgatcacgttcacccagaagcgcagggg

SEQ ID NO: 30459 - DNA, 2300 bp, Homo sapien
ggtgattaaaactgaagaaataaattaatcttcaaattgaaaggtcataccaagtgtgtagcagaacaaaccaccacataataaaaacaaatcataattacattccaaggacatgtcaaaatatgaaaggatgaagaaaaatttatattagttgcatgggaaaagaaactatttataaagaaagattctgataaaaattacagttctcagcaacaaaagaggggcaataggttaattacacattattttcaaagtgctaagatcaagtaactctgaacctagaattctatacccagccaaattgtcaatcaaaattgagaatgaactatgtttttgcatataaaaactttccaaattttcctatgtacagatcttcatagagtgactaacaatacaaattatagaattatatgaattatatattatagaaatatagaatcaaaattttaaaggaaattaagaaagaaattgtgtaagtcaaaatgcaacagtgaacacagtcattagtgaaagctgttagtaagtctaaataagtatgggttaaaaaatgatataacaagatcaaggtaatattcccaacattaatataggatgttaatataggggaaatatgaaaggataatttttaaattgtgctaagaatattgtattcatgtagggagaatatagctattgatttgctaatttaaggaaaacaaatatgaatgaagtaaagttatttattgaaagataagtactgaccaggccccttggttcatgtctgcaatcccagcactttgggaggccgaggtgggaggattgcttgcacccaggagtttgaggctgcagtgaactatgattgttccactgcactccagctggggcaacagagggaaaccctgtctcaaacaaacaaatttaaaaaaagatgaatactgacagtaatgcgaacaactcaacaaaaaccatgtatggtaagggtggtctcagacaaaatatgattcaaggcaagaaccattctgaagaaccaaggaaagtgtattgggcaaggttcccgtgtggaacattcaagtggttaattgaagaacactgaatgttaatgcatggactattttcagaggcctgggaaaaggtaaggaaagcaagaaggaatgtcaaagtctgtggacaataaggggtcatgaccattctgggctgaacggcagggaaggcgcaatgtcatcagcacccagaggcagctggggctctcagagagaagtgactgctgctggtcatctgagacaatcagttgtgttgtatacattttataatgtctactttggggcttcttgtgaccttctggataagcaactggattttctgggtcctgttgattgcattaacgtgggtatccccaggtggtgtgaggatgaaatgagcaaatgcgtgagaggtgctcagaacagaacctagcacagaggaagctccccttaaacgttagggtataggggtactgggagctgcatacccgaatgaccgcactcaaaggagcatgcacattcagaacatttgacttctcttcctgtgggatggcccagttgtttaagcttcggacccagcaaacgcaggatctgccccagctgagcacactgctctgcttctgatgaaaactctgcaatggctcgcgttgctcccgggacagagaccaacctcttttgccccatccacaaggccttggaaggcggaaggcctcccctctggccctgtgggcctcctgtctcctccctcgtcagctccactcccccagcactgctggggcccatccagcgtgcagactccaccgaaagctaccgcctgcaggactcctccccaatgcctcccatccgagaggggaacgtcttcataccctggtaacacctctgcgctgttggcgtagccctcaatacaattgagttccacctcatttctgggataagcagctgacccaatcaaccccaccggcgtctacacctcggaaactgattgagtcctgggacctcttccgaccaccgccaggagcccaggccccgccccgcggctgcgcgcattcccgtaaaagcccggtggactgcgctcctgggccgcttggaatctgaggcctccagtggtctcctgccgccacctggaccggggacagtaacgcctagggagccccaagacctcttgagagagcatttcagctctgttgacaaacctcaaccacttgagggacttcgctggaaagaaacgttctagaaagaccaagtgggtaagtagcgagaaagaacaaagttagccttatgggatggctgagggggtggggc

SEQ ID NO: 30460 - DNA, 2300 bp, Homo sapien
agccctggggagtggagcctgcatggtctcctgagcatcactgcagtgttgctcttcctacctccagggagatcctgagagagcccgagtgtgcccggtgtggatctcagccccactgctttggagctgggagactctaacacacaacttaacccgagtctccatttctgcacttgcaaaatggtgataataatcccctcttcttagagccgcggccaggatcgatggagataatagatgagaaaatacttggctggggcaaaagtgcagtctcggcaagagtgttcttccccagcacccctcccatctgatgcaggacttaatgagagctggctgctccctgggatctttaattaattgtcccagccccacagccccagtgctagcagattaaacccagccacggtggggagtaggctgcggacagctttggatgcaaatgcctgaagcgaaggatttctgcctgtgaaatggctgagtgggtgattttagagcagctgcgcccggggctgcccccagggagatgagcctccgagccctcagcagaatcagtgcagccagagggtgcccttttcttaccaactcatctccggtgcctgtggggtgggaacctcggcctgccagctccagccccagccccagccccagccccagctccagcgtgccttggccagccccagaaacaggagggaggatgcaggcagatcagttccacagtgacctagaggtaaccatccaggtgccctccaggttccccagctgtttcgttcccgaggcggtgctccgcccgccctctgccctccagctcctcctgcatcagacctcggcctagcctttgctgtccccatggcttgggatactgtttcctggctgtcacagcagggctgtgtcctctgcagcctccagggctccatgtgagtgtctgtcctcgagggacatccttctggacacccccaggctgctctctgcctcgcctgcacagctcctgcagcagagcctggaaagctccctctgacttggtgttttgtcacctcgcccgctggttatcagccccatggaagcctggtgtcggtgcctgggaccagctacaggggctctcaggagggcctggaccgggtctggggcagggagggaggagcaggagcaggcagaggagacaccgagcttcactgctggcacaaggacagccaggactccctttgggcctgggactggagtagaccagagctgtcctgagcagggggttgtccaggcctgtgtggctcagtcataggacatgggcctggggaggatggcacaggggtgctgtctgtctgcaactgggggtgatgctgagcacgtctggttacagcccctagcagctgggcagtgtatccttccatgaagcaggtctgaggcacatccctgcatctgccacagaggtaagtgccttcacctctaagtagacaaagcacttgtaacacagtgggcgcttagttactctttggctggctgtacaggatctagtccctactaagcaccccaattctgataacttttggttgtccatgtctgagtccctgttctgcaggaaacggcacccacactatggagcccagggtcctgtgctgggagcttcccgcagcctctgtgcctcctcctccccactggccagggggtcccactgtgtctattatggatgaagaggtgaaggtgtgggccccaggacgtggtgctccaacctctgtgctcactgccatgctcagcatggctccctgggagcctgaccctgaggtgtggcatggacgaaccctgggctgggcttcctccctttgcccctggcctttacccagcacgagcacctctgggaaacaccccaacccccaggacagtctgagttcctgcacccttcagcccgggcttgcctgaagatggctgtgtctttcagcacctgcatcttcagtgactccccagactccccgcagtccccactccccacctccctgggcccacggtatgcagccacacccaaggcagcccaagtcccagtagcaacaccacacattcccagaacgcttacgctgggccaaattcagcctgtgcctctccacagccaatcctgcacttgccggcccctaactctgtagctgcacacagggcctgggcacttgagacctcagactcgccaccggctcctcagagcccctgcccaggtcacctgtgtaaggagaacacagtgccaatgcagcacagcatagtgacacccggcctgccgggatttagcccccaccctacctagcggttctggagctgccactgtg

SEQ ID NO: 30461 - DNA, 2300 bp, Homo sapien
gagtctgtgaacactcactcattcattctataaatatttattgagtgcaataacaacagaaagccttgaacatcttcagcaattttcagcagtttcccgacctgggaggcaacagtaacatcctacttccctgaaagctggcagtaaactccaagtcccaacttttgatgttccagcccttccaatggttgtataaacccctgactccctgccctaaacctttttccattgggggcctcgtaaggtggcacctagccccactaacacggcatgtgtgtgtgtgtgtgcacctgcacctgcacctgcacctgcacaggagtcagctagaaagcacaaaggcgaatgtgtcactcctgtggcatgggaccatgaatggcctctgtttgccctctagttctctggctgggaactcagagatgtccctccctgtccaatctcatctcctgccactccccatacttcctccccagcagctccgctccaggacattgataactgtgaatagaagacagtcgttgggagatttcaccgcaatctgaatgaccactcactttttatctccacacaagactgtgagccccttgaggatggaggctcagttgcatttttcttggtaccactagaaatcagcattgaagttggcaaaaagtagggatcagggattttttttttcttaaattcatgagtgaacgctgtctccctggtcaaactgttttcagaggattgagataaggaggcatttgtctgcaggttcccatctccagagcagaggctctgcatgatgtcttcaaagccagattggatccctaccccggtctggagtgtgagctagagcctcggccctcaccagcatatgctatagcaagggctctgggcagggaggcatcaaaccccaggtgctcagggggactctgctcccctccattttttctagaaatgtaccaggaccccttccctgtgctgggtgctaaggatacagcagcaaacaaaataggctgtccctctgtcttcacgggcacaatattcagccaggctctttgcctcagtgtccccaagtgttaattggagacagtagctcttatattgtgtggttgctgcaagggtaaaatgagttagaagacatcaagggcttagaacggtgcctggcacatagtaagtgctaaatgaatctggctattattagatcatggagcttattattagatcacgggtgagtcagaggatagacaatcagggagtaactaggaccatcttagagtgagctaagtgcctcaggcgagataatgcagaggtgggggacagagtgggtggggaggggagccgccatacagtggccaggaccagctttgcccaagtggtggcaaccgcatgaccacaggaacgatggcgtgagccccgtggcaacctggaggaagggtgtgctgggcaggggagggcggtgcaaagaccccaagaaagagagtctggcccattggccagcacggctggagtgtggggacagggcaggggtgtgcgggggagactggagtcccaggagaggccaggttgcagggcattgagggccagaggaggcacctgggcctgttccattcccaaccctcaggatggcccacccattacccacagctgcacgtgaacgtcctttggcgctggcctccagggtggggaaaccaggttcctgcagagaggggcagatctgagtgtcccccgccctcgcctgggtgcactcagggtcaggcctggtgcccgcagagtccatcccatgcctcattacccccggctggctgaggcccaccctgggctcctggtgggtgggggcacttctgtgagctccaccactgtgtctgtgagcccaaccccgaccagccccctccagcttctggggcctgcaaggaggaggaaggccagggtagagggaatggagagagactgttccatgcagaggggtgagccaccttctgcggtggaggccaggagcaaggatatgctctgagcctggtctggggcccctcccccacttcccacctcccagctcttccctcctagagacaccttctttgtctgcagaggccactgctttgattctgttgttgctaggtgatgggaactggggggagcaaagagtggggaactgggcagggtctggcggggctgtggtgggggaagctgaagcatgaaggctcgaggagcacacagacacctacacacagctccgcgggcatgtggggacccagacccacccccacagcagacacccccacagagcactcatggcccccacagaaatacacccacactca

SEQ ID NO: 30462 - DNA, 2300 bp, Homo sapien
ttgccctttctgtccacagtatcaacgcaagagccctccctaagtaacgtcctgcatgttcacctccaactcagggtctcttcccaaccctagcctgcgacggggccaccttcatagctggctttcttcttcattgtgttctgtatctgacatttcttctctcacctggctggctgtgcatcgtgggtcttctgccctgggacatgggctccgtggggcagtgctgtgtcagagtacccctgccatgcccctggcacctctgtcacctgctacatgaagggacagataaaccggcaggtgtctactctcaggctctggtcgagatgcaggctgaacttctgggatgcctagggaagcaggacccttgggcaggaccccggtcacaggacttggatctgcagcaggcctgcatctacacacatgataaaatgacatagaattcaacatgtgcattgtatcaatgtcaatgtcctggcttcagtattgaatagctacataagatgttaccactgggggagactggatgaagacatcaaaggacttctttatattatcgttgcaacttcctatacatctgtggttatttcaaaatttaaaaattaagcaaataaggttaggatgcaaaattatattctttattttgattgcatccctatgtattcataagaataatgatcaagagagtccaaagaattgtatttagaatttttttaagttaatggtgaaggtattgtttttgttatttataattttattcacctttctaataaataattattgggggaaaaactagttccatgtgatataaatatatatgagagtctgtgaacactcactcattcattctataaatatttattgagtgcaataacaacagaaagccttgaacatcttcagcaattttcagcagtttcccgacctgggaggcaacagtaacatcctacttccctgaaagctggcagtaaactccaagtcccaacttttgatgttccagcccttccaatggttgtataaacccctgactccctgccctaaacctttttccattgggggcctcgtaaggtggcacctagccccactaacacggcatgtgtgtgtgtgtgtgcacctgcacctgcacctgcacctgcacaggagtcagctagaaagcacaaaggcgaatgtgtcactcctgtggcatgggaccatgaatggcctctgtttgccctctagttctctggctgggaactcagagatgtccctccctgtccaatctcatctcctgccactccccatacttcctccccagcagctccgctccaggacattgataactgtgaatagaagacagtcgttgggagatttcaccgcaatctgaatgaccactcactttttatctccacacaagactgtgagccccttgaggatggaggctcagttgcatttttcttggtaccactagaaatcagcattgaagttggcaaaaagtagggatcagggattttttttttcttaaattcatgagtgaacgctgtctccctggtcaaactgttttcagaggattgagataaggaggcatttgtctgcaggttcccatctccagagcagaggctctgcatgatgtcttcaaagccagattggatccctaccccggtctggagtgtgagctagagcctcggccctcaccagcatatgctatagcaagggctctgggcagggaggcatcaaaccccaggtgctcagggggactctgctcccctccattttttctagaaatgtaccaggaccccttccctgtgctgggtgctaaggatacagcagcaaacaaaataggctgtccctctgtcttcacgggcacaatattcagccaggctctttgcctcagtgtccccaagtgttaattggagacagtagctcttatattgtgtggttgctgcaagggtaaaatgagttagaagacatcaagggcttagaacggtgcctggcacatagtaagtgctaaatgaatctggctattattagatcatggagcttattattagatcacgggtgagtcagaggatagacaatcagggagtaactaggaccatcttagagtgagctaagtgcctcaggcgagataatgcagaggtgggggacagagtgggtggggaggggagccgccatacagtggccaggaccagctttgcccaagtggtggcaaccgcatgaccacaggaacgatggcgtgagccccgtggcaacctggaggaagggtgtgctgggcaggggagggcggtgcaaagaccccaagaaagagagtctggcccattggccagcac

SEQ ID NO: 30463 - DNA, 2300 bp, Homo sapien
gtagagatggggttttggcatgttggccaggcttgtcttgaactcctgaccgcaagtgattcgcctgccttggcctcccaaagtgctgggattactggcatgagcctccgcacccggccaatttttgtattttttgtagagatgaggtcttgctatgttgcccaggctggtctggaactcctgagctcaagcagtcctccctcctcagcctcccaaagtgttgggattgcaagtgtgagtcactacaccctgctgtccttactgtttagatggggacttgatcccagagccagtgagtggcccactggagcaacctgagccccagcccatggcccgcccccttcagagtcttccctccctttcatccagaggtgttctggtgtttaagggcttggaccagcaatggaaatattcctaagtccccccacccctgtcttgggctgctattgttcagggatagctttggtgacaacacaagcagggctcctgttgcgtttctgcagaccttgctgacaggcatgcagctcactgggcggctccttgctgaaggggaggcctgggcctttgatgtgttgtcgggacaaatcttttttctttttcttttttttttttttttgagatggagtctcgctctgtcgcccaggctggagcacagtggcaccatctcggctcactgcaagctccgccacctgggttcatgcaattcttctgcctcagcctcctgagtagctgggactataggcacatgccaccatgcccaactaatttttttttttttttgtattttagtagagatggggtttcaccatgttgtctaggctggtcccgaactcctgagctcaggcaatctgcccgcctcggcctcccaaagtgctaggattacaggcatgagccaccgcgcccggccacatcttttttactttttaaaatttactgaagtacacctatgacttaggagtcatcggtgtgtggcttgatgaattaccacacagtgaacacacctgtgtacccaccacctggatctgacacccagacgctggcaggcctcccccaattaccatgcgcttcatctccccaaaggcgccctgtctgcatttctccacggatcatacgcctgtcggcccttgtgcctggcttcacgctatatcacttctgagagtcattcgtgttgcctgtagcagtgggttgttctttttatgctgtgcaagtgtcaaccgtaggaacctgccaccatttatgcccatgctctggggctgctccccgcctggggctgtcatccacagcctttacaagcattcctggtgaagcagagtcacaggcatctggcccaatctgttcaaatcattctaaatgttggcatctgttacgttctggtgccccaggccacacctggatcaccccgaactccctgcggaagtacctgttgctgcctcctgagagtcctctagcttaggagtcttggttttccgaccagaccctcagtcccctaaccccagagtggttcccaggaccccagaccaccagctctcctgtcttccaggctagactcgacctctcatgctcagagtgtcatgtggacctctggcctatggacccaccctgtccctggcttcaccctgcagcgtggccattgcagacacacttgccttgcccctctgtggtacagcctcttcccccatgcccatctccagttggagacctcctgtgcatcttctaggcatggctcagtgtcccctccatctttgtctgtggtggcagagggagacaagggccagagggtgcaaccgaggagggcatggtgctcagctctggccctcagcagcgctgtggcctcacacaagtcagtggcctctgagttctgcatggtgtggcaggtcagaaccatggctgaccgctaccaagaactcctcacgtgtgtgccttgtttgaggcactcggcatcaccacagcctcacttgttacacccattccatggtggggggacacaggcacggagaggacaggaaggaaggggcagggctgggctgtgaacccagagcctatgctcttacccacgctgctctcatgggccctcaggactgaaaggagccaagtggctgtgccttgcacatggagatgcttagctgagggggtggctttgttagactatttgcaggtcgtgagatagagcctgagatgggggactgggcccctgcctgggggattgggtcgtgacctgtgtggagccccacactgagctgcagtgggtggggagggtggtttacaggggtgctctgtgcagcccctctgattttcccctg

SEQ ID NO: 30464 - DNA, 2300 bp, Homo sapien
tggatcatgaggtcaggagatcgagaccatcctggctaacaaggtgaaaccccgtctctactaaaaatacaaaaaattagccgggcgcggtggcgggcgcctgtagtcccagctactcgggaggctgaggcaggagaatggcgtgaacccgggaagcggagcttgcagtgagccgagattgcgccactgcagtccgcagtccgacctgggcgacagagcgagactccgtctcaaaaaaaaaaaaaaaaaaaaaaaaaaaaacagcatgttgctccacaccgcctcgtgttgtgtgtcggcgcgctcgcagggttcgaaccgatacaagaaccttacagagggtagttattaggcctggtcacacatgtcccatgacttctacttcctggcacatggtagggtggcagtttcctgccctctggaggctagaagcggtggccaattgaatgtgcgtgagagtgatgtgtataactttctgggaggaacttgaggagccactggattccccacggctcattgtggctgtggtcattcgtgattacgcaggccggcattgcccagcctctctggcgaatatagaagcctaaacttaggtatgcacatttgggtgtggtccaggctgggaaagtcccagaggatcacaaggtggtttcttccccaatctccctgtgtttttaggacaggagcaaggagaagaatgggacccaatctcattccagcccagcggtgctgtcgcaaggtgtgagtcttggggtgcctgtaataactgagtgcctacaatctgcacgaggctctgagtcagcctcaggatgctgcaggggacatcctgcagcttggctctcttggctccatcctcatgacgctggaattctataatagggtggggagactggacggggaggcaggtaaatgaaaacaatcaggtgagaattaagatgctcggaaggaaatgagactggacagccgctccagcgagggtgtccacaaaaccctctagaggacatgatgtggcaaggagccagctctgcgggggaacaggtgtagagccaggagcaggaacaagcttggaacagccgagggacagaaacagagacccgcatggcttgagtatggtgaatgcagcatcgatgccaggggataagacaggcgcaatcagggagggctttccagaggaacaggcgtgaagaactgtggaagttagagttggggagaggcgtcctggctgtgtcgcttcctcattgcgcggctttggtcaagttatttgacctctccaagcctcaggtggccctgtaaaaggtgactataatgactgcctagcagggttgctaagaggagtgcccgaggcatggcggcgccgcgtggagcagggcgctgggaggcggcggccctgcggcgtggcgcggctggagcgcgtggcgccggggagggtccccgacacgccttcccccaagctgaccccaggtcacccctgcagggcgcccgaagcgcccgcacgcgagggggcggtccccggaggctccgccccgacggtccggccgcggcccaggccgggaggtggagcgcggctgccgccagctggtccactgacaactgctgccagctggaaggcgcgtagggcgagaggtggcgcgtcctcagctttccagtcttcgattccgcccgctttccgagtgagaaacgcaggcctctctcttccgtgaagcagcgtcttgtctctgcacctcctctgtgctgtctctttaagaggtcagcgggctgctccgcctcttgggaatttgattggtctctcccacttttttttttttttcccccagtgatgacttattcctataggctgctggaggttagagggcgggcctgagtgataacagggactctgggactctgggacttgtgggactgtggccgttttcgcaatttgggctggacgaaaaagacggtcttgctttcccggtcgccgctgtcgggaagggctgcagggtgtccgcgagacccgcggcccggcgagctgaccccgcctcgcctttcctgcctagccctcattccacggagccggtcgcgcccggtccttgcgcgacgcttcccggcccaggccgcctggtctggcgctggaggccggagtcccgcggcctgtgctggatccgcgcacacccagtggcggcggatgggcggccggggcggccggggcggccggtcctgagcgcggcccgggctgtcaggtaaggaggggccttctccccgtctcctgccgcagctagagggggagccccgtccctcgccccggcgggaagcccagccgc

SEQ ID NO: 30465 - DNA, 2300 bp, Homo sapien
gtgtgtagtggatactgcagtgaattagccactgcctcagctctcaaaggcagatacctttggttatttcacaaatacaacaaaatcccacagaaacttagatatggggttcaaaactcaagagaagaaaatgcagaattctccaagtctcaaaaggcagaaaaataaaaatagagggtttaagattcttcctggggcctgaaagcttaagatgaataactcctcccttctcaggcccagttccaaggtgcaaggctacttgtgccagcaagatagcagaagcaggacaagagctggctggaagacacctaccgtggtgggaagacatgtacccgtgaagatcgagaaagagtccatccgggtacaacgtagcagttacgtcagactaggacacttcctgtttacaggagactataaaacctttgccgcgtcctcacttggggctgatgccattttaggcctcagcccacctgcacccaggcgctcattaaaacagcatgttgcggccgggcgcggtggctcacgcctgtaatcccagcactttgggaggccgaggcgggtggatcatgaggtcaggagatcgagaccatcctggctaacaaggtgaaaccccgtctctactaaaaatacaaaaaattagccgggcgcggtggcgggcgcctgtagtcccagctactcgggaggctgaggcaggagaatggcgtgaacccgggaagcggagcttgcagtgagccgagattgcgccactgcagtccgcagtccgacctgggcgacagagcgagactccgtctcaaaaaaaaaaaaaaaaaaaaaaaaaaaaacagcatgttgctccacaccgcctcgtgttgtgtgtcggcgcgctcgcagggttcgaaccgatacaagaaccttacagagggtagttattaggcctggtcacacatgtcccatgacttctacttcctggcacatggtagggtggcagtttcctgccctctggaggctagaagcggtggccaattgaatgtgcgtgagagtgatgtgtataactttctgggaggaacttgaggagccactggattccccacggctcattgtggctgtggtcattcgtgattacgcaggccggcattgcccagcctctctggcgaatatagaagcctaaacttaggtatgcacatttgggtgtggtccaggctgggaaagtcccagaggatcacaaggtggtttcttccccaatctccctgtgtttttaggacaggagcaaggagaagaatgggacccaatctcattccagcccagcggtgctgtcgcaaggtgtgagtcttggggtgcctgtaataactgagtgcctacaatctgcacgaggctctgagtcagcctcaggatgctgcaggggacatcctgcagcttggctctcttggctccatcctcatgacgctggaattctataatagggtggggagactggacggggaggcaggtaaatgaaaacaatcaggtgagaattaagatgctcggaaggaaatgagactggacagccgctccagcgagggtgtccacaaaaccctctagaggacatgatgtggcaaggagccagctctgcgggggaacaggtgtagagccaggagcaggaacaagcttggaacagccgagggacagaaacagagacccgcatggcttgagtatggtgaatgcagcatcgatgccaggggataagacaggcgcaatcagggagggctttccagaggaacaggcgtgaagaactgtggaagttagagttggggagaggcgtcctggctgtgtcgcttcctcattgcgcggctttggtcaagttatttgacctctccaagcctcaggtggccctgtaaaaggtgactataatgactgcctagcagggttgctaagaggagtgcccgaggcatggcggcgccgcgtggagcagggcgctgggaggcggcggccctgcggcgtggcgcggctggagcgcgtggcgccggggagggtccccgacacgccttcccccaagctgaccccaggtcacccctgcagggcgcccgaagcgcccgcacgcgagggggcggtccccggaggctccgccccgacggtccggccgcggcccaggccgggaggtggagcgcggctgccgccagctggtccactgacaactgctgccagctggaaggcgcgtagggcgagaggtggcgcgtcctcagctttccagtcttcgattccgcccgctttccgagtgagaaacgcaggcctctctcttccgtgaagcagcgtcttgtctctgcacctcctctgtgctgtctctt

SEQ ID NO: 30466 - DNA, 2300 bp, Homo sapien
ctcaggtgatccacctgcctcagcctcccaaagtgctgggattacaggtgtgagccaccatgcctggccatcccaggataattttttatgcagcaatagataacacaagcccatgcagagtctcttcagctttcctgtcagcagctcctagcatccgaggtgcatccttcacatcctttgttggtgtctcttaactgttggggtttcccaggtcccaggcttagaccttctcatctccctgcactcactctggattatacaaccactcccaaggcaatctacagcttcagtccaaacacgcccttgagtcccatacatggatatccaacagcttcctggatatgtcccctcggcccaaattcagcacagccagaaacaaactcatcttcttcccccttaaattgctggtcttcctgtgcgctcctatctcagctatcatccacctagctaagccaggatcctggtgtcatcctgcatgcctcttttgctgtcctcaatcaccaacacctatagaccccacttcctggccgggcgtggtggctcacgcctgtaatcctagcactatgggaggccaaggcaggcggatccacttgtcaggagttggagaccagcctagctaacaatggtgaaatcccatctctactaaaaatacaaaaattaaccgggcacaatggcgtgcatctctaatcccagctactcgggaggctaaggcacgagaatcgcttgaacttgggaggtggaggttgcagtgagctgaggttgcaccactgcactccagcctgggtgacagagtgactctgtctcaaaaaaaaaaaaaagattccacctcctaaacatcttgtatttccagttctctccatcactcctgcctccctaccctgggtcccaggcagagatgcttgttcactgcacaaagtgcctggctaagagggttgcgattcagccctgcctctgctcactaaggctgcctggaactagacaagaaccacagcaacctcctcgtttgctgccttcaacctcgttcaatccacttccacctggtagcagccagagggattctaaaacccacactagttcacgtctcaccctgctcaaaatgcttccatggccttccattgctttcagaatacagaatagtcaaactctctagaaaaacatctagctcttttttgatccggattttctctccctcaagtcttgtctgttgcccggcatcataagctcctagggttagttcttagggaggggcttgcacatccgggccctgccatgacctctgcagctttgcacatggcatccttctatctgtaacatcctccctgcgtcttcgctcccctgggcaaagataactcctactaaagcctcagatgtgacctcctacaaaatcccagagttgtccagctgcttgaagtattgagcctttgagctttgggagaagttaaaccattgtgctcctaagacggtaagaagcgtcagaaaaccaggctctgaacctctgctgtctttttttttttttgagacggagtctcactctgtcacccaggctggagtgcagtggcgggatctcggctcaccgcaacctccacctcccaggttcaagcgattcttctgcctcagcctcccgagtagctgggattacaggcccgtgccaccatgcccaactaatttttgtatttttagtaaagactgggtttcaccatgttagtcaggctggtctcgaactcctgagcttgtgatccgcccacctcggcttcccaaagtgctgggattacaggcgtgagccaccgcgcccggcctctgttgtcttgtcagcaaaatggccctggtgtgaccgaggtcacgcagccagcaagtgtcgtcgggtcccctggagcctcagcttctacctccgctccagctcccaccacagcgcaggcgagcgcacgcgcacagcgccgggccgcacacctccgggctctgggcggagcgcctcgggcgttgtaggcgggaccggaccctctggcccgcccctccgtgtcccttctggtcgccagtggacgccgacgtcatgacgtcgcgttccgtagggctcttcccgggctttggtgggtcacgtgaaccacttttcgcgcgaaacctggttgttgctgtagtggcggagaggatcgtggtactgctatggcggtgagcgcgctggcgcgtggcgggcgggcgccggggacatgggtgcggaggctgcgcgcttcccgtactctggccccggcccagggcggcgctctgggtgaggctgggccccaggctctggggcgcagctactttct

SEQ ID NO: 30467 - DNA, 2300 bp, Homo sapien
ttcctcatctttcagatggaatgacagtgtctcctcctcagggaagagagcactgcagggaagagagcacagtgctttgcactcgctgggtgccttattaaggcattacttctcttcagtatctgaaggaagataatgtggaaaatgtgtgtctgatggtcttagagtagctcaaagggttgagacagtgggtggccatttcagagggctggtttggctgactgtgcatggaagccaggacatcaggttgttgaaggcggcatagtcagagatggggaaagtacagggagaattccagccctcacggggagttgggtcagctctctgaagccttttggtctaatgttttgtggttccttgaattattttttcttattgggcgcatagaagctgtctggagatctacctccccttttgtaattgtggtaaaatacacataacaaaatttaccttttcttttgttttttttttgagacagagtctcactctgttgccaggctggagtgcagtggtgtgatctcggctcactgcaacctccgaaagtgattctcctgcctcagcttcccaagtagctgggactacaggcgcccaccaccgcgcccaagtaatttttgtatttttagtagagacggggtttcaccgtgttagccaggatggtctcgatctcctgacctcgtgatccgcccgcctcagcctcccaaagtgctgggattacaagcatgagctactgccctggcccaaaatttaccatcttaaccttttttgtttgtttgtttgtttgagacggagtttcactcttgttgcccaggctggagtgcagtggtgctatctcggctcactgcaacctctgcctccctggttcaaagtgctaggattacaggcatgagccaccgcacccagcccttttgtttgtttgtttgttttgttttgtttgctagttttttgagacagggtcttactctgtcacccaggctggaatgcagtggcacgaacgtggctcactgcagccttgaactcctgcgctcaagcaatcctcccagctcagcctcctgagtagctaggactataggcatgtgccaccaggcctgggttattttttttttctttttgttttttttgagacggagtctcactctgttgcgaccaggctggagtgcagtggcacaatctctgctcactgcaacctctgcctcccgggttcaagcgattctcctgcctcagcctctcgagtagctgggactagaggcacatgacactacgcccagctaatttttgtatttttagtagagatggagttttaccatgttcgccaggatggtctcaatctcttgacttcgtgattcatccgccttggcctcccaaagtgctgggattacaggcatgagccaccgtgcccggccattttctatttttatacagatggggtctcactatgttaaggctgttcttgaactcctgggctcaagtgatcctcctgccttcacctcccaaagtgctggaattataggcatgaaccaccatgcccagccatcttaaccattcttatgtgtatggttcagtggcattaagtacattcatattgttgtgcggccatcaccgccatccatccacaaaagtcttttcagtttgaaaactgaaactgtctcggttaaacactaactccccattcttcccagcacctagcaaccatcattttactttctgtttctgtgaatttgaccgctcagtgagtggaaccatataggatttgtccttttgtgcctggcttctttcactcagaatcatgtcctcaaggttcatccatgtgccagcacgtggcagaatttccttctattttaaggcttcatcgtccatcatatggacagatcgtgttttgttcatccattggagatcttttctgagccttctgtgtttctgacctggaagcgctgagcctacccacaatggggctcctgaaccttagggaacaggcccagttcctggatggggtttggtgcttagggttttcctttttggcagtaaccacatctgttttggtgctccctcagggactaccgcgccatcccagagctggacgcctatgaggccgagggactggctctggatgatgaggacgtagaggagctgacggccagtcagagggaggcagcagagcgggccatgcggcagcgtgaccgggaggctggccggggcctgggccgcatgcgccgtgggctcctgtatggtaggtccagttgtctgcctgcccgagggactgggaagctgggaaggagtctgggaggggagtagaaggtgctggg

SEQ ID NO: 30468 - DNA, 2300 bp, Homo sapien
ctggtagaagatattgcaggcttctcttgtacatttccagccccggacctggaattggacatttctccaagaagccccgtgggaagtgttacttgctttcagagggagataggagttagagacacctctaaagctgcatgaatttgatggtgcaggcaggacatacaggatgcagcctgatgggggtgtctcccctccaccttcagggctggttttcctgccttagtcccctctccccaggcgagggccagtgctttctgagcttctttgtctgtcctacaaggagggaaggatgtgggtgtggccagtgcaggggggtatgaaggctgaaagctatcaaaacatggctctgctgcaggtggagttggaagcagtctcctacaagcaagaaatgtctttgatgtctctaattctatctaaaattcatgaagattttgctctctccctgtctctttctttctctcacacacacactgaaatagaaatgttccagtgactcactagttggaattacttcctggtggacacatctcccagatgtgccacatttattgcattgacgaggcaggcacttgcatgaactgtcgcatttgtacccacccttctgtgagttggatgttgccatctctcttttccatatgaagaaactgaggcttgaggtaggccagtgccatgacagacctggttctggtcttatttctgctcttggtctgtgatcttgggaaaggcctttctgaaatatgtcaagattaggggttcagatgaaggttcttctaaactccaaagttctgtgactcttgggaagagccaactaatgaaaagctttagagtcgggcacggcttgataccagggcctgatgcagttgcagcagctgtggaagtgggtgtctttgagctggggatgtcgtggttccctgatgccagagcatgtgggtgacctactctgtgagtatctgttcccattcttgtcggtctccctccctttctcagatctttgccagcattgctccttccatctatggtcatgaagacatcaagagaggcctggctctggccctgttcggaggggagcccaaaaacccaggtgagcacccacctttcctctgcaggggtgttagcagctttctctttggggagccagcattcaaagaaggacacagtgtttttaaagcctgggtgctggggagaaagaatgcattaaaagatggtctggctgggcgtgactcattcttcaagggagagggtggccctgagttgggcattctgggtgttgggctgttggtcagggagccagtgtctgcctgcttttgtgatttaagcaaatgagtctttgcttctcttctatgtaaaaaatactttgtcttttaaaaacctgttttaagtacaaaaatactattgacacatgagtttgtatttatattacacttttatagaacactaaaagtcatgggtgaggctgatttccccattgacccccacttctcttcctagtccctccctttgtggccatttacaattacacagcaaccacagggtttcatgactacacgtgtttatttgtacaagcgcagcgtcccctgtgtgtgcccagtgctgtgcctgtgcgcagtgcatcccaccgagctctcccgctcagtgccacactgcagcatcttttcttgttagtgcatacagagcaattgccttcttttaaatgactatcatgccaccagataacgcagtttatttagctctccctttggagaacacttagattgtttctgatatttcacattcgccaaggacatctcgtgcaaccctcctctgcacccgtgtgtgtttccctgggagtgcccagagtgggactgcatggcgtagggcattgtatccctttctagagggactgtgccttaccattcctaacaagtaggttgaggaattggtgggggatgcaactgtgccctcctcctctcacttcccactctccccctcccccgcttctactcatcccctccaggtggcaagcacaaggtacgtggtgatatcaacgtgctcttgtgcggagaccctggcacagcgaagtcgcagtttctcaagtatattgagaaagtgtccagccgagccatcttcaccactggccagggggcgtcggctgtgggcctcacggcgtatgtccagcggcaccctgtcagcagggagtggaccttggaggctggggccctggttctggctgaccgaggagtgtgtctcattgatgaatttgacaaggtgggtccctgggtcacggaggctggtggaactcagggggtgtgtgtgggctt

SEQ ID NO: 30469 - DNA, 2300 bp, Homo sapien
atgcaccactacacctggctaattgatttacttagagatgggggtctcaccatattgccaaagctggtctcaaacccctagcctcaagtgatccatcctcctacctcagtctcccccaagtagctgggattccaggcacatgccaccacccctggcagctttagagttttcttcatttggagcttacatatctggtttggtttattccagtttttaataattgttgctgtgattgcgatcttttctcctactacattttctaagtggttattgaggatacacagaaaagctattgatttctgtacgttatcttttattcagcaatcttgctgaactcattggttttcaattattttgccaactgatgatcttgcattttctagataaacctgcaaataatgagttttcccccaatactttcatcccatttcttctatcaggccttgttgcagtgtctcttatagaatattcaatcattgtggtggtagtgaggattattttgttccattcacttaaaagagaatgtttctaatgtttcatcattaagtatggtttcaccattaagtatgataataaaggtttctgggagatacccttaatggaattgaggacgtttccttccatttcttgtttgcttctaagatctttgtttcttgtaacagaaaaacaaaacaaaacacaacaaaaaaccaaagggatgctcctttcatcctcagaggaggaaagaagagggaagctgggtctagacacaccctggatttctcttttccaagcccagctgacagccacttttctagtacccctaacacccaccaaataaaaggtgctacattttgctcatgttctttcttttgtctggaacccatttcttccctatgctcctccaccccaactcctatttctcctaagtattaatatttagtctggaagagtcccgtgagattatctccaatgtctgatgctatacccctgcataggggggtggggatatactttgaaaaagcatattcaaataacgatttgttattttaaagaagtgttttcctaatatggtatatataaagtaacattccacaaaattgtggttgctgtatatttaagctgcagtacttctaaaagggtagtcggggtttttctctccctaaaagaggctgagcttctttctaactcaggaactctatcagtgagcttttccctctgccttgtaagttctctcccaaacccaatctcctacctaatacccactcatccttccagatgccagccagcttaccttaaatgctgtttcttcaggaaggcaagcataaggttcccctctgtgctgtctcctagccccttatactccttaacagaccgactaccaattgcaatcataggaccatatgtgtgtccattttgtttttcagtctgttttctctacgagcctaaactatgaggacgagggatgtgcctgttttatttaccactacagtgcttggcatattaaggatcttcagttgccaaaagggagcacatgttagagaagtcagcacctctctcataatctaaaaccccccagttagcaaatggggcaagtggggcccagaggtgagaagagatttactcaaggtctcggaaccaatctgatcctgagccagactgcctagctctaaagtccagttctttgctctcaggttctccttcagggctcacccaatctaagtaccctgagaagtctttccttaccccaggcctctgtccaccctcacagtcatttccacgcgtcgtcctcgtcccatcagtcccatctgccacagctgcccactctgcttcccagggaacgggtgaccgcgcggggagagagcggcatccgggcgcgaggtgcgaggcccaggtctgcgggcggccgggccaagcccccgagcctcggcggtgctgattggccggcctggcgggggggacgggcggagggacggccgcccgcgcgtccgcttcgtctccgcgggggcgcgcccgcggcacgcggccgggcggggccgggcgtgagtgacggccatgcggaccaatggggcgggcgcgcgccgccgccgccgcccgcgcggcccctgacgcgggcccgggcgccgcgccgctgcggctgcaggcggcgacggctacaccatgggccggctgctgcgggccgcccggctgccgccgctgctttcgccgctgctgcttctgctggttgggggtgagtgcgctccgggcccgagcgcgggagggcgggcggcggcgtgggcgcggtgctggacagctccccgggccgccaacaaaggggccag

SEQ ID NO: 30470 - DNA, 2300 bp, Homo sapien
gacaacctgcagcgtggagggatgcaggcagctacatgccagcagtgaacacgccatgggaagggaggaagctgggcagccggggtggccccccatgtggcctgcatgccctcagtatccctccctgcaccggccctggcatcaggaagctgactggtccacccctccccaccgaggtggaagcggttgtatggtggaggatgtgtggggggctcacatctcctgtctctctaactagttaggataggtgtgggcactctctctagttggatggtgtccagcagcatgggtccactctcactggaggcctagggccacagtgagctcagactcagcggctggggcagaagctatggtgggatgtgaaggaggctgggaacatgggcatggggtggagaggcctccaggtgtactgaggcaaacgggatgggcatggggtagaggcaagcccaggcgccagggaacttcaggagccgggagtgccagcaccttctaagcctgctcccccatccccacccgagcccaatgcaaccaccccagaggagccatggcaccccaggacctcagctgaggaaactggcccctcccacccctagattggcatccagaactattccacaaccagcagctgccaggcgcgggccagccaggtgcgcagcgactacggcacgctcttcgtggtgctggtggtcattggggccatctgcatcatcatcattgcgcttggcctgctctacaactgctggcagcgccggctgcccaagctcaagcacgtggtgagtgtggggacaggtggggctgggggccagttgagaggagagtgcccatcgataggtgtcctcatctgcaaggggaggcagtgactctcctgggcgcacagggtcccgtgggtgaagcagctggtcagcctagcactgctgactgctctgcagggcaccagccccaggacaggtgccagaggtgcagggagtgagggggctgctagccccaccagggggcccctccctggcaccaccagcccctttccggcgcaggcactgcagggcctgagcacctgaatacctcaccagaggcaggccctgcgttggtggtgcccaaggatcaaggagaggctccagcagcctagaggcctccccaggaggaagcgagcagagccctagcgatgctccctgcccacctcgcaagtggagtcttcttagggggctgttgggggatcgatgacgtcagggaggccacggggctttgtagtgccaacgactagtaggtttattttgagaaaggagttgagctgcagcaacagaaaagaaggatctggcacctgtggagggtgccgcgggaaccccctgggtggggttgcacagacggccgcgggcctggcgctgtccgggggctggctcgctcgcccatggcctctccccaccccgcctcagtcgcacggcgaggagctgcgcttcgtggagaacggctgccacgacaaccccacgctggacgtggccagcgacagccagtcggagatgcaggagaagcaccccagcctgaacggcggcggggccctcaacggcccggggagctggggggcgctcatggggggcaagcgggaccccgaggactcggacgtgttcgaggaggacacgcacctgtgagcgcagccgaggcgcaggccgagtgggccgccaggaccaagcgaggtggaccccgaaacggacggcccggagcccgcaccagccccgcgcctacccgggccgcccccgcggcctggccctcggcgcgggctccttcccgcttcccccgacttcacacggcggcttcggaccaactccctcactcccgcccgaggggcaggcctcaaagcccgccttggccccgctttcccgcccctgaaccccggccccgcgggcggcgggcggcgcttcctgcgccccgggactcaattaaacccgcccggagaccacgccgggcccagcgcgtctgccttcttgactcattcttatttccggggttggggcggggcggggcgggcggggcaccccggggcaggggcggggccgcggggcggggaggccggggcgggcgggtcctccggacgccgctgcagagcggggcggggcggggctgagcgtgtttacatccgccgggtgcgcggcttcgccgcccgaggtcgttcggctcgggtaccatcctccgcgccatggacaccagcgacctgttcgccagctgcaggaagggggatgtgggccgagtgcggtgaggacctcgcagtcccggggagggtgcgggaggtggccgccctcggaacgcct

SEQ ID NO: 30471 - DNA, 2300 bp, Homo sapien
agggcccggacgtcagaccccccgggcgcagggcgcgggtataggcctgggactccagacgtggcccctttctctcgtgctctctggacctggcgcggggaacacctagagcccataatcggcctccggtccctgaggattcggaaactcctgacgcagctaaagtgaatctggcgctgagatgccccctccatgggccggacgcggagggaaggggtgcccagttgggttctggggcccttcccctccttgggcttccactatcccgtttgacctccttttttcttggcccttcctcccccttgacctggtgctgactgactgcttccacctcccctgggctggcgccgggctgctgtactcccgtagcctccctgggccgctccctgacatcccgtgccactcaagagttagtgcatagtgtcaacgctgagtgggttcacagcacttccaggtgcagcctggaggcctcctttgggctgcccccgcctcagtggggctgcattagcattggcgactcccctcgctcaccttccgcatcccatcagttgctgtatcccgcgactcctgcctcctagaattgtgtgccctccacaccatcaggaggcctgcagcagctttttcccgggctccctgcttctaacagggccagcttcttcctgcagtagagagctctggtgggagtgaaggctccatcacctcctctcccaaacgctgaaaggccaaaggtccagcctcggcactggctctggcttctgtccctgtagcccatcgtcccccagcactgatagcacacagtgtctgcctgttcgaccccacctccacatccttgcctgcactttgccttgagtgcctctcctgctctggtctgcctgtcacctgccctcacctgggggaggcttccccataccaaaagggatgttttctctccgttcctttccacgggccttctttctcagaccatgaacccgtcctgacccaggctctgacctccttcctgcccaggtacctgctggagcagcgagacgtggaggtgaatgtgcgggacaagtgggacagcacccccttgtgagtgctggagagaggggtggggagggtgggggttggtgcaccccttcagcactgaggactgcctcctgtacttccttcctcccttcaggtactatgcctgcttgtgtgggcacgaggagctggtactctaccttctggccaatggtgagagcagggagcccggctcacgggtgtgcgtgggtgcatgcatgtgtgcgtgtgggtgcatgcatgcgtgcgtgcattcaaaggccttgatacacatttgcaaagcaccacgattcctctcttaccacccagtcgaatcagcaagtactattattgctactttaaaaccttttctctgtccaccttgcccatctctacttctacgacctgggcccagtcatcagcatttctccccggacacggtgcctgcctctctcttgccattgcagccaagttgatcttttcacaatgaatctgatcggctaaaaatcctccagcaagttcccattgcctctaggatacagtgagcctgcctggccatgcccaaggctccacagggtctgccctcccactggcctcattccttcggctctccctgcttgcttgctgcttgcttgctgctacactggcctcgctggggctccactgtgctatgcatgcccctgttcctgccccagggcctttgcacctgcagttcctcctgcatggactgccgttctgcaaacgttcacatggcccactcccccttcattcaggtctctgcatgctgccaccattacagagtgacctttcatgacttcccttcattcagtgccattcttcttcctattttggttttttcttttttttttttttttttttggagacagagtcttgctctgtcacccaggctggagtgtagtagtgtgatctcggttcactgcagccttaacctcccaggctcaagtgatcctcctgcctcagccccttcaaatcttcaaatagctgagactacaggcgtgcaccaccacgcccggcaagtttttgtattttttttgcagagatggtgtctcactatgttgcccaggttggtctcaaactcctgagcccaagtgatccacctaccttggtctcgcaaagtgcctggattataggtgtgagctgccacgcccaggcttgtttttcttaatagtccctgccatcgttaggtagtgggttgattgtcctgcctcactagagtataagttcagcaggacagggacctgtgtctcgttcactgctgt

SEQ ID NO: 30472 - DNA, 2300 bp, Homo sapien
gcctgctggaggccagacagtgggtaagtcacgctcagcagtgcctacaactcaagccactgctcaaaggctgttgttttatttctcaagttagaccacaggctctgtagcaacttgggcctccttggacacacacagtgtgacgctgagacacagtcctcaacgctgctatggtgtagaattttttgcggagaaagacaggaaggcctcttgaggtcagtgtgagacagggacactccactggggcataggtatatcactcacaggttgaaggtaggtagactgaggctcaaagagcaagcggaggagctaatgttcaacccaggtggtgtggagtctcagtccagtggccttaccctccacggccacgttgctagttatactggacagagctcagactgtgccctggcctgtgtagatgcaccagaggttttatctgggggtcacagccgctgggaacgggagagttgctggggattgccaggaagggacaaggcatttgtagccatgcaccatctgcttttacactaccctagagtcaagtggaccccctccagcatttttttttccccgagatggagtctcactctgtcacccaggctgaagtgcaatggtgtggtatcggctcactgcaacctctgcctcccgggttcaagcgattctcctgagtagctgggactacaggcgcatgccaccacgaccggttaattgcccctccagcattgtatgtgtctgactgcaatgaagtgtgagtgtgtctgtgtgcgactgtgtgtgtatgatgtgagtgtgtctgtgtctatgtgggggccaggtgtatagtctgcatatgtctgtgcacctctgtgtctctgtgggttgtctgtgcctatgtctcggcttgtgtgtgtgcatgcatgtgtggtctgtgtgtgtctgtatgcatgtggtatctctgggatgtgtgtctgtatgtccctgcgtgcagtgtagtgactttgggagtgcacatgtgtacacgtgtggtgagtgtgcggccctgcgcgagttgtctgtgtacgtgtggtgcctgtgggtctgtgtgcgcgcgtgtgcccgtgggtgtggtgtgtcctcccgcgctgaggctcccatgaacccagctcagttcaggcctccctgacagtcctcgggcggccaccccggggcgcggctgtccacgaggcgcggaggagaggagtgcgtggctgggtcggcgggcggcgcccccgctcctccccgcgggccgggcacacgtgggccccgggcgccgcctccccgcgccgcccgccgcccgccgggtcccgcgcgtccccacccacctcgggccgcccccgccgccgagccggcccagggataaagtggcggcgcagacgccgcaccctgtcgccgcgaagccggtcgcgcgcagctcgtcccggccctggcccgccgcaaacgaggatccgctgcgctcggggaacgcgacagcggcgctcgtggccccggtaactgcctcccggcccctgccccagcccgccagtgccgccgtcaggggtggggagcagcactggggtcccggacacgcccggcgtgggctcccgctacccatgtgtgcgtgtgtgtgtgtgcacggtgtgtgtgcgcgcgtgtccgagtgtgcgcgcgtgtgcgcgcgcgcgcgccctccctgctccttcgcaccagcccccaaaccaacttgtccccatcaactccatctttctagtccccaccttccccggtgcagacacccggcgaagcccacccggttttcccagcggcatttccgatgacagcttcggggctacgtgtcctgtgctgtcggagacgcacaggaagcaaagtttgtgagaagccttgggggcgactttgccttgggcacccgcatttgtgcgtctgcgaggtgcctcggtgtgcgcggagctagtttcccagtttcccgggcccctcccttctccgagcccctctagcgatttgtttaggaaaagtgatgacatgaactagtagtggagaatcgcagcgccgctccccgccctggggagggaggggagccccggagagcctgccggtgggagctggaagcaggctcccggctgagcgccccagcccgaaaggcagggtctgggtgcgggaagagggctcggagctgccttcctgctgccttggggccgcccagatgagggaacagcccgatttgcctggttctgattctccaggctgtcgtggttgtggaatgcaaacgccagcacataatggaaacaggtttgtcatgtatccttggaatttcagatgggaggaataat

SEQ ID NO: 30473 - DNA, 2300 bp, Homo sapien
gatacagaacaatacgatctgtctcttaactcccaaattcccagttggctggccacacaccacagtctcagttctgtccataaccaagtttgggggatctcttcaagtttgcaaatgtcacttctactgagatccctctgacaacttcagtgaagtctctcctcaaagctttttttttttttttttttttttgagacagagccttgctctgtcgctcaggctggagtgcaatcactgcaacctctgtctcccgggttcaagcgattctcctgcctcagcctcccgagtagctgggattacaggtgcccgctaccatgcccagctaatttttgtatttttagtagagatggggtttcaccatgttggtcaggctggtctccagctcctgacctcagatgatccacctgcctggcctcccaaaggactgggattacaggcgtgagccactgagcccggcctctcctccaaattttcaagctgtgtattttaaatcataaaatgttagagccaggaacatttgaaataatgccttgataaaagcgtccatcagacccccgagcacccttcctttccatgaattataaccaacggaaatccggtgcacttagcatgtccagctttgagtgaagcccccaagcttcctgcccctgagactgccgcccctaaacctctcttgcatggattctgtagagctgccccgaccagaagtcacttagccactcctctgctccaggcctcgtggcctgctggaggccagacagtgggtaagtcacgctcagcagtgcctacaactcaagccactgctcaaaggctgttgttttatttctcaagttagaccacaggctctgtagcaacttgggcctccttggacacacacagtgtgacgctgagacacagtcctcaacgctgctatggtgtagaattttttgcggagaaagacaggaaggcctcttgaggtcagtgtgagacagggacactccactggggcataggtatatcactcacaggttgaaggtaggtagactgaggctcaaagagcaagcggaggagctaatgttcaacccaggtggtgtggagtctcagtccagtggccttaccctccacggccacgttgctagttatactggacagagctcagactgtgccctggcctgtgtagatgcaccagaggttttatctgggggtcacagccgctgggaacgggagagttgctggggattgccaggaagggacaaggcatttgtagccatgcaccatctgcttttacactaccctagagtcaagtggaccccctccagcatttttttttccccgagatggagtctcactctgtcacccaggctgaagtgcaatggtgtggtatcggctcactgcaacctctgcctcccgggttcaagcgattctcctgagtagctgggactacaggcgcatgccaccacgaccggttaattgcccctccagcattgtatgtgtctgactgcaatgaagtgtgagtgtgtctgtgtgcgactgtgtgtgtatgatgtgagtgtgtctgtgtctatgtgggggccaggtgtatagtctgcatatgtctgtgcacctctgtgtctctgtgggttgtctgtgcctatgtctcggcttgtgtgtgtgcatgcatgtgtggtctgtgtgtgtctgtatgcatgtggtatctctgggatgtgtgtctgtatgtccctgcgtgcagtgtagtgactttgggagtgcacatgtgtacacgtgtggtgagtgtgcggccctgcgcgagttgtctgtgtacgtgtggtgcctgtgggtctgtgtgcgcgcgtgtgcccgtgggtgtggtgtgtcctcccgcgctgaggctcccatgaacccagctcagttcaggcctccctgacagtcctcgggcggccaccccggggcgcggctgtccacgaggcgcggaggagaggagtgcgtggctgggtcggcgggcggcgcccccgctcctccccgcgggccgggcacacgtgggccccgggcgccgcctccccgcgccgcccgccgcccgccgggtcccgcgcgtccccacccacctcgggccgcccccgccgccgagccggcccagggataaagtggcggcgcagacgccgcaccctgtcgccgcgaagccggtcgcgcgcagctcgtcccggccctggcccgccgcaaacgaggatccgctgcgctcggggaacgcgacagcggcgctcgtggccccggtaactgcctcccggcccctgccccagcccgccagtgccgccgtcaggggtggggagcagcactggggtcccgga

SEQ ID NO: 30474 - DNA, 2300 bp, Homo sapien
aattagctgggcgtggtggagcacgactgtaatcccagctacttgggaggctgaggtaggtgaatcacttgaacgggggaggcagaggttgtagtgagctgagatcgcaccactgaacaccagcctgggcgacagagcaagactccgtccccatccccctcccccaaaaaaggactaattctgtatgattttgctcatataaggcacctagaataggcaaattcgtagaggcaaaaagtagaatagtggttaccaggtgctaaaggggagggagaaataagttattgtttaaggagtaccaagtttcttttgagaggatgaaaaaattctggaaatggatactggatatggttgtacaacattattaacataatgccactgactatgcttaaaaatgattaaaatgataaatgttatgttatgtatattttaccacaataaaaaaaaaggaagaggtgggcagaagagttagtgtcaaagtgatgctgagaggtgaagccagctgcacttctgggttgggtggggacttggagaacttttctgtcttacaagaggattgtaaaatgcaccaatcagcactctgcagctaggattgtaaaacgcaccaatcagcgctctgtggctagctagaggtttctaaaatgggccaatcagcactctgtaaaaacacaccaatcagctctctgtggctagctagaggtttgtaaaatggaccaatcagcactctgtaaaatggaccaatcagcacactgtaaaatggaccaatcagcacttggtaaaatggaccaatcagcaggacatgggcagggacaaataagggaataaaagctggccacccagtcaacacagggaacccagtcaggtccatttctaggttgtggaagcattgttcttttgctcttcacaataaattttgctgctcctcactgtttgggtccatgtgacctttaaagctttctttaacatttaaggtccgtggcttcattcttgaagttagcgagatggagaccacaagcccactgaaaggaaccaactgcagacacaatgcatgtgagaaagactcagccctattttctggctttgaagctggaggaaggagccaggagcaaaagaatgaagacagtttccagaagctgcaaaagggcagggacagattcactccaggaagccccagaaacaaacacagtcctgctgacaccttgatttcaatccagtgagacatattttggacttctgacctacagagctaaaataatagtaagataataaagttatgttgccaccactgaaaacagttttattttgctttggtttaagctaactgagctaatacagctgccgtattttatgacacttgcctaaggaagacttcccatccctgcactgctcccggctaaccagtcctttctcgggactcctggaaacctcccactctcagagaggtgtagggtataaaaatcacaagctgatggctcaggatgtagcaaataaaaatacaagaccaaaacgaaacccaaccggaacaccgagttaaacgtgaattgaccatgcgatatttgggacatacttaacactaaaaattactggttgtgtatctgaaatttacctttaactgggctcatgtattttaccgggcaaccctaccccccggtcacagtgagactacacacggggtcttttggtcattttgcaagtgtaaaagactaacgggaacaccggcatttttcaaagctcgatttccaaacctcctttaaacacttgtccccatcccctccccgcaggccttcagtcgctctggcacgcgggccagcgcgggaacactctgcgcaggcgcacagcgttccgcgggggacgctcagtagggtacgggacgcgcgcggggagaccctgtgcagcgacaccggggctgtagtcgccgtctggaaccagcgcgggaataggtgcgcaggcgcacagtggctggagggcagcggcggcgtggtctcgggccacttccaagcagagggcagcacctgtcccctcggaggcgctgccagcgccctccctcctcctccgcagggcgcgggacctctatttatatcgcccagccagcacaggcccatattgggcagtggcctcagtcaggcccgctggccgccctgccacacggtagcgtccaagccaggtcgtggcccagcgagtggggacgcgccccgaaccaggcagcaccttcgtaagtaggggtagcgccccgggggaacgcggcccccagtcacaagccctgcctcaactccgggccaggttgaacctgggcgccgacc

SEQ ID NO: 30475 - DNA, 2300 bp, Homo sapien
tgagcttactatgatatatcactggaaactaataataatgtccatttattgatcatttggatgccaaagactaacttagctactttacttgtgtacattattcccattttacagatgaagaagccaaggtttaggctaaactgggatccaaaccagggaaagcccccatgtacaatgcgagtgtcttctatgtaccttatatgtacaagaaacaaagctgagaatgtttttttgaggtgtggtggctaatataactgcccaggtatttttctggatttccatcagtaaattcatttggtctataaacccctaacaattagagtagctttcaggagttgtatgaaatgcagttggaaggaagggatacaacaaatacatataggccagttatttccgttttcaaataaattgttttttgtggttgttgtcaaagccaatgtttttgagacagacaaactgcatccaagcaaaatatttattcaagaagttgatttatgtttgggaatctggggatatccagatgctctttttaaaacaggaccatttcacttctcaaaactcttcagctgggtttaagcagagaagtggagaatagtcaccccaaaaggatattatcttactcataatctagaaatgtattaacttttcccatcaatgttattctcactgcttgcaacttacagccaagttagaactggaaaaggtggtagagacttgagatcctcttctaacattaaggtttctgactctaggaatgtccttctttaaaacaaacgctaatttaaattaacttccttgaaacatcccatttccatttatccagggaaggtgaagatgagacagctaactttaaaaaatttagactaatgctttttaaggtgaagagagattcagtctctgccactatgaattggggaaaaaataaaagctgagcaaggagggaggacagagaaatcatatagttttaggcattttctaagtttagggtaatttagttgtatattttaaatattgtgacttttcagatcagctgacatttggtagtgccttccaaagcccagtagatataatctttgtgttatctactgctttgaattatttgtcccacatcaaagtttgagcagaattttagtggaccttttttcagtttttcctcttccagggtatattgtacaaggccccagtcatgaatttatggactgactattataacagttcggtgtattttttggaggggatgcatataacctttggggtgattttgcatctccttggagagaatattaactgatgcccctataccctctgcctgcaggtcagctgtatttggtaactggaaatggaattgcaaaatgtgcccagcttatcacttctctttctatacatgttgggagggaaatctttgcagtcctagaaaaatctctgccactgattaggagaatttgtcacagcagttaatttattactgtttacgtaatcaaaattaatatttttagatacaaaagtagttgtcttaaactgctctgcttggagtgaataatatctgtttataaatactttttttagaactaatgctgcatatctaaattatagagaattttttcttagaaggaaactgccttttttctttcccttagaaatgtttcctgacatctttgtagcttcatgagtaatcagacatgcaaatagcccctcaggaatcaagctacacttaaagaagacttagttggaaactttggagagtagatcatggagtgcaagattgagggaaaagaaaaataccaacatagcttgaatttactgaataaaattcagaacatgaaagaattagcagaaatgattgatgtggtactcacagcagaaggagagaaatttccttgccacagactggtcctggctgcatttagcccttatttcaaagctatgttcacctgtggactacttgaatgtaatcaaagggaagtcatactttatgacatcacagcagaaagtgtgtcggtgttattaaattacatgtacaatgcagctttggagatcaataatgccaatgtacagactgtagctatggctgcctattttatgcagatggaagaagtcttcagtgtgtgtcaaaaatatatgatggaccacatggatgcctccaactgtttaggtatctattattttgcaaagcagattggagctgaagatttatctgatcgatcaaagaaatatttatatcagcactttgccgaggtgagcttacatgaagaaatactagaaatcgaagtgcaccaatttttgacacttattaaatcaga

SEQ ID NO: 30476 - DNA, 2300 bp, Homo sapien
ctttttgttaggctgagaaagctctcgctaccacagtgccacattgaaagagggcccaggaacagcagagctgtgccgttaaccgaggccagtgtgtcccctccttggaaacgctgcagctcaaacttggcactgtaatgggctaaattatttatccagtcggataagagagaaggcagctaaaagcctcctgagttagtttatagcctcagtccctggattcaaactgagacaggaaacaggtcagtttatatcagcaaagagaaaaaaagacttttccttcaaagtgcccttccatcagcttttatgcctggcataagccccaaccatggtgaaaataagctgttcccatcaatcttcttggattcattgagtactgtgtggcaggccctgtgatataaaagatgcagaatagtggcctttggccccagtagcacactcacttggacaggcagggaaagcacatgcaaaattaaacttctcattcttcattccaacacacaacgtgtcaggcactgggctaggtactagggatgcaatatggaaaacgacaggccagtgagcaagataggaaagcaggtgatggtgaaaataccacctgactgatgcagtgataggcaaagggtataaaatgacactgaaagaagacaggccaggaaacacatgagattaatttctcagtatgtgatacatatagtaaaagccatgagatcaaagcagagttcttaattttggttttgagatcgctgtcaacaacatactccagtatcagtcaccacccaacatatgcagtttgcacagtgactcttccaggacctctctatgtgaaggagagctggtttacctgaggccagtgctttacaggctttttgattagtcacacagaccaggctgtgagtctggatagaatgaggtcatcgatgagaggcgtgtctgcaaatacaggcatgtccctccttccggggggtttacctcagtctcaggagccatccttcagatcaggaaatatggccctgaccttgatgaccttccagtgtggacttgggaggggaaaataaaagcagtgcatagaaatgtgtttcttgtaacagtggataggaaatttgtatacaattatttttccaatggagagttgtacttaaagtcatgattctctaagtgttatttatattccttgttacagtccctggacttctaaatctcacttttatctctttaagacacctgtcttgatgtcctctactttatttatttgcaaacacggccctttccatcctattaatttcttaacagcaggaaacatgttttatgcatctttcagaactccttattataacttagcacattgccttacatataataggcacttaataattatctgatgaatgaactatatcatccaaaactggaagatgcactgggcatttgggtttagggcctttcctgaaatttaccaaagaatagtccttccctagttgggaaagatcatgcaacttaggaagagagggagaaaccagcttgcaatgataagggatgggaagaacacattcctagctagccacatcagcaaaagcattgctaaccatcaacagcaaggcagatgtcaaagtcaggttacctttacagtcaaccctgaaattcttattataaaggggatgctcatgatgtgaaccagcattggatattatagaatataagccagtggtagactcagtctcatgcatgatcacaaacaaggagaacactatgaataaaaatgacattgaatgtcgctatggagtacacagtagacatcactattgcttagaacttgtcttcaaggtagcacctggcaagaaagagaaaagttacagtcccataaacctttgatacaaaccatgcagggggcagtgctgtccacaattgagtttcagttcctgatcctctcatttctccacataattctctgcaggtggcattggctgtgtaggtcaagacaagggccaggttcgaaaatgccttgacgtggtggagatctacaacccagatggggacttttggcgagagggccctcccatgccaagtcccctcctctcactccgcaccaattccaccaatgcaggggcagtggatgggaaactctatgtctgcgggggattccatggagcaggtatgggtccagttttaaacattttgttacctcctttggtgttgatttgactttctttaactgatccaatcaccactaatattcctgagagcaacgtgagcactgcaaaagcatggcttttagagtcagggaccctgtgcaaaacctcttg

SEQ ID NO: 30477 - DNA, 2300 bp, Homo sapien
agtattgaaaattcatccagatttttgtggtctctttcattctaggtggatgtttctaatatcctataataaaatcttaaatgtataaatataaaacactgcatacctattttccgaagaattaatgtatgtgcttacaatagaaatattttattattttttgagacagagtctcactctgtcgtcacccaggctgaagtgcagtggtgagatctcagctcactgcagcctcgacctcccaggctcaagggatcctcccacctcagcctttccagtagctgggactacaggcatgcgccaccatgcctagctaatttttttctgtatttttttctagagacagggttttgccatgttgcccaggctggtcttgcactcctgggctcaagtgatcctcttgccttggcctcccgaagtgctgggattactggtgtgagccactgcacccagtccaataaaaatattttaaactagtgattctcctaaagcaatcagtgatttaacacacgtaacttggctgcagtccctgcagtgacacaggccagattgtgtcataatgtggaaacaacaggaggcctgttatcaatggtactgacatcctacaactattagcacaaaccaatgagtttatattaaaatttctattaactaattgtaatatttattgtaattactatactatttaccctcgaaatatttcaacattttaaccatcaatatggtgcagggtgcataatggctaaatatcggatctagtctatatgctgaacttagtccaggggctgccagttttagcttcaggccaaaactccagaagagatcatcagtgggtcctggaagtgaagatgggttgcatttcagactctgaataaagagtcaatgtcttctttttcccctttttggtgggggatggatatcaagtgatgtcacacctagaccacttcactgaagttacctgcctgttcccagtagtcctttgaattttccaccagtgggtttgtattccaaaaaagacttcctgtcctgtccaactttctgagccaagaatgtacaaaacctgattatctgctagaaatgggtgagaatggaaaaatccaaatagttgacacctaaattaaaagcaaaaaagcatcttgccacatatgtaccctcaacttctacctgtcctggtcaaggtttagctccatgaaaccttgcctgatcccacaaggcgtgcccacctcctccctgctaaatgctcacagcattaagtctgtttctcttagatgacatcatacctactgactacagatgcctgaaagtaaattccaacccccagccccagcatcccttgccctacccgttatccccctttcccacaccgatcttaggcaatcacaccgccatgctttgcccacaacagtctcctcaacctgttccctcattccttctcgccagaatctatcaaggctcggcacaaaggtactctcccaggaggccttcctgaattcttctgtgaggcagactacttcccgagctgccccggcccttctccggccaagtctctccagaaactcatcccattcgttctcagatggaaggggacccacacccacgacaagcctccgggtttgcttaatgactcagacagcgagggtgctcggtaagccccaccagcccgcgccctactcagcaggtaatgacggagacctactaggtgacgggcgccgcggtagacgctgggataaggtccctgctccagggagcttacggtctattcactaacgtcaaagagcagtgagtgctgttacgtgtatgggagccaccagggtctccgcctgcctgcagggccacgcgcgcactcgacgcttcgcgcctgcctcagtttctccgtgaggccgcacagccccagtctcgggaggcgtgacacaccctccccgcgcgctctcgcgttaccaagtctgcgcagccgcacacccccagtcccggcgggccccgcgcgccaggccccttcccgacaggccccaggagccccgctgcatgccggggcttgaggtctcggcgaagcggcgcggcgcggcgaagcgcggcggccggcgggcgcgcgtggcaggaagcggaagcgatccgaggcccggccccggccccgccccgcgccgcgccgcgccgcttgccgccgggctagcactgacgtgtctctcggcggagctgctgtgcagtggaacgcgctgggccgcgggcagcgtcgcctcacgcggagcagagctgagctgaagcgggacccggagcccgagcagccgccgccatggcaagtgagtcct

SEQ ID NO: 30478 - DNA, 2300 bp, Homo sapien
ggtctggatggctcctgagctgaactacagatttgggccacctctctaggctcaccatccagatctgggtccagaggacagaattattacctttgggttaaagtgatcccttctcaagtttttatttaatgtgcttttaaaaggcaaaccccacataccatcagtttggttactcttcccattccctcagctaccaagttattttggttgaatagaagctttcctttttgtagggtgtcttcatttcttacatctcactctatttcactgttaggcacaagggaatggacacatttgacaagttccacagtactagatgggtcctctaagtacagtctgaccttcagtttcagctttcctatttaatctgtcatgtaaaattaattgtactccaaagtggccatcaaatacagtccctatttgactttttgttgttgttgagacggagtcttgctctgtcacccaggctggagtgcattggcgccatctcggctcactgcaacctccgcctcccgggttcaagcagttctctgcctcagcctcctgagtatgggattacaggcgcccgccaccatgttcggctaatttttttgtattattagtagagacagggtttcaccatcttggccaggctggtcttgaactcctgaccttgtgatccgcccgcgtcagtctcccaaagtgctgggattacaggcgtgagccaccacgcccgactcctatttgacttttttaaaagtgctcctcagagtactgataccatgaccccacactgcccacagagaccctgtctctggaagtaatgccagcttcctgccagtagaagcagcgtgagttgccaggcttccattatgggatggttatgctgtcctggaacggcagaggttatcacttgtttctttttttcgctttttagttttttaacgtaagtaaatttcttgctgatgtctaaaacttaggccttaataatgcaccacactccccgccttcctctcacttgttactctgttgtctggttcttagattgggtccctttcctatatccctcagtccctcagtaagctcactccacccctaggcctgcctccctcaggagcatctcctggcagggtgtcatttggatgggaccacatggtggacgcaagcatatcctctgtacttgtatccttggtgtgagaagcagagagctggagcctccccactcaccagccaagggcagcctgcacttcatagctgttgaatgggtacttgtacttctcaagattgtccaggaaagtagatttgccagctctgagccccctcttcagtggatgacccctttcagctagagttcagcagagtctgcttttatttttataaattatcatcgttccacacctctggtggccactgactcatgtgcctaagaaatgagaccaattaattttaaaaagtggaatagtggttgggtgctgtggctcacacctgtaatcccaacactttgggagggtgaggcgggaggattgcttgaggtcaggagttcgagaccagactgggtaacatagtgagacccccaactgtacaaaaataaaaaataaaaaattagccaggcgtggtagcatgcctatagtcccagctattcggaagtctgagataggatcacttgagcccaggaggagaaggttgaggctgcagtgagctgcaaccacaccactgcactctagcctaggcagccgagagagagggaccctgtctaaaaaaaatcaaaaacaaaccagaatagcccgtttctgtagtttgaattctctacagaagagaagggagggatgagaataatacatgctgtatccctgtggctatgggcaccatgagtctaataacttaagtttgttttcctctttttatttgtctgctaagaaggctagaagcaaattgagttgcctgttcgttccttcatatatgtctcctcctctgccaacaggaatggaatttgaaggtgctatcatcgcacttttccatctgctggccacacgcacagacaaggtccgagcccttcgggaggcgttctaccgccagaatcttcccaacctcatgaatctcatcgccaccatctttgtctttgcagtggtcatctatttccaggtgtgtccagatccaaccccagggagtttccatggtctggatttaagtttcagaatgccttgtgtgcagtcccccactctgtggggtgcactgtcatcatattgtgttgaaacgatgagatggtatttgaaggcagcaggtttccagatgagctggacaagcatgttcattgagtcatg

SEQ ID NO: 30479 - DNA, 2300 bp, Homo sapien
tgctatcatcgcacttttccatctgctggccacacgcacagacaaggtccgagcccttcgggaggcgttctaccgccagaatcttcccaacctcatgaatctcatcgccaccatctttgtctttgcagtggtcatctatttccaggtgtgtccagatccaaccccagggagtttccatggtctggatttaagtttcagaatgccttgtgtgcagtcccccactctgtggggtgcactgtcatcatattgtgttgaaacgatgagatggtatttgaaggcagcaggtttccagatgagctggacaagcatgttcattgagtcatgggacctgccattaacgaaacaaaattaaggcagttctaacgtaagtgaaatcatgttcttctgggttgggcctatcgacaggtaagatacatttttaagttcttagttcaagagaagcaaaaagtactctagctctgaaacctcattgctctcttatagaaagtttgtatgatatttataggtaacttctgcatctcggaaacggcctatcttcttaagctgtcttacctttaaaagtattccatctcttaaacttgcttctgagtaagagacctgaactgctattgttttcctgtaattggattgatctttgtattttttgatggtccactttgtattttggtgtttatttaaaagaagggacagagatgaaaggcagtttgatgtttgtgaaaggtatttatacgagctacatgcttttcccattccttctgctgagactaagccacattcttgcttaataaaaagctatctctttaggggctttgccagaatttgcagtcagatcattaagaattttttttttttttttttttttgagacggagtcttgctctgttgcccaggctggagtgcagtggcgcgatctcgactcgactcactgcaacctccgcctcccaggttcaagcgattctcctgcctcagcctcccgagtagatgggattacaggtgcctgtcaccacgcccggctaatttttttttatttttagtatagacagggtttcaccgtgttagccaggatggtctcgatctcctgacctcgtgatccgcccgcctccacattacaaagcgctgggattacaggcgtgagccaccgcacccggccttaagtatttaatttttaaatcctctgtattccgagccctgttctaggtactgggagctcataaaaataaaccctttctagtctccaggggtttcagagggagaagttgtattcctagaaaagtttagcttttctgtttatgattaaaaacactgtaaggaactattataaggtgtgaggccactgctgtagtggccctgcctcagagccagtgtaaaagcttaggaaacatcaccagctagagagaagcgcccttgggatttgggtgtgtggcctccaggcttttctccatattccacacagatgtggatgtaatgtgataggctctgtcttttggaaaaaaaaaaagtgggggtggggatcattccaccgtgcttgcttccatgttttgttttgtgtgagacagggtctcgttgtgttgcttaggctggaatgcagtggcatgatctcggctcactgcagcctagacctcccaggctcaagtgattgtcccacctcagcctcctgagtagctgggactacaggcgcgcaccaccacacccggccagttttgtttattttttgtagagacggagtctgactgtgttgcccaggctggtatcgaacttctgggctcaagcaattctcccacctcggcctcccaaagtgctgggattacaggtgtaagtcaccacgcctagccttcagtgtatttttaaaccagcttttctgggccccttctggatgtgccaagtgcaggagtgcagtggtgggtaaggagtgggcacaagctctcggaactgggagccccagaaccagcacacaggatttcctcccttgtggcccactggacagtccccggccgggctgtgtttctgtgcagcaggctgaaatgaggcagtgaaggggatttggttctgtttggcttctcagggcttccgagtggacctgccaatcaagtcggcccgctaccgtggccagtacaacacctatcccatcaagctcttctatacgtccaacatccccatcatcctgcagtctgccctggtgtccaacctttatgtcatctcccaaatgctctcagctcgcttcagtggcaacttgctggtcagcctgctgggcacctggtcggtaagtaggctctttgaagatgagctagcaatgcagctaag

SEQ ID NO: 30480 - DNA, 2300 bp, Homo sapien
aacggcctatcttcttaagctgtcttacctttaaaagtattccatctcttaaacttgcttctgagtaagagacctgaactgctattgttttcctgtaattggattgatctttgtattttttgatggtccactttgtattttggtgtttatttaaaagaagggacagagatgaaaggcagtttgatgtttgtgaaaggtatttatacgagctacatgcttttcccattccttctgctgagactaagccacattcttgcttaataaaaagctatctctttaggggctttgccagaatttgcagtcagatcattaagaattttttttttttttttttttttgagacggagtcttgctctgttgcccaggctggagtgcagtggcgcgatctcgactcgactcactgcaacctccgcctcccaggttcaagcgattctcctgcctcagcctcccgagtagatgggattacaggtgcctgtcaccacgcccggctaatttttttttatttttagtatagacagggtttcaccgtgttagccaggatggtctcgatctcctgacctcgtgatccgcccgcctccacattacaaagcgctgggattacaggcgtgagccaccgcacccggccttaagtatttaatttttaaatcctctgtattccgagccctgttctaggtactgggagctcataaaaataaaccctttctagtctccaggggtttcagagggagaagttgtattcctagaaaagtttagcttttctgtttatgattaaaaacactgtaaggaactattataaggtgtgaggccactgctgtagtggccctgcctcagagccagtgtaaaagcttaggaaacatcaccagctagagagaagcgcccttgggatttgggtgtgtggcctccaggcttttctccatattccacacagatgtggatgtaatgtgataggctctgtcttttggaaaaaaaaaaagtgggggtggggatcattccaccgtgcttgcttccatgttttgttttgtgtgagacagggtctcgttgtgttgcttaggctggaatgcagtggcatgatctcggctcactgcagcctagacctcccaggctcaagtgattgtcccacctcagcctcctgagtagctgggactacaggcgcgcaccaccacacccggccagttttgtttattttttgtagagacggagtctgactgtgttgcccaggctggtatcgaacttctgggctcaagcaattctcccacctcggcctcccaaagtgctgggattacaggtgtaagtcaccacgcctagccttcagtgtatttttaaaccagcttttctgggccccttctggatgtgccaagtgcaggagtgcagtggtgggtaaggagtgggcacaagctctcggaactgggagccccagaaccagcacacaggatttcctcccttgtggcccactggacagtccccggccgggctgtgtttctgtgcagcaggctgaaatgaggcagtgaaggggatttggttctgtttggcttctcagggcttccgagtggacctgccaatcaagtcggcccgctaccgtggccagtacaacacctatcccatcaagctcttctatacgtccaacatccccatcatcctgcagtctgccctggtgtccaacctttatgtcatctcccaaatgctctcagctcgcttcagtggcaacttgctggtcagcctgctgggcacctggtcggtaagtaggctctttgaagatgagctagcaatgcagctaagttgcagtggtttctatcagtgtcttgctcatgaacagatatttcatccaaagatattttccattgtgccttttacaaattcagcacattaaattatcttttcagtaaaaaaattgtactgtgggcaccgagtaaaattgcattctttcatctgctcagaactatttttgccttgatgctaaagtaaaatgaaggagcactcacatgcgtttggtttcttcttccccaggacacgtcttctgggggcccagcacgtgcttatccagttggtggcctttgctattacctgtcccctccagaatcttttggctccgtgttagaagacccggtccatgcagttgtatacatagtgttcatgctgggctcctgtgcattcttctccaaaacgtggattgaggtctcaggttcctctgccaaagatgtaagtagaagcaaaactttctggaagggtgatgaaagtgtgactggtataaggggtgtggacttgtcacctcatcataaataatggtctgtgacgtgtgcaga

SEQ ID NO: 30481 - DNA, 2300 bp, Homo sapien
agaagtcagtcccatagaatgcctcactttgactactagttggtggaaaagtttccttctccatatagagaaaggaattgcttcttttctaagagtaatgaccaggaacaagtcaatgaggggctaagcaactttgtggggtgctgtctctagtgctgatgaaccacatgccctagtaacaacctcagccttccaaggcctggcctctgttcttttaggccctgaaaatgccaaaagattccattcactgatggaaatcattaccaagtcctataaaagccaacgtgtaaaatacatgcagcaaaactgatgaattcaagtgtatgtgtttgtgtgtggtctagaaccttaattgaattcatgagaagccttaattgtgagctgtgttgtaggctgtgtgccaggcacttaggttaaaatggtaaacaatcaaatgtggtctacaccctcaaaaggcctgcagtttactgggagagaaaaacattgacccagtaattatgcaaatcattagaaacctagattcaaaagaaaagaaaaaagtatatagaaacctagattcaaatgttagaatcaagatgtacaaggaggtgtgagaggccgggcgcggtggctcacgcttgtaatcccagcactttgggaggccgaggcgggcggatcacgaggtcaggagattgagaccattctggctaacacggtgaaaccccgtctctactaaaaatacaaaaaaattagccgggcgtgatggtgggcgcctgtagtcccagctactcgggaggctgaggcaggagaatggcgtgaacccgggaggcggagcttgcagtgagccgagattgcgccactgcactcccgcctgggccacaaagcaagactccgtctcaaaaaaaaaaaaaaaaaaaaaaaaaaaggcggtgtgagactgtggaactactgtaattggatttgatttcaggtctgtctcaattctaacataaactctcctgcactctgggcaagtccttcccttcctctggatgttagtatcctcttctgtaaaaatggtgtcataccatttgcttctgaggaaatctctcctatttgttggaattcagccaaggcaacatcaccttcatgatgccttccctggctctccaggctgttccgggggcttctgctctggtcttctcgccacctgggtgtacctgtctcagcacatctcacgttgcaagttttctaagcaagaagtaaacgcatcaagacttttatccctgtatccccagtgcattgtggtgtctggctcgtgtttgttgaacggatggatggatggatggcaagtacaattgtggtgcaggttgtgctaatatcattatgaaacctgaagggacaatttgctggctgattgtctcagctggagtcatgggacgtgatgagcattattatataggttttgaagcctgaagatttctagttctgattatttgtgatgctttcttgggcggatgggcctctttccgcttgtttgtagctgcatgcgtaattacactaccttacagggctgtggaattttgaaaactgcaaaatgttatttacagtcaactgaactcagcaggaaccttatctctcggtggaggatggaggatagaagcaggggaagacaattccacggaaacggtggtgggttgagctgggcctttccagggagatgcaaaggtatgggagtcagaaaacattggttagtaaccaatcccagtttaagctctgaacctcagttcttctgtttccaaaacggaaataataacttgagatttgcgtaagagtatgacgttcaaatgtgctaatggataggacggaaggattaggagtggtacccgggggccactgcctcgtgcaacgccccagccctagatcaaatccggggcgtggtcccactgtgctcccgaccccagcctcggcaggaagcgccggctacgggggaagccaacccggagacacagacggaagtgggtgaccggagctctagcagcagccgcgatgggcgcagccgtgagcctatggagagcggaggtgttcccgcttccaccaatggaaagccggtctaggcgggcctttgcaaattgccctagtaacggccgcatggtaactcaggcgccgggcgcactgtcctagctgctggttttccacgctggttttagctcccggcgtctgcaaaatgaagattgaggaggtgaagagcactacgaagacgcagcgcatcgcctcccacagccacgtgaaagggctggggctggacgagagcggcttggccaagcaggcggcctcagggc

SEQ ID NO: 30482 - DNA, 2300 bp, Homo sapien
ttttttcttttcattaccatttcaggattctgtttaaaacagaggtaagaaatgaggtttatttgaagccaggccctgtacaaagtctttgttagttgaaatatttctcagaggtacataaagcctctaaagctcttattacctatttactaaccctcccttttaaatacgtttactgcttttactactagattttttttaatgggaggcgtatttttacagtttcctatttgcaaggtgggaaaacggaaacaaagattctgttctcttcttgtaaggaccctaatcccatcacaagggcccgctctcatgatctcatctaacctcccaaacgtcccatctccaaatactatcacactgggggtcagggtgtccacatatgaatttgagagggacacaattcagtctatgacatggactctgttcctagtggagagtggtggaacgaaggaggcagttactgcaagcatgaatacatccgcacatggtctggctcatcacagagggcaaaggtaagatcctgtgaactttgtgctccaccgccacagtgttacaaaaacactctcttctccagaaaaatggaaggaggaggcaatgttgggctagcattcctgcctggtatcactggctgagactgagcagtggcttccctctttgcacaggaaaagggctctccaggtctcccaggtccccaccactccctgtcatcttagactcttttaacttctcttctttgatttacccaccacctggccagagcagacacttaggtttgttacctctggttggtgactatggctgacaaccttttttgtggttctagacacttcagaatctagtgagagttgtcgaccctctgtctagcaagagcacatcacaacacattgtgcgttcaatttagaggtttgtggcctctcctaagcccaggctacagactctcagggtgagaatttctgagtcagagataatgttgtcctcttccatcttcaaaccatcttttcccatggttggctccttctcaacactggagtttcaactcaaacagcaactcctagatgtcttccctgacccacagttaggtagctgtccatcctccctctcctgctcctttttatctcagcttttattttccctaggagacttctcgctctctgaaatggtctggttcaggctgtattgtttgacttagccctcaccccctgaatgtaatattagcgggcactgtagcccagcggaacccaccaggcacttggtaagatcttgctgaaatgtatgaatgattggaagtgtgtccggagttggtttcttccagtgggttcctagtctcgctgacttcaagaatggagccgcggaccttcgcagtgagtgttaaagctcttaaagatggcacagtcccaaagagtgagcagcagcaagatttattgtgaagagcaaaaagcttctgcaatgcgaaagggcacctgagagggttgctgctgctggcgggggtggccagcttttattcccttatttgccccctcccccacgtccccccgccctcccccgccccccgccgtccccccgccctcccccccgcccccgtcttcccgccccccccgcccccgtcttccccccgcccaccccgccccccccgccccccttcgcccccccatgttccgtttttgtcctatcagagcgcccttttttcaatcctccctgtgattggcttcttttaggatcctgctgattggtgcatgttacagagcactgattggtgcgttttacagagcgctgattggtgcattttacaatcctcttgatagctatagaaaagttctccaagtctccactcacccagaaagtccaaatggcttcacttctcagaaggatccctccatctcgggctcctagaggcttcaggcaggaggagccacgtgagagagaaaccctgcctacggtgacctccagttcctagaccacccactcggagcacggcgctcggctgtgcccgtgagcctcaggagggcggaagcttccgggccggaacgggtgtgcacagcgcgccggttacgggggggcaacttaacgggccggaccgcggcgactaccgagggaggtgaggggcgggccgggcgggtgtccgaggcggcggcggcggcatggcagggcggcgggtgaacgtgaacgtgggcgtgctgggccacatcgacagcggcaagacggcgctggcgcgggcgctaagcaccacagcctccaccgccgcctttgacaagcagccgcagagccgcgagcgcggcatcacgctcgatctgggcttctcg

SEQ ID NO: 30483 - DNA, 2300 bp, Homo sapien
tccatgttctaaaatgtactttgatgtgaccaaacagaattcagttataagggggcagggaggaatgggtagagaattgtgtgccccttgaaattcacctgactgaaacatggattgaggagaagactttagatagtgtgaccctgagcaagtcccttcacttcttcaaacttctatttcctctactgtaaaatggggaaatgatctcagactgcctgtaacatgaaacagttgggaggtaacaaagatgaagtactgtacttaacaagctcaccattatagctgggacccagaatgcccagtgaccaatgaggccatctgccaccaagccaattatcatctgcccaatatatattcccatgtgtggcatacagaatattgctggaaggaaacacaagaaaatgggaacagaaaggtaatcaggtactggggtcagcagtgagaagtatacttctttagctatatacccttttataccatgtgtttatattattgtatcattttttctaaaaacaaaacatgttttaaaactctatccatatatttaagtggagttaaatgggtctggaaaagtaatccacaaaggtataataatggtcttttcagccaggcacagtggctcacacctgtaatcccagcactttgggaggccgaggcatggggatcacgaggtcgagatcaagaccatcctggccaatatggtgaaaccccatgtctactaaaaatataaaaattagccaggtgtggtgatgtgcacctgtagtcccagctacttgggaggctgaggcaggagaatcgcttgaaccggggagaaagaggttgcagtgagccaagattgcaccactgcactccagcctggtaacagagcgagactccatctcagaaaaaaacaaaaaaacaaaaaaacaaaaaacgggtcttttcatttgcagagataggaggggtacagaatttaggacagaggagtgggtaagggaatgtttgtcttatttgtgatgttctatttcttcacaagtagcatgtattcatgtattacatgtataattaaaaattaatggtacctctttgtggggcattttggcagtacccaccacgaccgaaaacacacatgccccttgccccagccagttattatctattatcctacatatatgcgaacataccaaagagttctgttctagaatattcactgcaaaatggtttgtaaatactggaaacagcataaacgtccatcattaaaagatttgttcagaaaatgttggtacaggccggacgtggtggctcacgcctgtaatcccaggactttgggaggccagggcgggcgggtcatgaagtcaggagtttgagaccagcctgaccaacatggtgaaacccgtctctactgaaaatacaaaaaaattagccgggcgtggtggcgcgcgcctgtaatcccagctactcaggagactgaggcaggacaatcgcttgaacccaggaggcggaagttgcagtgagccgagatcgtgccactgcactccaggctgggcgacagaacaagactctgtctcaaaaagaaaaaaaaaaaaagaaaaagaaaatgttggtacaagggtgcagttgaattctatgtgagctttaaaaagaatgatgtagctttgtgtacagatatggggcactctccagacacaatgttgagtgaaatcgtgtctaaaaggatgagggaaagagggatttatacatacacacagatatgcttgtattgacgtggagcctttctgaaatgatatacaaaaactggtagcagcggttggctctaggaacgggaatcagaccaaatgacaggtgaatgaagacagcctttgtatgtataccctttttgtagcttgtgagttttcttattttgagttttctttacttgaccatgtattataaacacatttggtagggattttttgatttttttttttttttttttttaaggaaggcgccttgcagctcggttctgctggatgggaaaagctgaatctcaaagcctccgctcacttgctgcggagccctaggcaagtcacgtccgcctcttggggcgtcaggagccccaccaatgaggtggggcgatttcccgtcccggcaaaggctcgagcgaattcggacacggggcccggtcgctccgcccgcgtccctgagcccggctcccgccccggcccgcgctcaccgccgatgatggtccggatgagggaggcgtgcccggggcagtcgaccagcgtgacctgaagcagtggctcgccgggctcgggctcggcctcgggcgctgcctggaactc

SEQ ID NO: 30484 - DNA, 2300 bp, Homo sapien
attttttatttttagtacagatggttgtttcaccacgttggccaggctggtcttgaactcctgacctcatgatccgcccgtctcagcctcccaaagtgctgggattacaggcgtgagccaccgcacccagcctcaaagtaaaacgttacttttaaaatacatactttttaaagattggcactcagcaggactcaggtcatcaggacagagtcccctttcctttttagcaccggcaccctcccgtgacggggagctcactcaccctccgagggggtcagcctggctctgacttggggaaacctctggctccacgtggctgagacctgctccctgggatcctgcccccacccatggatgccaggcctgaagatgagtgggcactcgccagggagcgtggcctgtacaaaggccctggggctgcagggtgtgtggtgcagtgcaacaactggggaggccagcacggtgggaggtcagagaccagagacagaaggccggggcaggtgggtgggcccaggccaccaggcccttgtggtgaggatgagatgtgcagtccttatgcttagcgcagggagagcctgatttaaagctaccaggcaacgtgactgaacgtgggtttggcacagctgtcccgggaagaacttatgcgggtgggtagaaaggggaaggctgagaacgggagcagcaaggcctgtgcagatggcaggggccagcagtagagagtggataggggtcagggttgggtttgaggtaatcaggacagggcagccacgttatttgtcaacccagatggtgggcacaggagagatgacagtccccctgcagaaccacccctggcttcctgatagaaacagcccaggccctggaggcagcacccactccctccttcatgttcactaggctggagctggccccatgtccccacaaagctgagaaagctatgccatgaactcacttggcacatttattaaccatcaggctatgtctgcggccccacgtgtttgctgccccatgcacggtggtggtggtgggaaggcagggccgggtggccagcgcctacttgctgtccatccatttgagctgctccttgccgttcacagtcaccgacttgagctgcccgtcttcctccacctccacgcgctcctgcccgttctccacgatgcgcttggtggtgaccttgtggccattgatcatctcggtggacgacatcaccgacttgaaccccgagctgccagaactggagcccccgaaggaggtggatgagaaggtggtgtggctgcccccgctgcagcccagcatgttgaaggatgagaaggcctccatgaaggccggaaattctccaaagcctgccgagaaggcccccctcaggccatggccccggccaccacggtcactattgaatgggctgtcccagaactcaaaggagaaagggtccaggccaccaaaaaactcccggaagatgtcctcagggttacggaaggtgtagccggtgtcgaaggggctgtggtagggcgtgctggccccgccaccagcccgccagctgtcacagccagcacggtcatacagggagcgtttcttggagtcagacagaacctcataggcctcagacaccagcttgaacttcttctccgcctcctccttattgtcagggttcttgtcggggtgccaacgaagggccagcttgcggtaggctttcttgatgtcctccggggaagcgctggcctgcacgcccagcacttcgtagtagttagccatggccaggggtgtgggtgagaggagagggaacgtggaggccaggtgggcgcaggggcccagctggtcagatggacgggggagaagtggccggtggtctggggcccttcagcaggggcctggctggactccgcaagctctaggcaagattctgcccaggagttcaccttttcgtagtaccaattctcagggactggaggggcccccactgagaggagtggggggaggggagggacactgccgctgtggggccaggccagagtgggctgccctccagagctccttttatgacgtcagctcccggggcggggcatacccccgcccccagctcctcaccaggcaaacctgggcatatgggcctgcccctgctggtgaggtggccacaacggtgtgtgggaatgggatgctctgtgacccaggtggtgtgggctgagtcccgggagccaaagggcagaggcaggatcagccacgggattccagccttggtgagtgacaaaggtctgtggccgtggtgggggaggcgggcaagggcgtcctgggtatgtccactc

SEQ ID NO: 30485 - DNA, 2300 bp, Homo sapien
ggaagggatctgggcaacccagtgggcacctgtcatcactggcttggaggactgggcaggaaggctgcctgaagaggtctgagagcagagctgagatcgccctggcaccactggggaggacgtgagctcactggcccttctacggttgcgtagcccaccgccttcccaccccatgggccaccaatctgcatgtaagcctgccatgggcctgtctgcctaccatggcttccactggctcaccaggcaggctgccctttcatctgtctctgcccacccattatcgacactgccaggatgccagcacacgcacacacagctccttctccattctgagctcctcacagtaaccctgtgagaggggaccatcattacttcccttttacagatgagatgaggacactggggcacagccaggttattgacttccccaaggacacatggctggggagtggcagtgctggggttggaacccaggctgtgtcacctgacaggctgagctcttccccactgtgggatctgccccttggcccgtctgtctgtccatccgcccatccactctgtgactgcccaccgttcagccccttcattcgcctgccactctgtccatccagccgcccgtccatccatccatcgctgtcgcccatccatcctggagctaatgcagttagaggaccaggggccctgaggggagagaaggccccaaactgcccatctggccgggccagggtggccgggggtggggtgggctgcccaggccaggcaggcctgcagggggctggagggaattagctgagtgactgccaggatcatctaattaggaactctagtgataagcagataggatcgggggtgattagaatccttttaaaaagccactccattaattacagagacagagaggggcctctggctgctccgaataccaattggctgcttaatcggctccatcagctcgcccgggggagaccttcctggtactgctgtgtgaccttcggtgtgccctgccctctctgggcctcgcttggtcgctgaaggtccttctctccctggccatggctcggggttggctttagggtgggcctgagatgagggacatgggacatctgaggccaggaagcctaggctggctccccagagagggcaaatccccaaaagcacccactggtgaatgaggacagagaggcttgaagaggggaggtggcctgacagaattgacggtggagcgtgtggggcctaagtgtgcgctcatgcctgtgtgtccctgtccctccagcaggccctatggaggcctcagagcccctgatgctccccactggctccccaaaaactggcgtggaaggagactagcctgaaccctttgcagaagggaaactcctctgcacactgcccggctccacggtccacagctcccttcatggggagctccccacaggggcctccatctcaggatgcccttgatggtgaggtgtgggacctgctcccaggtgacacacctgttcccgtaagtcctaccgagtggtctgttctgtgtgccctaagacagccctgaatgggcggcagtgagggggtctccagccctgtctccatcctggctgactcccacagacccatcccaggaacaagggttggagcagggcagtggctggaagaaatttcccctgggagtacaacgcagaccagagccagggtctccaacaaggcagggagggccaggacggggaggcggccacaggattcttggatgcctcatcatactaggtcctttgtctcttaacattgttttcaccacccctcctccactgtcctgattccatcgtcatggaaacttcaggcttcacctttacaatgtcaggccaccaacaccctcagcagtgtcaccatcaccatcaacaccccagcgtcccatccccatctcctctaccactgccaccagccccactatcactatcatctctgtcaccgtcaccacggtgctctccacccgtgtcagcattgtgtcaccaccacatcactgtcaccacacttcctccacctccatctccacccaccatcccatctgtgacatcaccttatcagctctgccaccagtatcaaccactcacaccgcctttgccatcaccaccgtcattgccccctctactaccaccaccatcaccaccaccgggtctgcctcagccagacccaccactgcctctaattagactgccaccatcatcactgccaccaccactgcccctccaatgccttcctgatgtcaccatctgctttctctctgctatcctcacacccaactccatcaa

SEQ ID NO: 30486 - DNA, 2300 bp, Homo sapien
cccaccacgaggtgtcccgcacgccacggagccccagcccagatccggcgagaaagagcaccagtcccgggtgggaggaaagcccaaggctcaaaacgaaaggaaggcgggggagggggttcagccacgcacactcacgtggtgacccgcggctccagaatcacacacccgtgcacatggggtcacgcccggggacgggtcccgacaccagtgaccccaacaaacgcacagagcagcacttcagtcagacactcacactgagcccccccgcccggtagacaaacacatgaacacagactcaaaagttggagacaggcgcccgggcacccagtgtggcacttgatcccagcgacacgcacacacccacacttggcgccagatacacatactgatctcaaccccgaaaacatgcacacgcagccccctgagcgcagtactaagcggcacaatcaggacctctcaacaaagcacaccaaagcagtcgcccgcagcctggccccccgccctaagtccccccagagtcccctcaaagctaggagcgccccaggcccccagccggctctcaaaccccaaacttacacacgcagccgtggggaggggagggactcggcctctgagagtgaaggagttccggcgggagccccgagggcgacgggcccagggacagcacgtccggaggctggcggggcttacagggtaggagctgggggtagagtgcgcctcggcctcgggccctcccggctccggcccctcggcatcctccggccgccctggcgccagctgccgactcctgcacagacatgaagcgggggccgcgcacgcctaagaagcccaagccagccaatcaacgccgcgcgcctcccagcctccgcctcccattggctgcgtccgcaattcccgaaccgctggactccgggactgacccgcgggccggcccccctcagccggcgggccccctccctgcgcgctcctggcggcccctgctgccaacgcgccccaccactaagggaccctcaccccaaggcccgacccctgcagcccctcttgcgaacactccgggatccctcgatgctctgggcctccctagcagtaactaaccaccaactgccccctccccaggagcccgggccgcacaccctctggatggcctctccccgagaccctaaccccgccacgctccttcaccgctgaacgtggtcagtccgagcgcagttacctacccagaccgttccctcccctagctcgggcgctgtctgggtggactgggggttgggatggttcggacgacagcggcggaacagcaggagccgagaggggcagagaggggcaggaactacagggctctagagggcacctgggcctcggacacgcggccgctcagggctgtgcttgacccagtggaggtggcccggccggtggctccagaaagggggagggggcacccctccccgggcgtggccttcgcaggccaacgggcccaattgcctggggcgaggccgtggagacccggactggcgccggcgccagctggagggagacgcccccgggcaagaggtggcattttttttcctccggggggggtccccgaggtggcctctggtgagggggaggcggtggtctgaggtctccgtcttctaagtcacctggaagtgctccccactcacttctagcccggagatcggctctatggttcgtgtgggccgggcgcacaagtcttcctccctcccattgtacagactggggagacggaggctcgaagggagccccgggccgaggagggaggtccaggacaaaggcattttgggggacctagacaggtgccgagtactggggggactcaacagcgtcctccagccctcttccctgttgggcccgaggctcccggggtagatgtccagagggcccccaggtgggtcgggggcaggaggagggctggggtcccggccacccccgggagagtgggggaggggcggcgggattgacagtcggtaattgggtaactggaggcggcttctccggccgggcggccccgccaccgcgacgccgagcccctgacgtcacccgattcgccaggaaatgaactttttaataatccgaggagggaggaaagccctcggtcccctcggctccgggggcgcccggctgggcccagctccgcgggcgcgcccccgtcaccccctcccaggccagttcagggcagcgccaaggggccgcgggctcaggctgaggcctcctcctgcctaggcgtctggcgtccgtttgtctgtccgaggcctcagcgcaggtaaagcgcggggctg

SEQ ID NO: 30487 - DNA, 2300 bp, Homo sapien
accgatcgcggccgggcgggaagcttccgctcggtcctggcgttcacagcccagcggccagctgctggtctgcctcccgcgctgggtcccagggttcgcgctcgagcggggcagctttgccggacacgggggattatccctggggacgcggtgtctttcagagggtcttgctagtctccggagacgccaaataggctcgagctccgcggcgatctcattttacgagttgatgaagaatcgtaagctaaaggatgggaaaagttgagagacagacggacggagagacagtgggccccggcgggaccgcacgcgttgaggggaacgccaaccgggaggcacggagactgctcacctgcccggcctggccgcggaggcccggcgccaagggcctcgcgctcggcctcccgccccctgcgcggcttcccgggctggcgccggcctccgctcccgcagagtggagttccgagcagaccgggctccgcgcgctccagcgtggaggggagcgggaggcttagcaggcggctcgggcaggcgggtcccccaagggcacgagacgcgctggttcccagcccaatggagctctgcgccccccagccccgcgctttacctgcgctgaggcctcggacagacaaacggacgccagacgcctaggcaggaggaggcctcagcctgagcccgcggccccttggcgctgccctgaactggcctgggagggggtgacgggggcgcgcccgcggagctgggcccagccgggcgcccccggagccgaggggaccgagggctttcctccctcctcggattattaaaaagttcatttcctggcgaatcgggtgacgtcaggggctcggcgtcgcggtggcggggccgcccggccggagaagccgcctccagttacccaattaccgactgtcaatcccgccgcccctcccccactctcccgggggtggccgggaccccagccctcctcctgcccccgacccacctgggggccctctggacatctaccccgggagcctcgggcccaacagggaagagggctggaggacgctgttgagtccccccagtactcggcacctgtctaggtcccccaaaatgcctttgtcctggacctccctcctcggcccggggctcccttcgagcctccgtctccccagtctgtacaatgggagggaggaagacttgtgcgcccggcccacacgaaccatagagccgatctccgggctagaagtgagtggggagcacttccaggtgacttagaagacggagacctcagaccaccgcctccccctcaccagaggccacctcggggaccccccccggaggaaaaaaaatgccacctcttgcccgggggcgtctccctccagctggcgccggcgccagtccgggtctccacggcctcgccccaggcaattgggcccgttggcctgcgaaggccacgcccggggaggggtgccccctccccctttctggagccaccggccgggccacctccactgggtcaagcacagccctgagcggccgcgtgtccgaggcccaggtgccctctagagccctgtagttcctgcccctctctgcccctctcggctcctgctgttccgccgctgtcgtccgaaccatcccaacccccagtccacccagacagcgcccgagctaggggagggaacggtctgggtaggtaactgcgctcggactgaccacgttcagcggtgaaggagcgtggcggggttagggtctcggggagaggccatccagagggtgtgcggcccgggctcctggggagggggcagttggtggttagttactgctagggaggcccagagcatcgagggatcccggagtgttcgcaagaggggctgcaggggtcgggccttggggtgagggtcccttagtggtggggcgcgttggcagcaggggccgccaggagcgcgcagggagggggcccgccggctgaggggggccggcccgcgggtcagtcccggagtccagcggttcgggaattgcggacgcagccaatgggaggcggaggctgggaggcgcgcggcgttgattggctggcttgggcttcttaggcgtgcgcggcccccgcttcatgtctgtgcaggagtcggcagctggcgccagggcggccggaggatgccgaggggccggagccgggagggcccgaggccgaggcgcactctacccccagctcctaccctgtaagccccgccagcctccggacgtgctgtccctgggcccgtcgccctcggggctcccgccggaactccttcactctcagaggccgagtccctcccctcccc

SEQ ID NO: 30488 - DNA, 2300 bp, Homo sapien
cgtagacatgcagacacactcggatacatctcctcctccccaccatcagttcaaagatacaatgatatacactgatacctatgctgttaaagacagatggacatgcacatagccaaatgcatgttcaaatacacaaacacaaacacacgccccaacagccatcaattaataaagagaattatacatggatatccagacacatgcaacacaccacacacacacacctacacatacaccagttcaaggacacatgcagatacccaggtacaaactattaaagacacacacaggctaggcgcagtagctcacgcctataatcccaggactttgggaggccgaggtgggaggattgctttagtccaggagtttgggaccagtctgggcaacatagtgagactgtgtttccacaaaaataaaaataaaaataattagccaggcacggtggcacatgcctgtggtcccagatactcaggaggctgaggtgggaggatggcttgagtctgggaggttgaggctgcagtaagcgctgattgaaccgctgcacttcagtctgggtaacagatcaagaccctgtctcaagaaacaaaacaaaacaaaacaacaacaacaacaaaaatacacacagtaacacatgcctagatacatgcacatacacacgcaaacacacactccaaaacacacccattcatagacatgccacacactgctacagacacatgggcaaacacctggaaatccccacccctcattacatgagtctctgacatgatgaccccacagacacagagccaaagggacgcacaaccatttccacagacacactctcttgtgccaaattccagggtcatgaaatagccacactgtgacctactgcccaatacacaaactctcaggaacccacaagaagaaatgaacatactcatacacccagttttgcagacactcctgtgtgctcctaagtgcacacagacacacctgggcacacaggacatagactctgagccacatgcatagaacacacacacaatgcaatagtcaccaccagatttggagaaagacctatggacagcaggggtcacaaagaccaggggacagaaacactcctctggggcacacctgggcacgggagcacagatttcccagtccttccaagcccaagcactttccctctgggctcaaggtccccaggccactttcactctccctgatctgctggaatgggaatcaggggtgggggtggggggacgctgactggttgaatcccttagtaagaactttggcagcacaaggactggactgtctttgcccacaaacccaggggccttctggggatgaggactcccacactcactttctccccccctcctgactcccacttctgtgaacaagccctctgcacacttccttgcttcccccattgtgagagtctgccccaaggagatgggccagggggacaccagacagtggacttctaaagtgctcagggggtcccccagcgttaggaactggagggggggtgggacagggagaggggctgcgcctgcacttagctaaacaagcctggcagtgagggcgtcctgagtgtgagcccgagtgccgagttgcatctgattgtatggccatgtgtgtcggtgtgacccaggccgtctgtctgaggatgtcctcgcggccacagctgtgtgcacatgtgcagggatgtgtgcgtgtccgtgtgagcactcctggaagtgggttgaagacagaggagcgggcgtctgtgtaccattatcagtgagtgcgtgtgctcacagctcctgagggtccccggggagagtctcagtaaagacgtgtcccaagctttctgagcaagcatccctgaggtcaggggcgcgcgtgtgcgctccggagagggtgggagcggcctggagtgtggatgcacagggtgtgcgcgccctgagtgcctagcggcccttggccggccaggcggctggacctggtaggccgggtgcagagccccgggtaccctcctgccccctgcggcgctcccgcccccgtcgccaccccctgcccccccgcaaagtgatgtcgaaataaaaagccgcgttgcggccggtgggggagagagaggcagcgtgagcgccaggaaggtagcgaggccagcgtcgccccgggactcgctgctcaagtctgtctattgcctgccgccacatccatcctagcagggccccgtcgcccaccaggcggacaaaagcggtccgctgaacaccatgcggccgctcggcgtgccgcccaggctctgctggtgagcgccgccaccccgc

SEQ ID NO: 30489 - DNA, 2300 bp, Homo sapien
acatctcagctcttaggtcccagcggtgcatcggtggcaaagaatgtcccctgtcaccacggctgcttgcctttatttgaagtgtctggctgagctatctccctgtgacatgcttctttcagagcgaattattcatccccccacagcccccacctctcccggccctgggctctgttcatccccgcaggtgtgaagacaggcccggcctttgtgtgtgaggagcctgccccctccttggctcccctcttggatcccctccaggcctgtcaaggctttcctcgctccaggcccttgcggtgtgcggggctgatgtctcctgtcatccagggagggctgcgcagcctccagcccgcctctaatctccccctccacaaagggcagccctgtcactcagggaggcagtgggggaacctggatccggggccacacaatgaaccatccaccctgcctgagtaggaggaagcagcctagcagaggtggctgttggggcagagggcaggtgggcaggggcctgggcagagagggtgagagctcagccatcttaagccaccgaagtcagggaatcaagcttattttggtggagtacacaagtggcataggccaggtgcagtggctcacatctgtaatcccagcactttggggggctgaggcaggaggatggcttgaggccagaagttcaagactagcctgggcaacatggcgagaccctgtctctgcaaaaaataaaaaaaaaaagctggatgtggtggcgcccacctatagtcccagctactcaggaggctgaggtgggagggtcacttgagcccaggaggtggaagctgcagtgagctatgattgcacctctgcactccagcctgggtgacagagcgagaccctgtctccagcaaacaaataaataaaacaagtggcacagagcaagctggccaatcctggtagtgctggctaatggttagtgcagagggggcagtctcggtggctgacttggagccatcctacaaaaatgagggaggtacctatagaaatagggtcagcttccccatcctccaccagactccagaattcttcctcagcctcctgcattagtggtgatgaaaaaccgatgcagggatgcaggggtggagtgagcaagccgagaccagcctggtgcccagggtcaggagcctgctcttttgagcctcagtcccctgtgtgtccacaggaagcacagtgcctgctgcctgggggggcctgaagacacaggatgggtccccgttgtggaggtgcccgggcagcacctgcatatagcaggtgctcactgttggtgttggcatggtggcacagagcagaggtggaaagcaatgtgccgcctgcagacaggcttttgtgacctaccccgtgtctagaaatgtatcttctgagttactaacaaggaaaaatgtggccacacaaggtccaccttacttcaaggcatggcaggctgggtagagcagtgctgcccttggagatggcacagggtcccccctgcctgcacccctgggttctcctccacctcctgccactccccctttgtacaccagctggtgacactcagtcacaagctttcgttggctcctgagacatttgaggttgagagctctgggacctggagcagactcgggtttgcatcccaccacttcattcgcgacctgtgtagtcaaccttgctgagcctcagcgtccttatctgtaaaatgggactcacgatcttcaccaaatgaaaacaagcatacatcacctgcccctgaacctggaagagagagcggattcccaaccaaagagaagacacattgctgaggctgcctcaccatggctcactgctgacagcatggtgtgcactccacagggctcagctttccccgtgggtgggcagcgtgacccgggcaagcaggcagggctgccagggccttggcctcggcccagcacggagcgggcaggggctgtggccaagggtctctggaggaggccacgtctctgcagaggagacccctcctgaaacaccctccaagctggaagctggcccctcagaggggaaaacaggtgccgtgggcgactctgagctccccactgtaaattaatccacccgagcaattgggaacagaaagtgcttcctgtcccggcctgagacaatggacaataaacccagcctgctgggccccggcccctgaccccaaggcttcaggaagaggctcccacacgcacacacctgcggtgtgtgaagctcgcattgttctgggctcatggccgagtagggccccttgctctcaggagcctccagctctttct

SEQ ID NO: 30490 - DNA, 2300 bp, Homo sapien
taaagatgggcaaccagcagtcctcgggctgctctgtcaatggagtagccattcttttattcttttactttcttaataaacttgctggctgggggcggtggctcatgcctgtaatcccagcactttgggaggctgaggcaggtgggtcacgaggtcaggagtgcaagaccagcctggccaagatgttgaaaccccgtctctactaaaaatacaaaaattagccgggcgtggtggcgggcgcctgtaatcgcagctacttgggaggctaaggcagagaattgcttgaacccgggaggcacaggttgctgtgagccaagactgcgccactgcaatccagcctgggcaacagagcgagactccatctcaaataaataaataaataaaataaaaaataataaacttgctttcactttgcactgcggactcatcctgaattctttcttgcgtgagatccaggaaccctctcttggggtcaggatccagacccctttcctgtaacacaggcacttgtcaccaggcccggctgatttttgattttttgtagagatggggttttaccctgttgcccggtctagttttgaactccttggctcaagggatcctccctacttggcctcccaaagtgctgggattggtggcatgagccactgtgcctggccttgtctgatatttatgactagattgaggtaatggattttcaataattttgtggcaataccacagaagtgatgtgcctttctcaatggatcctattagtagatacctaatgttactatattttatatgtggtgatgttaactttgatcacttgtttaaagtggtgcctgccaggattctccactgtaaactattttttcctttgtaattactaaacattttatttttattttttaatttccttttgagagggagtctcgcccagtcgcccaggctggagtgcagtggcacgatcttggctcactgcatctcctgcctcccgggttcaaatgattctggtacctcagcctctggagtagctgggattacaggcacgcaccaccacacccggctaattttattttatttatttatttatttattttgagaaggagtctcaccctgtcgcctaggctggagtgcaatggcgcgatcttagctcactgcaacctccgcctcccaggttcaagcgattctcctgcctcagccaccccaagtagctggaattacaggcgcctgccaccacgcccggctaattttttgtatctttagtatagacggggtttcaccatgttggccaggctggtctcgaactcctgacctcaggtgatccacccgcctcggcctcctaaagcgctggaattacaggcgtgagtcaccgtgcccggcctaattactaaacattttagtagagatgttttgaaactttgcatatatcctgtttcggcttcaagttctgcctactaattttagcattcatccgtggatgttggggaaggccaacttttactttctcaatctgagcaaaatttcactgttttaaggagcaaaacgagcagaattattggacaggaagaatggtaggagagagtagagacctaggcaagggccgctcctgtaaaaattaggtaagtgaaaactagtaataataagtacactcgcggctgggcgcagtggctcacgcttgtaatccagcacttcgggaggccgaggtgggcggatcacgaggtcaggagatggaggccacagtgaaaccccatctctactaaaaatataaaaaaaaattagccgggcgtggtggcgggcgcctgtagtcccagccacccgggaggctgaggcaggagaatggtgtgaacccgggaggcggagcttgcagtgagctgagatcgtgccactgcactccagcctgggcgacagagcgagactccgtctcaaaaaaaaaaaaaaaaaaaaaaaaaaaaaaaaaaaaaagtaagtacactcgcactacgaacagaaggatatcccgagcagctctgagagggctttagcaatcaggcgccgggtcggcttcccggttgccccggagacagggtccttccttgttcggcgccgccatcttgtgtcaccagcccttgcccaatgaacggctgctcagtggcgggagggcgggctaccgcgcccgggccctacccgccctggcgcactgctcttcccggtcatggaggcgccagccgccggcttgtttctgctcctgttgcttgggacttgggccccggcgccgggcagcgcctcctccgaggcaccgccgctgatcaatgaggacgtgaagcgcacagtggacc

SEQ ID NO: 30491 - DNA, 2300 bp, Homo sapien
tcccagttgctactttaccttcaaacctagcattttgattggctgcctaacggggtggaattatcataactcttggcctttgaaactattttcagttttcattcccctgaatactctgcaaattgtacacattgagcacctactgtaccccaacactgtttcaagaatcagggatatcgcagtgaatgagacagacaaaaatagctgccttgtggagctgccattctagtggggaagacagacaatatgcaaataagtgagtagtataagaggaaaaactttgggaggctgagtcgggaggattacttgacaccattacttgacaccaggagttcaagactgcctgggtaacatagtgaaaacttctctttacaaaaaaaaaaaaaaaattagccagccatagtggtgcacgcctgtggtctcagctactcaggaggctgagacaggaggatcacttgagcccagaagttcaaggctgcagtaagccctgattatgccactgcactccagcatgggcaacagagcaagaacttttctcaaaaaaaaaaaaaagaaaaagaaaataaaaaagaaaaaacagaggagaaaagcagtagggagatgtcaatttttgtgtttgtattgtggtgacagggagagggacttcagttttaaatagggaaggctatttcactgaaaaggttactttaaagtcaagaccagaggaaagtgagggagtggccaagcagatacctggaggaagagctttccaggtagagagaagtacaactgcagaggtctgatgtagatgtgtgccttctcttttcttttttgtttatcttttggaagagacagtcttgttatgttgcccaagctggtcttgaactcctgggcacatgcaaagtgaaagcagagaaagagtggacttaccccagaggcggatggttctgcagtgtgcaaggccatttcagaatacacatagagaaaacaggagaataggtggtgagggttttggggaaagagccaattttggttgaaaaagtaggggaaaccccagacattgtaccatctcagggttgagactgcttgcctagcttttgagattttttttttccccagacccctcaactcctgagatcttatcgggaagctgctgatcaccagttttaggtgtttttatctattgggagactgcctttctctggtctggctgcaaccaattattattttagagagacagcttaacctgacaaccacgtcatggttgcctcacattgctggtcggggagtggcccctctcctgccctgctcaggtctgactacttactgtaacaattgcaaggtttttggatggaacaattgaaagaatggagcttgcatgaaccaaaataagaaaagactatgagagggcattgttgaagatggaggcaaaaattctgagtggatcctgatgtgttcggatggggctggtgcttgggaggctgctctgtgcttacaagaagagttctacccggtccatctttatcacatcttctctaatactaagttcagagaggctttagctcattttccattttcttgggctgtctcctctgccagacaaagtgcctatttctcctgtctctatcaccgagccacacaattgctgtagtcatttgcagtctactagaacgataacacatattggcatcagacagatcttggttcaaaacctcgctccaccagtttctgtgttgagctagaccaagtgacatgatatactgagtctcagttccttatttgtaaaatggtgataataatttttggttaagtaattaaagtaaggataaatgatgcctttcgaagaaggacacaactggaatggccagtttaccccttgtcccctcttcggtggcattatttattctggagtaaggagggatggctgagggaatctgtctgtgggtccaacatggcgccgtcctgctccttgtatgagcctcaaagatggggacaaccatttgggggcagacatgtttgtagcacgagatccaggctcagtcccgaggcagccggaacgtgacgcaaggttgaggcggggctcctcccccgcaccctggcgtcgagcgtctcgtgacaggtacttccgctcggggcggcggcggtggcggaagtgggagcgggcctggagtcttggccataaagcctgaggcggcggcagcggcggagttggcggcttggagagctcgggagagttccctggaaccagaacttggaccttctcgcttctgtcctccgtttagtctcctcctcggcgggagccctcgcgacgcgcccggccc

SEQ ID NO: 30492 - DNA, 2300 bp, Homo sapien
gatccgcccgccttggcctcccaaagtgctaggattacaggtatgagccactgtgcccagcaatttttgtatttttagtagagacagggtttcatcatgttagccaggctggtcttgaactcctgaccttgtgatccacccacctcgggcctcccaaagtgccgttattacaagcatgagccaccgtgcccagccttttctatttttagtagagacggggtttcaccatgttggccaggctggtctcgaactcctgacctcatgatttgcctaccttggcctccccttctttctatttgaaacttgcccccattatcatcatctgatctctatcttgaaatatgataccagaccttagagtgtgacatttaaactttgaccagtcaaagcggtccctggggagaaaggtaggggaatagtggggctccacatataatggatagtttggggtatacctctcagtgctgattatgatggaagacagaactccaagtcatcttatactgcccctaactagcactagtaagaactttctagatgaatgctggtgggctgagataccgtgtcttcacagtccagccatgggcatgaggcttttggcagagaaacagcttgaccctctgcataggtcatgggacctggggtgtgtgcctagcaaaccatcctctagtctggctcctattcccatactgttcttgtagccagaaacagactctgaagccatcgaggatggttactttcaagagcgtaggccttcttagcaaatcctgccctttaggacagtagtcaggtctgatatttccttttagttagtggtcttgggtgtaataccacctcttgagaaagagaacaattgacagccaagcatctggaaagagagggatagctggattaccttgcctaggagctgtaacctgctgcttctctcactgtcttctggactctgtgttctgttactcatctctgtatttggcataccttaagatggtagcggccagtatttactagtcatctgctgtattctagttactgtcctgagcattttatttattcagtcttcacagcattcttaggacataagagctgtcatctctatattccctattccaacagagaaattaaatgactggctcaaggtcatatagctaaattaataagcggcaaaaccagaatagaaatccctgtggcctgggttcatatctgctgcttaagtcactcccactataggcactgctgtcagccttgccttcaaaaggtaggtggttaaagaggaaactaacaagtagttcttctgagtcccattcattttctggaagtcactgagtcataccctggcaaatgagaggcaattacagcaggagccctgtcttgatgagtagatagaccatgctgtggcaagtcctggaagacagttgagcagagatcaggcatttttcacatcttctggttatgagtagacaaggctgcctgaaagattttctggaaaagagtagtcactagagctgcagagtcaagtattcagacggtacccaacatttaataaatttctacttggcattgagtatacagtggggagtaaaactgtcttcatggagattgttagaaaagggatagactagattaatatagtacataaaaatgtcaattagtggtaagtgctctgaaggaaaagcaagcagagtaacgggatagagagcaaatgaggggttatgctgctttaaataaagcggtcacttctttgagaaagtgatactgaagcagcgacctgaatgaagcaaggaccaagctgttgagtaagttggagcattagttcaaattgccaatccattcaattgatccaccacccaagtgagagaatacattctctccaacagcttgcaggggcaggatggccctgctgtgctgttctgcctcgctcttgggtccagagttttggtgagtgatactgttttttatcagtgccccctggtggaaggaagatacctagcaggaaggttcagggccctgcactgttggggctgctcagacatttgtgcaagggaggtgttttgttttggtgtttccatcacactcacagtgatttctccttttccccctttagtttgaaggatgacctctaggaagaaagtgttgctgaaggttatcatcctgggagattctgggtaagttactcatgaatttgagctaacagattggcttagagctaagcctctctgctgtggagcccacactgtccgtgctgccacttcttgctttcatagtgaggcttagggccttacatgtttccctccacggcagaa

SEQ ID NO: 30493 - DNA, 2300 bp, Homo sapien
tgatctctttttgtcaagagtttttcatttgttttgttttttgaggtataatacaaatgaaatataacatgctaatcttttttgttgtttaggcaaacttttctcttttttttgagacagagtttcgctcttatcacccaggctggagggcaatggcacgatcttggctcaccgcaacctgcgcctcccaggttcaagcaattctcctgcctcagcctcccaagtagctaggattacaggcatgcaccaccatgcctggctaattttgtatttatagtagagacagggtttctccatgttggtcaggctggtctcaaactcctgacctccggtgatccactgtgcctggctaggcaaacttttcatacagtaaaatgcatagattgaactatatcactcgtgagtcatcacctcacttccctattgaactgtatcattcgtgagtcatcacctcacttccctatatttccattgctctcagaaagttcccagagtacctaagttttatttatagttcaaattttacacacttacctacatgtgaccactacttggatcaagatataagaaatttctagcaccctggagattggactcaatgtcactcgcttatagacagacacatacttaatcacaatatttgtgaggattgtttcagatactctggtgctgaaatttgcttcctgaagtctggtgtcatttgtctttgtgggtggccccacaatctagcctatttcttctggcaccccttgcatacatgctcctggtgctctgcctagcattctcccaaggaatgaatgttttgtctctcacagatatgggacacagcaggacaggaacggttccagtctctcggtgtggccttctacagaggtgcagactgctgcgttctggtatttgatgtgactgcccccaacacattcaaaaccctagatagctggagagatgagtttctcatccaggccagtccccgagatcctgaaaacttcccatttgttgtgttgggaaacaagattgacctcgaaaacagacaagtaagtaccaacgatgatagatattgtcacagacacctgctccccaggggccttgtgaatttggagggttctctgctaagctcacatggctctaggaggtgctggtgggagtcttcattaccatatgccagcccttcaggccaactgcctttaaggaccgggacccaggtgacctgggttaagtccccatcctgcccccagctggctgtgactttgggccattgtcttggctgtctcagcttcacttccctttctgcactttgaaggagggaattcggttttgtcattctcagtagtgccctcccagtacctccaggccatgcctggatctccatgtgtgcagaatattgctttgggctttgagtaaaattgctgtactgtagtttcaaataccatttctgttggaaacatagactctttgattaattacaactaggtttatttctgaccacagatcttttcttaagtgacttagtccttatctcttggctgaaaatgggctaggggttggggaaggaatgagaatgtgtgagtggcataggtgacatcacactagcagtaatggtgaagggactataaaccttaagaccaagctgctgggcatttcctgtcctgggatctctgaggtcccagtaaacactcttcatttcttcccggactggcttcttactccattcacaaatggcttttaagtataactgagggtcagaaggtatgagctgtagaccgagacaggctttgagctctctagctgaatcctagctatcctgagcatagctagcaggacaagtttggacgggtctgcaggtctcctccaacaccctctttccccatgtctgtgtcctcacctgtactacctgtagacgaggggccatgacacttcctggggaggatggagtcagtgctggctgcttctgtcatgagcctatgtgcaccctgcttcttctttcaggtggccacaaagcgggcacaggcctggtgctacagcaaaaacaacattccctactttgagaccagtgccaaggaggccatcaacgtggagcaggcgttccagacgattgcacggaatgcacttaagcaggtgggtctcccacagctgaccagcccactctggtgatgcctgaccactgacccagtccctgcctggcctcctgcccttaatcttcttccctaacccactcttttctgtatagccagaataccctatgtgttcatctgggaaggttatgacatgttctgcttaagcttccagaaatcccactttgg

SEQ ID NO: 30494 - DNA, 2300 bp, Homo sapien
tgcaacatatgtatatttttctttgttttacctatggggataatttacaaaggcagttgtttccaaataccttcttgtgaagctgaatgctaagcaagtaaatatcaaccactgatgaagaaaccaggtgagagaccttagacaaggtaaaataatctgaaaagatgcctgcaaatattttgcagtttagactctacgccttgcagagttttgagctcttttttcttgatgttgtgttagcaatgtaatcttttttggtgctgagcttagcttgctgagatgaaagggatttctttttcttctcaaggagttgacacaatggaagctggaggcatttcccaacactgtggtcaatgctacagtcggggaacaagcaagtctcccccaaaacagggatcggagtttttaaggataatttggcgagtaggagctcgggaagtggggagtgctgactggttgggttggagatggaatgatagggggttgaagtgagtttttcttgctgtcttctgttcctaggtgggattgcaaaacttgttgagccagattaccggtctgggtgaaaaagcagagtggcattcttcctggaggagctggctgaagatctgtagagggcccatgtgccacgttcagagcactgttgggctgtgaggtgccaggcatgccctgcctcctacgtgggcccctatggcctggccttgaaaccgccactgcaaaattataaccgagacaatgaaagagatctgacctaaccaactccatcttgcttctaacctccaagctgtccttgttcattcctgagcgtaggctgaactaaccttgggaaggaatgagtttatagtttaacttcaaaacaaaaatagccctttcccgggaaaacaacaacaacaacaacaaaaaacaacctcttcttgcctgggaccagttggcctttggaggactaacaaattagctataagattagaaattacagtttagaggccatacagcctttggttgcaagagtctgaacgtcccccaaattgttcctgggaataacatcactgttgtaaaacctaccaacacccagactggtaatctggctcaactagttctgcaatcccattcaggaacagaagacagcaagaaaaactcacttcggccccctatcagtccatctccaacccgaccaatcatgcacctcccacttcccgagcttctactcgccaaattatccttaaaaattccgatccgtttttggggagaccgatttggctaataaaactccctttccaacacacccggctctgcgtgaattactctctctctattgcaatttccgtcttgataaatcagctgtctagtcagcgggctgtaaccttgggcggttacagcctggcctgtcccatcccatccaatagttcccatctcttctcagctctctctgtagtttctcttcctccgcctgccttttaagttagtgtttcccaggacagaggtgactcagttgtatccagaccgctctgtgactgaacacccactttcttttccttttccaaaaaatatatgtaacatacatgtcaactaggaacaaaacagtatctcaggaatccaccatccagttaaaaatggacccttacccttaccgtgcccctgcagagaccccaatacagcgcatttccctcattcttttgcttttctcaagttttaccacggcctcgtggccacaagtgacaaaagagacaagtggaggcagctgagccggcctttaggtttctgtacacagggagatttcccatggctggcatttatggaaacaaccgctggtatgtgaaaaacaggtccgtcaccgccgtcacgacggccagagattatacccgccgagatgcccgcggcccagggcctacaatttcctccggccagctcctttggccgcgcaagcgcagtggggccggcgggaagcgtaggcgtgtgacgtcatcaggcggcgcgggccagccaggtgcacgtgactaaggccttgggcgcggcaggtggtagccttcccgcccttctggcctctccatcccctgctgcgggggaccgcgcaagcgcagtgagtactgcacgttgtcgcgggccagtaacgtcatcagacgtgtgtgtgtccctgcggcgctaagaaggggagactgaggctgaggctggggaacatcgggcagcatgagcggctgcgggctcttcctgcgcaccacggctgcggctcgtgcctgccggggtctggtggtctctaccgcgaaccggcggctactgcgcaccagcccgcctgtacgagctttcgc

SEQ ID NO: 30495 - DNA, 2300 bp, Homo sapien
tctggccacacctcatggtgctcaatcctcacacactgcccacatgcgcagtggcctttgggtcgcatgtcccttccttctgaatccacctcctgtccccattgcctctgatccacccttcaaggcccaggtagggtgccactgccttcgccttgggctggaagtggtctctcctgagccttcgtccttcagcctgagcatgcccccactctttatgcaagccaccttctccccactgggcttggagcaccttagggcaggcccagggtcaaccgcccttactggcaatctcattactcagattatttctgcttaatgttgacatcaaagagagctgaatgcacaccatgctcggctcccccaccccagagagcgcacacattcatgcagatgtttagtgaagagggggactgtctttgtggcactgggagggcagcaggtgggacagccctgacactgagcaccttctttaggataggcttggttccagcactcctgtgtcttcacattgcatcatccagaccctgtcagtgggtgggagtggcccagtttgtggatgacaagatggaggaggctttctttggaaagggatatcctttgcccaagaccactagtctgggaaatgaaggaactgatatgaaagttttggacacagactgcaaagcactgtgggttgcacaggctcacggcactggcatgtgcgccctgaccgtctcctcagcagcttggctccctgggctctgcctgtggccgcttgctctgagttcttgctgtcttctcttgcccgaagtaaatatttgcctcagaaaggaaatgtttcacaaacacctcatgctctcctttctccccacagctgacattagtctgtgtctgttttgtttaggggatcatcttggctggcactgaggagcagaaagccaaatacttgcctaaactggcgtccggggagcacattgcagccttctgcctcacggagccagccaggtctgtctctgcacaaaacgttatccctcagcagctgtgatgttgcccaagattcactggggcaaggggctgttggttttgttgagtagctgacttttccttctttccaaaatcttgcaaagaatcaactcagcaactgttcttgccattcctcttatcttgaccttatttctctgtcccagtgagacttgcaagtgagataccacgcttgacagcacttattaaataaatttttgtggtttacaacacaccttgacatacaatatagtaataacgttccggcttcaaagcacctttcagaatatatagcgtgggtggtactgctcccacttacacattaggagctgaggttcagtgaggctgtgtgatctgctggatggagcagggctgcggcagcactcgggactctgatgataagtccatcacctggaccatcctccatcctgcttcactttgcatgagaacctgggaacagtcatccttcctggggtgcccagaactcatcctcacaggacctcagatgagcccattgcaagcacccatttccatgtttaaacctaagcccaagttgttttcactgccgcttttttacgtgatgtattgaagcagaggtcggctaaatccagcctcctgcctgttttttataaataagttttgtttgtttgtttttgagacagggtcttgctgcgtcacccaggctggagtgcagtggctcaatctcatctcactgcaacctccgccttcaagcgattcttctgcctcagcctcccgagtagctgggactacaggcatgccccaccacacccagctaatttttgtatttttagtagagacggggtttcaccatgttggccagatctcaatctcttgacctcgtgaaccacctgcctcagcctcatgttctattaatagcagcagagttgaggaggtgagacagacatcctgcagcttggaaagctgaatatgttatctgacccttcattttaaaagtttgctgacctcttacaagtactaaaacctccattttcaggccctcaaaagcattcatatttattcccagtattctcccttgaccacatctttctgcatctgcagtgggagcgatgcagcctcaatccggagcagagccacactaagtgaagacaagaagcactacatcctcaatggctccaaggtagggttccttccccatggccacattagggtctcagtcacaaccttcactgccactgagtgagcactctccacacaccagggattgtacctgctgctgtagcaccgactaccttcttgagctgcttttatgtgtttgtttt

SEQ ID NO: 30496 - DNA, 2300 bp, Homo sapien
agctggagcttgatggacaaagacagagctgaggtgggtcacataggggtttggttttctccaaagtccatctttctgtcctcaggtctggattactaatggaggactggccaatatttttactgtgtttgcaaagactgaggtcgttgattctgatggatcagtgaaagacaaaatcacagcattcatagtagaaagagactttggtggagtcactaatgggaaacccgaagataaattaggcattcggggctccaacagtaagtagctcctgtgcgcgcgtgcgcgtgtgtgtgtgtaagggggagactggcctttgacggtgtgtgtgtgtgtgtgtgtgtgtgtgtgtgtgtgtgtgtaagggggagactggcccttgactctgtccaaatagcaagataaaatgagatttaaacactttcagtttttgttaagcattttaaaaagatcaaattaagaatgccacttgggctttgtctttgttcctgcagctgagtgctgctcacttgaaggcctgctggtcatcccctgctgtagctgccctagcagacacaccaccttagagctcagcttacagtccccagcctttagttgtctcagtctgcagtgcctggcagcctgcttcaggctgtgagttgggttcaggtccatctgggttcaggtccatctggaggcttgttcttagagcagatcataagcacctaaggggccaagccaagccatataagtactatttttgccgtgggagacatagtctccctctgtcacccagcctggaatgcagtgctgtgatctcagctcactgcaacctctgcctcctgggttcgagtgattctcctgtctcagcctcccaagtaattgggactacaggcgtgcaccaccacacctggctaatttttgtattttttgtagagatggggtttcaacatgttgcccagacttgtcttgaactcctgagctcaggcagtctacctgcctcagcctcccaaagtgctaggattacacgtgtgagttaccatacctggccacttttttttggtttgttttttttgagacggagtctcgctctgtcgcccaggctggagtgcagtggcactatcttggctcactgcaagctccgcctcccgggttcacgccattctcctgcctcagcctcccgaatagctgggactacagctgcctgccaccacgtccggctaattttttctattttttagtggagatggggtttcaccatgttagccaggatggcctcgatctcctgacctcgtgatccgctcacctcggcctcccaaagtgcgtgagccaccgcacccggcctttttttttttttttttaaatagagatgaggtcttgctatgttgtcctggctggtctcgaactcctgggttcaagtgatcttcctgcctctgcctcccaaaatgctgggattataggcatgagccaccatacccgactgaccctaaaacacatttaaggtctctgttcatgttgggtcagctctttgtattggccacaggaagtcacatggtcatacctagcaggcagggaaagggagggaggtccatccctcctcacagtgggagagtgctacagttagattgcaggggtgtgattgtgttagagttaagaattgagaccagtggtcccagtctaccctaaggcttcaggaaatgctgttctttccctcactttgcttgttctggctctttatatgcctggttcttttcattcttaaacttctgctaaatgtcaccttagaaaagtctgacatagtccttaataaaaatattattatccacccccttgccaacctccatttctctttatcgtgatgccctatttatttcatccatagcactgatcacaatattacattgttttgtttatagcttttgtctcccaaatcaaagtatgagcctccacaaagataggaactttgtctttctatactgtcctaccaaacattggatggatggatggatggatggatggatgaattgcctgcttgcaggtcagatgcagagtggtttgcattgtcagatgatatcttaaatttcatgtgtttcagcttgtgaagtccattttgaaaacaccaagatacctgtggaaaacatccttggagaggtcggagatgggtttaaggtgagttgccagccacagccccttgtaccaggtagtgtcatgagtgcagtttgtcgcccccagcttttgccctatccctgctcgtagcagagtagcctgtgcatggcaggtgactttgcatggttatctgttgggaaattggcaaaatggac

SEQ ID NO: 30497 - DNA, 2300 bp, Homo sapien
ttggccttccaaaatgctggtactacaggtgggagccaccatgcccagctctggcatggtcctttggaataacgttcagtggtcttgtgtgtggggatgttggtagagctgcaacagtgactgaaccaccttgttctgaggcattaggatggtgctttctcccagcttgagggaaggcaagctgatccacctggcctggtttcgttgcggcctcctccctctgcctccttcagggcccctgggctctccctgttctccctgcaggtggccatgaacatcctcaacagcggccggttcagcatgggcagcgtcgtggctgggctgctcaagagattgattggtaggtaagttagggacaaggccctttgtgccccaccccctgctgccccggctccaaccctggaggctctgccattcccccggccccttccaggccagtgctgaaccaggctaccagcctgagctcagtccctgggcttttgtggagaccagagggtctcctcagcctgcccctgaggtttgttgtcttccgcattcctctgtttcacctccacccgggtgatgctgactgggggacaggctttctgtctggggtggggatggggattggggaatgggctgtctgtctggagtgagaggttgccactgaccagtaggagcagagctgcttggtgagcacacaccaagaaccaggcttccaggatacacggcctctggttcccaaggtccgtgcctcctgggtgactctgcatggtgggtggggagtaggatcgggtttggaacccaggtccctgggcccctggatcttacctttgttctattctgtcagaataccccaaacctccattttcctttgccagtgaacttagaacagccctgtaaccatcctggttgtggtggaagcatttgcggggaaatgggggtacccggggcagcacacccctaagtgctttatgaagctcctctttggtgccaggctctgggcctgttttggcttccctccattttagagatgagaagacagagactcagagagggcaagcgatttgttccagactgtgctcctggacccaaaatgaaagctgtcaggctccaggctcagggctcttcttactcaggcacaaggcctctggggagctcctctgctggggctctgagtggggctcggccctctacacctcctgagtgcaccacacctgggagagcctgtggaggacatggctatggcggggcgggggtgcttctgcctgggagaggcgccatgtcactcttgggcccttagagctcagcactttgtcacagccacacgcctggaagccccagcctgagtattcaagccaggcggccccacctgctttggtcactgcacggggtgtgagcctgcaccacctctgtctggggcctctgtgcctggctttgtgcgaggcgccctcccccttccacctggttgcatcttcacagcgactctgaggtgggggtggtgttcagggaggtgtcgcactcggcctgaggcacagcctgtaagaaccattgccaggattcaagtctgtatctgatgccaaactctgtgtgtgggtgccatgaggaggggtggttctcctctgacccacgggtgctggcaagtgggggtgccagcttctggggtatttgacctcagcagacacgcttctcacagtgcccacctgtgggaagggtaaggatgatggccataggaaatcatgtttgaaccacagaaatattccagttcattctaataactctgctcttcctcagaaatgactgctgagtacgcctgcacaaggaaacagtttaacaagaggctcagtgaatttggattgattcaggtaccaatggttgagtactgtatttgtgcatttcactgtgtgacatgaacggtgtgttcttttgatgtctctgtactggtgacttctgtggtgatttgggaagaagactagttaaggctttatttgacacgggtcactgggcttgcttctcttgggcattgaggcttctgacttaattactttctctcctgtttcacagatttggctctcagcacatgcaaattgtttcttgtgttttttctgaacactccaggagaaatttgcactgatggctcagaaggcttacgtcatggagagtatgacctacctcacagcagggatgctggaccaacctggctttcccgactgctccatcgaggcagccatggtgaaggtaaccctggcatagccagagagctggcgctggagggaggcttgggaaatctccctcactgtgacctttcaagcccatgctgt

SEQ ID NO: 30498 - DNA, 2300 bp, Homo sapien
cttgcctcggcctcccaaagtgctgggattacaggtgtgagccaccgggcccggcctcaggcggcatctgttcccccctgcttgcagtcctgaggattgctgttctccccggtctgcacgggcatggtttagttcctgactcctggtgaggctgagcagcattgcataggcttatttggtcacactcttctgtgattttcctattcatatctttgcttatttttctgttagtttaaaaaaaattgtcttactgatctgccagctttgtgtttacatctggataattgtacattgccagttatatgcatggtaatcctcacagacaggggtatataacttatcgtttgacttgatttatgttatcttgttttgtacaccaattatttaactattcctctctagtttatactttcacgaatgtttaagaaatccttcctcagctgggtatgctggtgcacgcctgtagtccaagctacttgcaagactgaggggatgatcacttgagcccagagttcatagccagctttggcaacatagtgaaacatcatctctctatcttttttttttttttttcaaggactgagtttcgctcttgtagcccaggctggagtacaatggcgcgatctgggctcactgctacctctgcctcccaggttcaagtgattctcctgcctcagcctcccaagtagctgggattacagatgcccgccaccacacctggctaattttttatttttagtaaagatggggtttcaccatgttggccaggctagtatcaaaatcctgacctcaggcgatccacttgcctcagcctcccaaagtgccaggtttacaggagtgagttaccacactcgggcgaaacatcacctcttaaaaaaaagaaaaaagaggccaggtgcggtggcttacacctgtaatcctagcactttgggaggccaaggcagatggatcacctgaggtcaggagttcgagaccagcctggccaacatggtgaaacctcatctctattaaaaatacaaaaattagctgggcgtggtagcacgcgcctgtggtcccagctactcaggagtctaaggcaggagaatcacttgaacccaggaggcagaggttgcaatgagcctcgatcgtgccattgcactccagcctgggcaacagagtgaaactccgtctcaaaaaaaaaaaagaaagaaatccttcatccagatgtcagtatagtctcctagatattcttctgatgattttaaagtttttgttttatacttttagtctggaattcattttgtatatgccgtgaagtaattcaataacttaatttgctcccatatggataatcaatataacttatccactgatttgaaatgccacttctggcatctgttaggttcccctatgtgtttgggtctgttcctgggctttctcgtctgtcccattggtcttgtcttgatgaccgtagatttatatgtgttctcatctccttttccttctggtctgagcttggcactgagctgagtgttttatgtagcgttgctaatttcctcttctcagtgtcctagaaggcaggtgctgttgccctcatataacaggtgaggttactgaggctcagactgtgggcttttgtttgtttaagagcagggtctcttaaaaaagcccaccgtccaccctgcactgacattaagagctgactggaagagagccttgagtgtgttatggcatcattgtcatgatgaccttagttctcttctgtctgtgttctcagttagcagaggcggggaatgagaggccctcaccctattactacatataactggcaacgggcctgccatctatatttagccaccacttctggttgctgggaagaggcagtcacacaaagaataacccctgccttctaggagcttccagaaccttcctgaatctctgtagcatgttcaggtccacatatggcagctcagatacagtctcctcttaatgctcatctcctttgtttgatttcacagttaaagggaaagattcagagggaagaaggaaaatccagaggagacataagaagcccctggcagaagaagaggcagaccccacgctgacaggccccaggaagcagagcgctttctccatccagctggccgtcatgccgctccttgccggtacccactgcttgccctgttcccagcagctcctgcttgtcttgtggccagaacggccataagcggatgctcctaatgacaaccctgctgcgtgccacctcatttcatcctcacagccacctcaggaaactcaggggaattggcttcatagtacag

SEQ ID NO: 30499 - DNA, 2300 bp, Homo sapien
cagcgcatccgctcgcaggtaccgccagcacctggaggggaaccccgacccctgcccccacctcggccgccgcagcccgggactcttcccgcctcgcctcgatgcgtgttccctcttcggcgtttgcccggcgttccgcctccatgggcctgagctgatgccccgagcccagcacccagtgcacattcatgttctgtcttggggacagggcttgccctccccgacctcgccaggctcctgcacgtgctgcccccggcctggtttgcctctccccaaatagcaaacgcatcttgtgcttaggcgcagcaggcctgcctgagcagacgtcccctctcccgcctggtggctcccgggagctgctcacctggggcaggcattccagaagcccggcgactgactcctggttaggcgaaggaaacggggttgctcgtcgtcgtgcttactgccagccacccttatctgttgttccttcatccattcattctctaagtcgattgagtaccgactgtgtggcaggcagtgaaggagccccggcgttcatctaggagcaggcgggggaagcagggaagagaagggtgggtgcttctgcaggaggccgggcttacctcctggagcagccctggaatacaggcggggacagccttcactttctccctgccaggagcgccggcggccagcagtgcgctctgcagcatgtcgctacatgcctgggagtgggaagaggaccccgcaagcatagagcccatctcctccatcactagcttttaccagtccacgagcgagtgtgacgtggaggaacacctgaaggccaaggccagggcccaggagtctgactctgaccgcccgtgcagcagcatcgagtcctcatctgagcctgccagcactttcagctccgacgtgccccacgtggtcccctgcaaattcaccatctcactggccttccctgtgaatatgggtaggtgctagagcagaagtttaacaccctctgaaaaaaggaggtgcatgactttctgcaggagtttagggcgcatacaccccacatcctctctccacctgccccaccccaaagcgggctggccagtgccagccaggagcagaggttgaaaagaaacagcaattttaggagaggcccaactgtggctgcatcagcttcacatacttaatcctctcaacaaccctaaagcaggtgatgttctgtctgctttttacagaagaaaaaaaaaccatggagaggttaaggcattgattctcataagcgcttgtgcatcacctaataccttgtttaaaatacattttccgggagtctgaggcaggagagtctcttgaaccccggaggtggaggttgtggtgagcagagatcacgccattgcactccagcctgggcaacaagagcaaaactctgtcaaaaaaaaaaaaaataataattctttttttattgagatggagtcttgctctgtcaccaggctggagtgcagtggtgcgatctcagctcactgcaacctcagccttccgggttcaagcaattctcgtgcctcagcctcccaagtagctgggattacaggtgcacgccaccacacccatctaatttttgtatttttagtagagactgggtttcaccatgttggccagaatggtctcgaacccctgacctcaggtcatcctcctgcctcagcctcccaaagtgctgggattacaggcatgagccaccgcacccggccaaaaaatacattttctctgatctgttgaatcaatctctgaatgtaaaggtgtatcaattagctattgccacaaaaatgcggtgcaacaaacccaaacaagcccccaagctcatggctgcacacaggaacctgaggttctcctggaggtgctgggcgctggtctaggctgggttctgcaacagctcagctctgcttcatgctgctccttttcctcctggaccagtgggctatcctagaccccttcttgttctagaaacacggacacacaggagggcaagcctagccccacaaacactcctcaagtctttgagtgtctcccacctgctagcattttattggccaaaccaagtcacatggttccagcccaatatgaggggaggagacaagtagtacttcacatcttgatagaccttgctttgttttgttttcatctgcttacttgaactagcccaccattatgatttcaacttctcctggtattctgtcgatggtgtaagtttcttgtatgggttggaaccccgagagcgcaccaacagacaacacgaggcggtgtggagcaacatgctgtttcaatgaacgcct

SEQ ID NO: 30500 - DNA, 2300 bp, Homo sapien
tcttgcactctcatatgtctgggggttgaggctgcaattggctgggaaccgtcagtcacaacagtttcatgtggccatttcacatggctgcttgggcttcctcacaacatgctagctggattcctagcatgaatactatacctcaaaagaacagggcagaggtagatggaatttatatgacctggcctcagaaatcacatagtgtcatttcctctgcactcttttgactgagccagtcacagaggtctgcccagtttccagagaaggagactagaccccccaactgggtgggaggaatgtgaacctcacaatgcctgccggaagattatgtgggaggggatcttttgaggtggctgtctttggaaaatacaatctgccactggtttctaagctccacccctggagagtcacttccacaggtctttaatgaagcctcagaattgtatttttgacatgtaggtgtttccagtgcacatccaggatggcacattggcccttggtccaagacctctggcctctcactattgagcttgggaagagattggcttctgtcctaggtggtgatgtgatctaggaacctttggagggaaaccagcctcaggccagtgggtaggacctggggagcaggaggcctgatgtctgtccaagagtggtggtagtgttgaactgcccttgttaaagggcccttttgggggctggtgtatctgagtagctttgtattcttccagcccttcatgtgtctcctgagcacttcctggcatacagacagcagtctccaggctgctgcaggtggggtgtgggcaaggtggttgccgttctcgtgctaagagtttgaacccactcctcacagggcccactgccatttggtgtcttccctaacagctgtacttgaggctgtttttcagactgaacccgaggagtattggagcacccagtattaaaggggctgtcccatgccctgagagcggtctggggaggcatgcactgggaggctcaggacttgggtctcagccccagctgcgccacagttttgctctttgacacaaagtaggtcatagctcaactcagctaaagttttcttaatagccaagcttgtgtgtagcctcagctcccattctcttgaacaaactgactgccggagcagggtgccctccctcaacagaagacctgccttggctccccattgcccatagtcctgtgccctaacctgccctgtggggctatgtaccatgggccctgcacactgctacagcctcgccacccattcctgaaacttgccatgccctttcacctctatgggcctttgcatatgctgttcctctacctgggatgctttctcttgctttcaccgcctctgcctagtcaccccccagatttggcgttgctcacttcctccatgaggcctaccccagccctctgtcccagccgcttgctgtgctgaggtcctctacattaggagccgcagccagggctctcagcttgggtggtttagcagacgagcggaggctttggagtcaggcagtccggatttcaacacagtgctgcgccctacttgctgtgtgacctcgggcgaatcgcttcacctctctaagctttgttttctgatctctgagttggcgctcatgatcactaacaagaattctcatgctattttaaggacatcagcgacagaagcagagaatctaatgagagggatcgtggggaggtctggtttttaaggacatcggcgacagaagcagagaatctaatgagagggatcgtggggaggtctggagtttgcagagcccacagcttcctttgcttttattaaagaatgggaggtgggagctgatggagggggaggaaggagccatcaacccctacctcccatcgtacgggcaaggaccaggcttatagtaggtgctgacgttccgagtagaaactccttaatgagtgaatgcatgagtgaaggaatgaaggcagctggtttctgaacctggatgtagccatttgacaaactgcgcgcagtggctgagggggaaagccccgccccgcggagccccgcccccaggccgcacgccctcgcgtctcctagcaaccgccaaacgtagctgagtggctgggcctgcggccctccctgcaccggcggacgctcctctcagtcttggagtctcttcgcccaggtggctgtggatccggtacgggagttgccgccgcggtccaactccccgctgccgcccagcgcatccgctcgcaggtaccgccagcacctggaggggaaccccgacccctgcccccacctcggccgccgcagcccggga

SEQ ID NO: 30501 - DNA, 2300 bp, Homo sapien
gcttttcttcattcaaccaaattctgtcaagtgcctagagagggcccatgctgtcctgggcatgagggaggcagctgggaagaggcagagaccctgccctcgtggaccaactctcagtgcgttacgctgttgaccaccagtaactaagcgggtggacgaggggagggtcagggagtgtgagtcagctcgggctgctgtgacaagccccacagaccaggagcttcaacaacaggcatttgtctcccacagctgtggaggctgaccagagtgcggtgtcgcagcgttggcttctcctgcggcctctctcctgggctggcagccagggccgccttctccctgtatcctcgcgtggtcttccttctgtgtgtatttctgtcctaatcccctcttcttagaaggacaccagtcagactggattagggcccaccctaaagacctcattttaacttgattacctcattaaaggtcccatcgccaaataagatcacattatgaggagctctgggggtctggacatcaacatatgaattggggagacacaaccagcccatcacaggagacttctctgagatgtgaccctggaattgaggcctgagtggcaaggtggggccatgacttgtgtgatccagggcggaggtgactcccatagcaaaatcacagggctgggcacaagcttggcttgtctgcactgcctgcacggggacgagcaggttggagccagcctggatgccgaggggccagtgaggaggggccagtgaggaggagcaggtgaagagccctcctcacctgtacacacggagtcctgctaagtctcagctccaagtggctcagacccacctgctactctccagtcgcacccaccacccagcccagccccagcaccactcctggacagctgtcctagcctcctgactggtgtcccagctccatcagaaccacggaccacacagcatcaggttaatcttttcaacacccagatcccacctcgggctcgcccactcacaactctcctgtgacctcctctggtgaccatcatgactgtgagtgaccaggccctttcccatcctctcctgcagccacactgaccctccagggctccccttctcaggccctttgggcatacggctccctccaccatccccaagcctactcctgaccaatccacattcacccttcaggtcttgccagaccccaactctttagggaggccccacctccatctacagcctcttcctaacgtctttcacggcccctggacttttctgtccttcatgtatttttgtgatgacttcattgaggtctgctccttcggggggggaggttgcggggtaagctctgtgaggtcaggggccatgccattgctaaggacagtggctggctcaatacttcatccttcggtgaattaaagaaccaagtcagcagcttgggctggcagggccttagaagtcacccagcccaggctgacaccctgcacggcgcccccgagagctgagtgtccgtgtctgctcgcacactcctgttgcacccttcccaccgccatcccctgctcagtaaagttgggggggttcccgaattcaggtagggaccagagaggagtcacagaggacccctgaggactgtccccccaccccttgtgatttattttccgcccttcctctgctgcatcccgcccccctaccccaagctgttcttcctgctgttgttctcttgttttcacatgttgctctctgtttcctgtaaggctgcttcactcaggaaacgccatgcagcaaaggaagccgctgtgtgcgaacctccaggacctcccagagtaggtgctgcagcgtggccgtggcctgatggcccaaagtagcctggctgggttctgagggacctgtcagctctgcagcttcctgagacttgctgagtcactgagcggctcagagcataggaagcagagagaaaaagacagcagtgacatttttcatctattccagaataaactgagcccaggcggtgtaatgggcttttgatgcgtccccctggctttgatgtgatgccttgaccgctcccttggttacagcaagttaaccggtcaaacactaagctacagttgctgtacaggtattctgcatatggattaaagtctgtcatcagttgactttaggtaagggacattatcctggctggtctgggtgggcttcaagagccaaacaggcttctgtgtgaaagagaagttccacctgtggacagaagggtgtggaatccatctacagccaggcctacaagctgtagctctttctgaaggactttatgacaag

SEQ ID NO: 30502 - DNA, 2300 bp, Homo sapien
gctgggattacaggtgtgaaccaccgtgcccagtctagccatttcattcttaaaaaaaataatctccatgactggagtacagtgctctcattcttagaccaaacacagaatgacttaggacttttattccttttggagtgatttttccaacaaaactgtgagaacacagtggtgcacgcttacctttatgggttttgtttttttgtttttggaagttttctttttgcagctttaccatgaggagggtcccttttgcaaaaatatctcaggcctttgttggcttttcttttttcttttttttttcttttcttttgagacagagtcttgatctgtcgtgaggctggagtgcaatggcatgatctcagctcactgcaacctccgcctcccaggttcaagcgattctcctgccttggcctcccgagtagctgggattacaggcacgtgccaccacacccagctaatgtttctatttttagtagagatggggtttcaccatgttggccaggctggtctcaatctcttgacctcgtgatccacccgccttggcctcccaaagtgctaggattacaggcgtgagccactgtgcccagcctcattggcttttttaaaggttttcttcgtgcagcagagcactctcctgatgctcctggctggtgctcatcctgctggttttcacttcctcggttgtattccagtccagccctgccacagccccgcatcagtggctctgcctgcgattcgagttctcccgtgtccccctgaccaacaccactcggcctccccttttccaagatgtggttttgcttcatattgggttctatcgggttgttacgacgagatggatgagggacagatgctagtataaagtggccagtttaataagtggcccatttattagtgaatatttgcatgttatgatagatttttctttctcccctatcttgtaactgcagggaaatggaaaatgaatattcaaaaggtcaggcccttaaaatatcaagaaaagtgattggtggggtgtaatgtaggttccccaaagcccagagaagggagatgtttcaattaaaggctttcgggggcaaggaacagaaatgcaatttaaactagttgggtgtggtgactcacatctgaaatcccagtgcttttggaggccaaggcgctggaggatctcttaagaccaggagtttgagaacagcctgggcaacacagtgagattctgttgttttttgttttttggttttttttttgagatggagtctggctctgttgcccaggctggagtgcagtggtagatctcggctcactgcagcctccacctcctgggctcccaggttcaagcgattctcctgcctcagcctcccaagtagctgggattacaggtgtgtgccaccacacccagctaatttttatatttttagtggagacagggtttcaccatgttggccaggctggtctcgaactcctgacctcaggtcatccacccgcctctgcctctcatagtgctaggattacaggattctgtctctatttaaaaaattaaaaaaaaaaaaagtaggctaggtgcagtggctcatggctgtaatcccaacactttgtgaggccgaggcaggcagattgcctgagctcaggagttcgagaccagcggaagcaacatggcaaaaccctgtccccacaaaaaaatacaaaaattagctgggtgtggtggcgcatacctgtagtcccagctaattgtggggctgaagtgggaggatcgcttgagcccgggaggtttggctgcagtgagccaagatcatgccacagcactccagcctgggtgacatagagaccctatctcttaaaaacaaacaaacaaacaaaaagtagctgaaacaatgaaaactttttttaaaattcccctataataagaagtacagagatgggtggccctagggctgatgaactcaacagctaaaagacattaaggcttttgttcagctattcagtaattctctcagacattttttcatgtcacaagatggctgctgcagctccaaacatcacattctcacatgacaatgtctaaaggcaggaaggaaggggcatttcttttcctagaggtttttttttataaggatgaaaatccgttgcagaagattttgccttgagtcccattggctaaaactgggttccatgcctgtgccctagctgcaagggatgctgggaatctgagtatctagcacttcctcctggactgtgggaagctgactctgccagggtgacaatgggtgttcatagacagcttgcccatgtacagtggggaa

SEQ ID NO: 30503 - DNA, 2300 bp, Homo sapien
gatgctgacacaggtgggagcccaccgtcaaggccaagcaatactgtggaccgcagacagtcacatgtgtcacacccccttcctccacactactccaaacattagacgcctgtagttccctgagcattgaaaatctgtccatcctggtgcctgtaccgtgaggagcccaccccagctcctaagagactggcttggcctttcctgactggggttggtatggcctaaaatggaaataacacttacctctgagaccacaaacagggcctggcttgtgtcatcttagaaaacagggaagaagccaggcacggtggttcatgcctgtaatcccaacactttgggaggctgagacaggaggatcacttgagcccaggagtttgaggctgcagtgagctatcatcacaccactgcactccagcttgggtgacagagcgagaccctgtctctaaaaaaaaaaagaaaaagaaaagaaagagaagaaaaagagagcatttctccccatgtccctgtgtaaagtcccaggaaggggctctgactggccagcttcactcctgggctggtcacattacaaggagacagaaccagccttggtggcctcactgcacaggagcctgggatgtgggggtggctgtctcaagaggggacatggcacaagagccctcccctggggctgcgctgcacatgtccccctggggagggatgcctggttccccaccctttgtcctgcatccccacatcctgtgcttccccagcagtggacgagcagctgttccgctccgtggagggccaggccgcctctgacgaggaggaggtggaggaggagaggtggcaggaggagaagaagacgccggcagccgaggccaagacactgctggcccggctctccagctgcagaggcaggtgtgtggcccgtccagcgtcagccactgtgggccgcaggctccagaggtgtctggggaagccaggagcacctgggaggctggttagcctggctcagccacctcccagcccctctgcgactctgtccccttgtccctcagggggaggtgggaaggcccaccagcatgtagaggatgaagtgggatgaccttccagggcacatctcgtggctggctttaattcccattcgtgctttctcaccagcacctgcactggagctcttgtagcactcccagacaccagtgttcctctcagaccctttcccaacccatcacccctcgccacacaccatttccacagctctccagcctggccccgggcaggtgctggctccctgtttcatcctcacctccacccccatggggaccgaggacaggcccaggacacctgggacacctcagacaagtcacctggcttctccgaacctcagtcttcttgtctctaagatgggatggtgacacttgtgtggcagaggctgtgtgaggatttgaggtcaaagatatacaatgcctaacaggtgcctggtgcacagtaggtgggaacgccggtgggggcaacagttattaatgtatggtaaaatgctgttgattttctggggttgtttttaccaccaattcttcatgtcaacaagcacttataaagcacctactacatgccaggcaaaatctgaggcacagggaaaatcgcagtaaaccagacagtggcctcttcttctggatcctctagtgagtgtgacaggcctgaggaagaggggtcacacagggacagggacagaggcggggcagggagatgcagggaaggaaatgagggaataagcaatgcagatgctgggggaagagcattccaggaagagggaagagcaagtgcagaggccctgaggcatgttggcgggaccgccaggaggccactgtggctggagcagtgtgagtgcaggtgggtgggagggaaggtcagagagctcatggggcagatcaggtgaagcctttgccttttcctcagagtgagatgggggccatgggagggtactgggcaggcaggtgccgtggcctggctttgctttaggaggccaactccacaccaccaccacctctccaaggctggacagagcgggctctgggaagcagccccctgcaatgcgggccctctcctttgctgcaggtgtgatgaccagacggcggagaagctcatgacttactttggtcacttcggcggtgccaaccatgcccataccctgggggagctggaggcctgcattgccatgctggtggagcagctgaggactcagggctgcggtgggaggaccctggggacctctgaggaggaggtcagcagagcctagagatcaaaggctggagcaattctag

SEQ ID NO: 30504 - DNA, 2300 bp, Homo sapien
ttgaaataacctgcccctgaatttgcatgtaatgaatagtggctgtaagtgcagttgccaaaagcccacacactactgctctgggcacactgcctgtggggtagccctgctcccagagagcagcacctctgctatgcactgctgcttcaataaagcggctttcttcaccactggctctttgacttctttcctggccaaagccaagagccctcaggggcaaagccctgatttgggggctcacctgccctgcatcacttgtaggtggaaatcaagctgctggcagggctgcattcctctctggaggctctgggagaatccacttgcaggctcacccaggctgtttacagatccacttcctgcattatcctgtgcctcttgggcagatgggtatgtatttacccatatgggtaaatacacatggggaaaaagccttgcctgatgttgggatggagggaaatttttattttcttcttccagttcatctgaacattctaatttcccacaacaaaaatcatttatttgttatttatgtagttttttaaattcacaaaacccatctatgttgatctagttttttgttttaagttgtacatgctgaaaataaggaaatctcagaggctcaagaggaaggagggcacaggccccaccagatctggtcacaacacctggcctggcagctccagcacccccactcactccagaaccccttacccacctgcgtggggctcactggtgaatgtgtgcagggcagaggaggtggaacatgccaaggctccatggggagggagggaagggccagacaggctgaggctcctctccatggtccaggctccggtcagagtccccactgagcacataccaggggacccccagcagcaaccaggcccccgagcaggtgtgacatcagtgggggaacagcaccttccccacccttctctgagcccagcatcagtgggtggaggaagcagagctggggcctggcagcctctcagggcctcctaggagggtgaacacccaaatcctgccctacccaaatccagaaccaggaggcggggagagaacaggcggcctcccaaggaaggactcaccctgcttggccatgcaggaggaggaaggctggcctgagaaggatgtgagaccaaaataagaacaagcacacccccacccccgtagggccgaggaatattcccgagggtcctgaatgtcaacgaagtgcgtttaaagcctccgtcagccttctgtctttggcttttcctgccaggcttctgtaacttctgtgtttttaccctgttttatttattttttaagacggagtctcgctctgtcacccaggctggagtgcaatggcacggtctcggctcactgccacctctgcctcctgggttcaagcaattctccatcccaaaatatatttatcttttaaaggaagctttatgtcactaacataaatggaaaatggtgtccctcccctaagtagaatgtgctctagaagaaaatgtactgcaaatgttaaaaccataggccaaaattctagctagagattcacacttggtagaggctctgcttcccaggcctacagctgtttgttagaaagaggcatggagaagcactaggcaggagctaaaaacaccatggcaccaagaagagactccgtccttgagtatacaggaggagggaggagagttaaaaatgaagtcactctccccaccatggtgttctcagccagtgggagctgcccagcccacacctctgtgaggcaggcaggaccggtcactgctcccactttacagatgaggaaaactgagattcggaggaacaaccagcagagccacgtttctcaggggtctcctagttcccaccttctgggagcaggtgaggggccaccctcagtcctccacagacctgattccaaagcccatcaaggcactggcggcacagtgggacccccttctataaaccggggttgagatgtggttctgtgcccaaggcgcgggcccctgagggcctcctgcctctggaaataggccccaaggctgcactggggggataagccaggctattttcatcacttccttccgcccgctcccgcagcggccacctcagctgtatcccatagagttgccacccaggcctcagccaggacctttcaggccagacaggagcacctgaccaaaggcttcacaggtaagtggccctccgtattacccagcatggcctcccacagggagagaggaggtcagttcctgtccctttaacaagacagggttgggtgggacattccctctgagacaccatctcct

SEQ ID NO: 30505 - DNA, 2300 bp, Homo sapien
acagtccaattttagaatcaccccgcaaaggcaagggagtggtgcctgggttttctgacaaaatctatactcagaccaacatgtcccctgccccagcccaaccagttccaggctagagcagtggaaaggccagttagctatccaaccaccgtctacccctacgcttcatcctggctcctggattccacaccattttgtgctgtggtagctgctctgagctgggggcaggccttgttttctggagttctggactttgacctgagctagtcccagcatgcagaaaccttccatcccatctcctgtctacttctaccctggagtggaggttatttcctgcctctctaactctccgctcccatcaggtgtaccaaagtggggctctcaattgcttttcagtggcactttggggtttcctgtctgattctgttgggtatttcccatgggagtggagttcaaactttcagaagaaacaactcttctgccttctccacggggtctgcctttgcagactgctcattcagtccctttctatcttgacctgaaaggttggctggggtcctcacagtggcactgggggacttgctctctgcgaagtctccttcagcttgaagactttccccttttctcctggatttttgtctgctttgtccacaggtgcattacaaggccccaggacaatgcccgcctgtagtagccattcattaaatatgttgaatacctggaattggagtgccacaaggaagctgtctagaggggtaaggggtgctgtcaattccttcccatcttcggagctgggaagcccagtcctgttggatctagtataagcttcttacagatgtttgggtctcctttctctgaggcgccctggttcactgggccaactcaggagttggtctgcccttcctcagaaatcccttcaagtttttctgttcctcttcctagactggtgctttttggctgggtcagtttcccaaatgggcctgtagctgctctgagctgggtcatccagccgtttagcagctgcttcaaccactgctaggctgccttttggagacaagagctcccagctcctccttctggcctagcttcccatcaaatggggccctgggtcctctcctcacaaggattttgggctcctccgcagttttgtagccagcctggattctggccttctgcagcctgctccctcccttcccttccgcccctgggaagagcgacccccaccactctcggagactgcactgcccgcctgtcagagtgggcactcaggtgacactgctgtggtcgtccccttcctccgtgatccattccggagggggtcattcttagtctaggcctgcaggcccggagctccagccatggtctccgcctgtccctgaccggcggtctgggaggcagcaggtaggggatcccgggcaggcggaccaggcctgggtggggggcgagcaggaggcgcgggacagcacctgggggtcccagctgatgaagggtcggggtgggcagcggtttgggggccagacggatccgcggtgtgggcgcgccggggtgttgatggaggaggggccgaggtgctgagggcggggtcgggctggggtcggggctgagggcggagtcgggtggggcggagtcagagctgaggtgagcctgagggcggagtcggggcgggctgaggtgggcctgtgggcggagtcggggcggtgtgctgaggtgggcctgagggcggagtcgaggtcgggctgaaggcggagtcggggagggctgaggtgggcctgaaggcagagtcgaggtcggagctggggacggagtcgagttcgggctgagggcggagtcggggcgggctgaggtggtcctgtgggcggagtcgaggtcgggctgagggcagagtcgggtcggagtcggggcgcgctgaggtgggcctgggggcggagtcgaggtcggagctgagggcggagtcgggggcggggacgtaggcggaacccgggtcgggctgaggtgggcccgagggttgggctgggggcggagtgggtgccagcctgagggcggagccgggggcgggcgggggcgggctggggcgggcctacaggccagactggtgtggcacggagctgaggaccggccggagctttgcggagggcccggcttggcgggtccgggggggagccgaacccgcggggcaccgggtccgggcggggccgagccgggccggggcgggagccagccggggtggggcggggccgaggccgaggcaggcggtcggcagtgctgggggttcaggtgttgcggcggctccacgtagccag

SEQ ID NO: 30506 - DNA, 2300 bp, Homo sapien
atttgttttctccatttatgtgttttctcacagtttccagaacttaaacactggatgaacatttgttcacctgtggttggtgcaggggttgtgagagtgacagccagggaacacaccatgatgttagtcttttaacacctggatgtattgcttatcacagtggtctgataagtagagtttcccacagtccttatgtgtagtgtaagtaaaatagattcttgggtgttcaggaatacaaattgcctcataattcctactcctgagaacatggaaatccctaactattctgtggtttcttaattacaatatttgtatatgaatgacattaaatatggtcataagcagatctaccccatacaggaacatgggtaatgagaagtctgtatgagcaggatctaatggagtcttttatcttttatatcgctggtaggacggccttagcaagatttcgccaggctcagctggaagagggaaaagtgaaggttggtgtaaatcttcctcatgaattgtaaagtatcaagaataaatgcaggctgggtgcagtggctcatgcctgtaatcccaatacttggggaggctgaggtgggtggatcacttgagtctaggagtttgagaccagtctgggcaacatggcaaaatcccttctttacaaaaaatacaaagattagcctagccaggcatggtggcgcctgcctgtagtcccagctactggggaggctgaggcaggagaatcacttgaatgcaggagtcttacactgcagggagccatgatcatgccactgcactccagcctgggtgacacagtgagaacctgtcaaaaaaaaaaaaaaaagtagggtgcagtgactcacgcctgtaatcccagcactttgagaggctgaggggggtggatcacttgaggacaggagtttgaggccagcctggctaacatggtgaaaccccatctctactaaaaatacaaaaattagctgggcatggtggcaggcacctgtaatcccagctacttgaggctgaggcagaagaatcacttgagccctggagacggaggttgcagtgcaccgagagcgcgctgctgcactccaggtcaacagacttcaaacttcagaatttcctatttcttatctgtacctgctgacgctcttgagagtctgtacacttgaattccaatacctccccatagctgaggcagggtgatggatctggctgcttgtttttcagtttcttctgtattatgatgactgggcccggcccttttttttttttttttttttttgagatggacgctctgtcgctcaggctggagtgcagtggcgtgatcttggctcactgtaacctccaactccctggttcaagcaattcccctgcctcagcctcctgagtagctggaattacaggcacatatcaccacacccagctaatttttttgtatttttagtagagatggggtttcaccatgttggccagactggtctcaaactccaggcctcaggcaatctgcctgccttgacctcccaaagtgggaattacagagatgaaccgccgtgcccagcctgatgactgggtcctttattactccagctctaatattgaatagggactggagtatgatgtggagaacagctgtaagctgaaaccggtaaattatttcatttcttagagactcacccaaattagagataatatataccattctttggattttttttttaattttatatacgcacatgtatatgaatacacccatatttatgtatgtttgttttaaacactgatagacattgtttcttaaggtactataaatatgccatgaaatagctataacctagtttggctgtctctctattgcaggacagttaagttctttccaatattaaatacaatgcaatcaatgtttttcctaaggagagattgtagaatgaggtttaaggcttgatgaggatcatctggaatgaaaacttcaaatgtttttaggccattagatgatttaggcttaaggcctgaatcagttctgaatgttgtttgaaacttgtaaatagtataatggaaatgtgttatttttttctccttaggaacgaagaccctttctggcctcagaatgtactgaactgcctaaagctgagaagtggagacgacaggtatgttctgggtaaatctgatttcagtagaagtaacaagtctctcatttcttcttattatctaaatgactgttagaccaaaagtctaagtatttttaaatactaattttgaattatagtttttctgtgctttctaacatattcaaaaattattaaaatgtatta

SEQ ID NO: 30507 - DNA, 2300 bp, Homo sapien
cagtgtgagcagagaaaggaaggccatttagcagactggcaagataggtctgattcttactggttgcaaccctaaacaattttacataaatcttcacataactaaagatttaagtgggccggaggcaaggccttattctcatccacccaatgatgtcaccaaacactaaatcttgtctcctgagctctaaagtggctgacagttggtattgccttttgtctgacatccagcaggatctattttctccagcattgcaagcagatctcaagactcattctgactaggtcagcttgggtcttaaacccaccagtcactatgcctagggagactggatggatggattagcttaatctagtgcttgatccatacttaaagctggggatgcagttgccttccccacaaccagagggctccccaaatggaactgagataagtgggtagggggagcagatgctaggacaacatagctaacacctcttgaatcctgctaatatgtgatctctgcatcctagagtcagggacgtaatggataaaggtggtatggacatgttgagaaggcctcatttgagtgaggaatgaccctgcttgtttcagatcagctatttaaggtaaaagtgaagctgcttgaacaaaagacccccaaatgcagaggccttaacaagacatgtttttatttttctcattttgcagagctcagttttccagagctgggagggggggaactctggcatcttcacaatacttccatttctgaattcaggttggctgatcccatggacacctctcagcagagaaaggaaaagggcaagggattatatttttgtcatggcttcatctaagtgacacacattcctttgactcgattcttattggccataatcataaaccagacaggtgggaggatggggtctgtagtgggtggtcatatgcccacttaaaacttgtcacatttcaggtatgagattgtgctgactattctaagtacttttcctgtcctgtctgatcctcaaccacatgtcagctgcttctctctttggcttgtgcctcctggctgctgctagggtgcccatcactagttaggtcccgtggtggagggagtccctgcagctgaggcaccatgcttgaaaggggaaagcggctgtaaccgaatttgctgcgggccctcacctgaattccccaccacagttcccctcattgctgacaccatgcgggagtaaccatcagaacgtctcctaccagggacctctcctgtcttcctggtctttgtctaacgatcttctggtcccagcgatgtgctcaggacagtgaccgcacttctccaaccaccctcctcccctaagtggcactttttgcctggaacttaaatttttattttaaaagaggatgacctcaagcatcgtccagctctgaaaggccccgcgattccaacagaccagctcagaaaaactagaaatggccctaagaggtgacaaggaaaagtgaaggagtttacgaagcccggccagctccaactcctgcaggacgcacactccagctcccactaggggagctgtcggggccgtagatccctcgtcgcagagatgaggtcgagtaatttccaaaaggggatatttgctctcacagaggaaccaaggaagccggtgggattagagtagcggcaatcactcagccttccacataaccgcgcccagcgccgcctgctcccgcagtaccaatagtgaacacaagacatttagtactcctgtttccagaactaagacccgccgcctgggctgagtccgaaaaccgccagtccctctgcgaaagccccatcacacgtctgcgtgtgatgacgccgcgtgccggcgctaccggaagaccgcctgacggagcgccagaattttctctcccaatccccggccggatctccctttcacttccggtcctccctttcacttccggtccctttcttttacgtttccgacaaaacatcaggctctgtgggcagttagaatcctcagttcctgcgagcgtcggcttcgtccgggcacttccagtactctcattcacttcctgtccctttcttttacgtttccgacaaaacagtgtctgtgggcagttagaatcttcagtttctgtgagcgtccgcttcgtctgggcacttccggtactcccattcagttccggtccctgtcttttacgtttccggcaaaacatcagtgtctgtgggtagttggaatcttcagttcctgtgagcgtcggcgtcttctgggcctgtggagtttcttggacaggggccgcggggctccaggacggcgccc

SEQ ID NO: 30508 - DNA, 2300 bp, Homo sapien
agagctcacgaagtcactacctaagtgtctgattgctacactatacattacttcaagatactatgaaggttaatcagattacaaaggggaaatcataaagctgagtaagcttcttggtaataaaactatataaatacaaaatactgttttttattggcagataatatatcgtgttttagcacaacacataagctgctaggcatttattcaatctgattgggaatgggttaaatttggttaaaaaattttaccttaggttgctttaattaaaaaaatgtttaaggctgagtgcagtggctcacacctgtaatcctagcactttgggggcactgggtgcagtggctcacacctgtaatcctagcactttggcctagcaccgcttgaggccaggagttcaagaccagcctggccaacatgatgaaaccccatctctactaaaaatacaaaaattagccaggcgtggtggtgggcgcctgcagtcccagctactcaggaggctgaggcagaattggtcaaacatgggaagcggaggttgcagtgagctgagacagcactccagcctgggcaacagagggagaccctgtctcaaaaaatagtaataaataaatttaaaaagttcggccaggcgcggtggctcatgcctgtaatcccagtgctttgggaggacgatcaccactttgggtgggcggatcacctgaggtcgggagtttgagaccagcctgaccaacatggagaaaccccgcctatactaaaaatacaaaattagccgggcgtggtggcgcatgcctataatcccagctactggggaggctgaggcaggagaatcacttgaatccaggaggcggaggttgcagtgagctgagatcgtgccattgcactccagcctgggcaacggagtgagactccgttctcaaaaaaaaaaaaaagtttaaaatatcattggtctttaaagttatacattcattctttgataattgctatgttgaacgcaacctcctaactgctttacaatgattaagcactaatgatttgaacccaggtttaaagtctgactctcaacacatgtgctctgccttctcacgaacatgatttcaaaaatcatagccccgggatttgggattggtggcttatgcctgtaaacccagcgacagagcaagaccctactcttaaaaaaaaaaaaaattaaagaaaaaaagaaaaataaatcatagtgttgaactggcaggtttcactgagacgaaacttgggactcttcctttttttttgtttcgaataaagccattctagaatgagacaaaattctaaaatattttatagttaacagtttaaattgggtttaatcttgacaagactatctagggctatatacacaaatctcttttggagaaaataccacaactaaactgaagtctattcctgaatatgacagaccaggtcaaatggttatccttgccctcccgggggatgtcactcataaacgtgccaaaagtcacagtctaggccccattaccttacatgctcatgaccttcccagggaggcccctcgcccttaccaggcactttcatcttgggaagacacatcagtcctggcggagaaagcagcaaggcctttccccggctcacaaaaattaatacaaatctcagaggctgcatcccacagccgtgaccaccgtgacttggcatccccttttctgcaaacttaaatgttatctagaaatcgggcctggctctgaaagccaagggcctggcaggagcccgagaaaggggagaaactttctgcggccccaagctaatggcagtcactgcaccgagacccgtcccctggcatccctttgctccagctggccaagacagaccaccaaggtcagccagatttccacccagtctggccgggcccggacccagctgggaatgaaccgagaagcaccgggacccggatcccggcgtgaaaggccgcgcgcggggcacggcgggaaaagacgctgcgcgcagaaacacccgccccgcgccgcgctctagtgggcggccctgccgcgggcggctctgattggactgccgaaccccgcgcgctgattggccgcgtgggcgaggcggaggagagccgtgcgcagcggcgtatgtggggccgtgtgcagacccgcgtgtggcgcaggcaaggaccctcaaaataaacagcctctaccttgcgagccgtcttccccaggcctgcgtccgagtctccgccgctgcgggcccgctccgacgcggaaggtgagggctgggggaggggcccggcgctgacggagccgcagtgcgggtcg

SEQ ID NO: 30509 - DNA, 2300 bp, Homo sapien
ggcgtgagccacctcgcctggccacccctatgtattttttgagacagggtcttgctctgttgcccacgctggaagtacagaggcatgatcatggctcactgcagccttgacctcccaggcttaagcaatcctcccatctcagactcctggagtagctgagacaagataaaaatcagtttagtcctcagatgtaccataacttccttaatcatccctttattgatagacatttagggtgtttacaattattttgctgcaaactgctgcagcaggcaacttcattttcttttttcttttttttgagacagtttcgcttttgttgcccagactccaggctggagtgcaacggcgtgatctcagctcactgcagcctccgcctcccaggttcaaacgattctcctgcctcagcctcccgagtagctgggattacaggtatgcaccaccacgccaggctaattttttttttttttgtatttagtagagatggggtttcaccatgttggtcaggctgctctcaaactcctgacctcaggtgatccacctgcctcagccttccaaagtgctgggattacaggcttgagacactgcgcccggcctcattttcttcttttgaacaatttcctcctgattaggggtggggttaccgatcagacattttgaacatctttctgactcttgacaattttgcatgtcacaagatctgttgtccttggccctagcctctgcaaagccagaccctaagggctggcccctctgacatctcccttcctccagctttgcggtcacccttttcacctggggcctctgcctcagcctcctgcctctcctctccacagcccactccttctcctgcccacaggcctgcgggcttcccctccccaggcaagctggggccgtgtcgcagcgcttggccatcacgactttgccattgccaatgcaatctggctcactggcatgcactgtgcttaccttagcctcagggtgtcctgcataggtccccaggaagataaaccctgggtgatgtgtcattttcccctttccgttccttcccacgcccttccccccacctccccgcgtaggcagcgcatctagttggcactccataaatatccaaagtatttacaaaataacgtagaagttctatgctgtttagttagatctcttaaggttgataatgtacaaggcaatttgcatcaggagcagacgagatagggcccggcagatataaattaaaaatgcaattgcacgcattcattcaacgagaactcactgagcaactactatgtgccaacattatccactgcagtgaataaaagacaaacaaacaagcaaataacaaaaaaaaaaacaaaagagcaagaaagtggccgggtgcagtggctcaccgctgtaatcccagcactttggaaggtcgagaaaggaggatcgcttgaggccacgagttcaagaccagactgggcaacatcatagtgagacctcgtctctacaaaaattaaaaaattagtcgggggtggtgcgcccagctctactcgggaggctgaggtgggaggatcgcttgagcccaggaactgtaggctgcagtgagccaggatcgcacaactgcaccacagcctgggcagcagaacgagaaataaataaacaaataaaagccagaaagtaaaaataaagtgttagatggcgattcgagctgaggaggaaatcaggcaggggaaagaatctgaaagcgaggagtgagtggctggcaaggctccttcggaaggtggcaataacagtcatagaccggtcacatcaattgggtgtttactgcgggccagtgtgtgccaccaacctcacacccgaaagccacaaagactcacgccacaacgcaacgaggcaggggctcctcctcctcccttggtatacggaaagaagcgtagggagcagagttgggatgctagtcagtacccccctgcacctagcccttgcccctccgtctggctttccccactcccgctccggcggagctaaggttaacattagacgaggctgtggctaccggaaagagcgcaggcgcagagcgcggaatgcgcctgcgcagagcgctgggcgacgtggccagtcggggcccggaagtggtccctgtagaaccactgtggcaccgctactccgtgccgcgcccgtcgagcattgcgttgctgcattgcgccccaccgactccactatgttgaagaaattcgacaagaaggatgaggagtcaggtgagggggccaggcctgggtctgagggaggccggacccccacccgccgagctttccttctgg

SEQ ID NO: 30510 - DNA, 2300 bp, Homo sapien
caaaaaaaaaaaaaaaaagccaggagtgatggctcatgcctgtaatcccagcagtttgggaggccgaggcgggtggatcacaaggtcgggagttcaagaccagcctggccaacatagtgaaaccccctctctactaaaaatacaaaaattagccgggtatggtggcatgtgcctgtagtcccagctgctggggaggctgaggcagtagagcttgagctcgggatgtagaggttgcaatgagccaagatcgcaccccattgcgctccagcctgggcgacaaagcgagactctgtctcaaaaaaaaaaagagtaggacagagtggaggtgaggggtgaggaatgctacaggctgaggaaacagcacatgcaaaggctggagaggagtgagcatagccagttagggaagttcaaggagttacattcaggtcactggcagtaggaagctatggaaactttttagcaaaagcagggggatgacctgtttggttttgagtcttatgaaactccctccagcagctgtgtggagttaggcttggaggggcaggaatagagggagagcactggttaggaggctcgtgtagtaatctgggcaagggtggtgttgggagctggagaggagtaaacaggcccaggctctctgcatgctgacaatgccttcttccctgcagcctaacaaaagacatgactgggaaagaagacaactaccggggcccggccgtgcgagccctctgccagatcactgatgtgagtcgtgccggttcctccctgcttcctggcctcttgattgaggcctcggcatcatcttttgcattctttggggtgtcccctatcactgagccaggtgatgtggggtggaggcagtgtgcaggagcacatgagaaacgcttacttcctcctcatactcatctctgcccccattcctgcactcctgagagctgccaaggactgactggatctccttccaccctgctccttttgcccacagagcaccatgctgcaggctattgagcgctacatgaaacaagccattgtggacaaggtgcccagtgtctccagctctgccctcgtgtcttccttggtgtgtagttgctgctggagccctgctgggggtggggtagaaaattgaagaaaatttaagagtcacattccagtaggaaaaaagaaagtgtttctttctttctttttttttttttgattgagacggagtctcactctgtcacccaggctagagtgcagcgccacgatctcggctcactgcaacctctgccgccggggttcaagtgattttcttgcctcagcctcttgagtagctgggattacaggcgtctgccactgtgcccagctaatttttgtgtttttagtagagacagggtttcatcatcttggccaggctggtcttgaactacagacctcatgatctacccgcctcggcctcccaaagtgctgggattgcaggcgtgagccactgtgcctggcctctctttcttctttttttttttttgagacagagtctcactctgttgcccaggctggagtgcaatggctcgatttcagctcactgcaacctctgcctccctggctcaagcgattcacatgcctcagccacctgagtagctgagattgcaggtgtgcaccaccacgcccaactgatttttgtatttttggtagagacgtagtttcaccatgttggtcaggctggtcttgagctcctgacttcaagtgatccacccgcctcggcctcccaaagtgctgggattacaaagcgtgagccaccgcacctggccaaaataaagtatttctgtatctgtaagcctgagagtcccacccttctcagtgaagacagccaagaaactctggggtgattgaagagagtcgtgggtggatggtgttgacccatgccttggggagggacattgagggtgggagcatcctgagtttgtccatggtctctgaggaccaggacagtggcgagcccctgagctgtgtctgagggaagaccagaactgggcccagaatgtgtgatggggacacttcctacctgccccttaatgtgtcctgttgcccacagcacctgctgaagtgcagctttgacgtggtcaagcgctgggtgaatgaggctcaggaggcagcatccagtgataacatcatggtccaggtgagatgtgagcaagggagtgatatttaaaacactcaggcaggtggtaaggcactggccagttggcatggacacttgccaccgagatccttgtgacccctggccatagcaggctttaatcctttcgtcattggatcatgggagg

SEQ ID NO: 30511 - DNA, 2300 bp, Homo sapien
ctcagctcactgcaacctctgcctcccaggttcaagcgattctcctgcctgagcctcccgagtagctgggactacaggcgcccaccaccacgcctggctaatttttgtatttttagttgagatggggtttcaccatattggccaggctgttctcgaactcctgacctcatgatccgcccgcctcggcctcccaaagtgctgggattacaggcgtgagccactgcgcccagccgttgtttgctgttattaaggggaatccagcagccttgagtcctggagtctttggtgtctcctctgtgcagggccctgctctgggtgtgggaataccctgtcagggaggagaaagcctatgaagaggtgcaaagtggttggtactggaaagtggatatgttgagaggctagaaaaggagaggtgcttagggtgagaaacctggattcaaagtggaagagaagaggggagtgttttagaacaggcccatggaaagcaaagatgttgtggcaggagagttagatttgcaggttttgagaaatgattgggcctcttgtttttctattattctctactataacagtgtaaacttggtcaggcaaacagatggagttcatgtttggagagagaagtctcctttcctccttagaaatgaagaaagaatgaactgctgggcacggtggctcacgcctgtaatcccagcgctttgggaggccgaggcagggggatcaccaggtcaggagtccgaggccagcctgaccaacatggtgaaaccccatctctactaaaaatacaaaaattagccgggcgtggtggtgcgcatctgtaatcgcagctactcatgaggctgaggcaggagaatcacttgaacctgggaggtggaggttgcagtgagccgagatcgcgccactgccctccagcctgggcgacagagggagactctatctcaaaaaaaaaaaaaaaaaaaagaaatggaaaaagaactaatgaattcagtcactgatttgggtattcattcattcttattatatcccccatatttccagaataatgaaagatgtaaataaagtagggtcttcaaaataagcattaagaaaaattttttttgagtattagagaataaaagccaagttatgaagaaaggaacatagatattccagaaaacagtagtcatcttcgctcctatgattgagtgccaaatttagctctgagcttccgggcagccagggcaagggagggatatggtacccgaatggctctcatctagttaaaggaaataaaccatttgtttaagagaggactttgttcttcagcacttggtgccaagggggaagttctgttggatcctgtagacacagtaggagagaggagtggaatattacttcacagaggttaagggcttaggctgcaggtgcaggcagtcttggaatttaatcttggttctgccacttactggctgccaacctaaagtttgtttgctttcccctttgtgcctcagtctccttatctgtaaagtgggctagtggtggctgcaagctatagaagtgaggcatgtccactgtatagcacagcacctggcacacagcagatgcccagtgaataacagccctcactggaacccctgggtgctcacagacattatggcctctgtccatggctcaggtgcgcagggtgaggggagctctgtgtcttgggttgggatgggggtgtcagcagggaaatgagctgagcagagggtttgagtcagaacagtagcccccggttttcccagctgcccagcagtgaaggcaacctgacatgtggcatccatctccccacagtgctccagcttttctgcagctcacccaaggctgctctccgctatgctgctgttcgtaccctcaataaggtaagagtccagcttgggggttggaggaagctgtctgatccaactggaggtgtgtcctagcctctgacctggctgggaaggataatagccctggtcacagttagtttcttctagatggtgagatgatctcatccaaaggacttctgactgggccaaaccatcaaatgtagtgacagcattgggttcctgccctctctgtcactgtcctcccaaaacaggttgccatgaagcatccgtcagctgtgacagcttgtaatctggatctggagaacctggtcacagattcaaaccgcagcattgccacgctggccatcaccaccctccttaagacgggcagcgagagcagcatcgaccgcctcatgaagcagatctcctccttcatgtcagaaatctcggatgaattcaaggtacctgctaccccca

SEQ ID NO: 30512 - DNA, 2300 bp, Homo sapien
agtagaagagcagagtttggggaacccagagtctgagagtctgacactggggctgttggcactgccttgggtgggctcagggattgtgcccttcaagcttcaagcgtggagttgagttcctctggtctccttgcccttgtgtcatgcccaaggcctggccttacctaaggaaggactcagtgggcactcagggaactgagtcaccccatcttggtggcagggcctgctgctcatgcacgtctatttcatttaggtggtggttgtccaggccatcagtgccctgtgtcagaaatatcctcgcaaacacgccgtccttatgaacttcctgttcaccatgctgcgggaagaggtaagagtcaggggcattcgggggatgccaggtctcctggtgcagggagtgacctgaccactggctccatgctcagctttgtgcgtgtgcttatgttagcctgttaaccaactggttttcatggtgcctgcaaccctttaaactccttgtggacatgtaaacacgtaccaattgctagtaattacagtaataactatgactcaccagcctgactttaaaaactggatgtcctgaggtgatgcttgtgcagaagatgggaaaatgcatgttcttttctggtggactctagtgcagaaatattctagaccattccaggagctctaggagtggtttcttgtgaaaccggtgctaataatacgacattggttctatttctgttcccgacgtgaattactgattcacttatgccacctttcttggacgtctcaacaaaatgggttaattcttaggagcaatagcagatgttcatggagtagatttgttcctcagatacatggtacccctttcacccagccccagagtggcccatggactaggcagtagaggagccattgccttgagtgtctttgcgtttcccaagaatgttgttgtagaagggcactaatgtttagtgagttgtcagctaatgggcccagcactttggtgattgtgtttgttttttttaagtagagatggggtcttgctgggttgcccaggctggtctcaaactcctggctataagtgatcttcccaccttagccacccaagttctgggattacaggtgtgagccatcatgcctggccaggcctagcactttggagacactgtatgcatgatagcagtttttttttttttctgttgagtaggagtctcgttctgctgcccaggctggagtgcagtggtgaggtcttggctcactgcaacctccacctcctgggttcaagtgattctcctgcctcagcctcccgagtacctaggactacaggtgccccccaccacgcccggctaattttttatatttagtagagacagggttttaccatgttggtcaggctggtctcaaactcttgacctcaggtgatccacccaccttggcctcccaaagtgctgggattacagacgtgagccactgcgcccggcctccatctgtcacccaggctggagtgtggtggtgtgatcacggctcactgcagcctcaacctcctgggatcaagcaatcgtctcacctcagacccccaagcagctggaattataggcatgcaccaccatgcccaactaatttttctattttttgtagtgatggggtctctccatgatgcccaggctgatttcgaattcctgagctcaagtggtccacccacctcagcctctcaaagtgctgggattataggtgtgagccactgcacctgaccagccttttgtttgacaggaaagagtgatagaggcccagagaaccaagtgccctgtctccaagttctgtgtttggacaactgtccttggtccagctcaggtcttcaactcttttctggagagagcaggctccttgcttagctcagcttctctctgcagggtggctttgagtataagcgcgctatcgtggactgcatcatcagcatcattgaagagaactcagagagcaaggagacagggctgtcacatctgtgcgagttcatcgaggactgcgagttcacagtgctggccacccgtattctacatctcctgggccaggaggggcccaagaccaccaatccctcaaagtacatccgcttcatctataaccgagtggtcttggagcatgaggaggtccgggcaggtaggtctgagccagggctgaacttggaaacttagcttacccttgaataaatgtcccagcaaagggacctgagcctccagtggggatttgtgcactcagtgttcttgctgcacaagctgtttttcataatattgtaggcaggaccttacatgtcatct

SEQ ID NO: 30513 - DNA, 2300 bp, Homo sapien
ttagcagaagcctgaaatatggtattatcatccctgccactttgtagttgaggatactgaagtcctgagagacagtgactttcttttttttttttttttttgagacggagtctagctctgtcacccaggctggcatgcagtggcacaatctctgctcgctgcaacctccgcctcccgggttcaagcgattctcctgcttcagcctcccgagtagctgggattacaggcgtccaccaccatgcccagctaattttcgtatttttagtagagatggggtttcactgtgttggccaggctggtctcgaattcctgacctcatgatctgcccacctcagcctcccaaagtgctggaattacaagcgtgagccaccgcgcctggctgagagacagtgactttcacagtgaaatccctcactcagggatttcagcccagctctcctgcccgtttcactacaccagagctgccttcatgggttgctgcaaatgccatccttagcctgccctgtacagtcccttctgctgtatatatctgtacttctctcttcccttctaggtgtgttccggggtggtcatgacatcctggtgcgctcccggctgctgcttttggacacagtgacaatgcaggtgacagccagaagtttggaggagctgccagtagacatcatcttggcatctgtgggataagaggccagcctgcataggacctcatacccttccccaacactacctggaagttgtgccttcctcatgaaactggcagaaaccccttcccaagcttctgtattgaaaaacaattaggaatcattgcagatttttttttattctgctcccacctcccacccgggactacttgctggtgactttttttttttttttttttaaataggggatgattttagcttgtcctaaatcttgctgtccacccttccaggaaagggacattgtaaatgaataaaacattctcaactcctcttgaatctatcccccaagaaaccatcttatccctgtaataaatcagcatgtatttattgaatgattgctacttctgcagactcatgcttcagggctccaccttccccttcaaggcctcccctaaagaggcagaacacctgccctgtcccccttgcacccacagccctttggctgttgtagtcctgtgaggcaggaccctctccccgtcatcgctgtcccagcaccaagcccaggggtgggagcggtagagggtggttgagtgaatcagctaacaggcagagttcacactccctcccgttcgtgcttcttcacaacgcatcctcctttgatagtcgataaatggaggctccaaagggcttgggtcctgtgtctgatcgttccagcatctggtcttacatggagtgtgccctggggtttctgctccctgttcagttcagcgaatcagcataggcgaacagccctctagagcattctctgttggttgcagatgaagaatctccggtttaggtcccaaggggagcaggcttttaaactcaagccaggctattttaccaactttgaggccaaagtacacccgaaagggctgttttaaaaatctgggcctcacccttagagattcagctgaggggctggggcaggaaaggcttattctagtgcccaccaatgtttgagggcgaagtgcgcgattcctggaagttcttctgactttcatttcttcagtgttcctccatttttgcctcgcactgtgaggcagctggcaggactgtgaagtaaggagtggagtttcctggtttcccgccttccatgaccctgtgccctagactcagcgcggcgggaaccttccctgccagccctgaaacacgctgggggcggggaggaaggttaaccccgccagggaacggccaatatggaggaaagtggagtcccgagaagcttgggatcgatatgtctcccaaggcagtcactgtctcctggggaaacgggagaaaattcatcccaaaccggaggggagaagacgccgcctccggggcccgagggcaccgcgggaaccaagggcccttgggggcggggcctggcgccgggagcgcgggctgaggcggggctgacgtgaggggcggtgacgcgggtggccaaagcggagcggagcgggggtgaggagagtcgagggaggtgacgcgcgctgccggggcgaggtgaggggaggggaggcgacgcgggcggtcggggtatggcgaggggaggggaggggaaaggaagcgacgcgagctgacagaggggagcagaggcccgagcggacgcgaggcgacgcggagagggcggcctgggcc

SEQ ID NO: 30514 - DNA, 2300 bp, Homo sapien
catgcagtggcacaatctctgctcgctgcaacctccgcctcccgggttcaagcgattctcctgcttcagcctcccgagtagctgggattacaggcgtccaccaccatgcccagctaattttcgtatttttagtagagatggggtttcactgtgttggccaggctggtctcgaattcctgacctcatgatctgcccacctcagcctcccaaagtgctggaattacaagcgtgagccaccgcgcctggctgagagacagtgactttcacagtgaaatccctcactcagggatttcagcccagctctcctgcccgtttcactacaccagagctgccttcatgggttgctgcaaatgccatccttagcctgccctgtacagtcccttctgctgtatatatctgtacttctctcttcccttctaggtgtgttccggggtggtcatgacatcctggtgcgctcccggctgctgcttttggacacagtgacaatgcaggtgacagccagaagtttggaggagctgccagtagacatcatcttggcatctgtgggataagaggccagcctgcataggacctcatacccttccccaacactacctggaagttgtgccttcctcatgaaactggcagaaaccccttcccaagcttctgtattgaaaaacaattaggaatcattgcagatttttttttattctgctcccacctcccacccgggactacttgctggtgactttttttttttttttttttaaataggggatgattttagcttgtcctaaatcttgctgtccacccttccaggaaagggacattgtaaatgaataaaacattctcaactcctcttgaatctatcccccaagaaaccatcttatccctgtaataaatcagcatgtatttattgaatgattgctacttctgcagactcatgcttcagggctccaccttccccttcaaggcctcccctaaagaggcagaacacctgccctgtcccccttgcacccacagccctttggctgttgtagtcctgtgaggcaggaccctctccccgtcatcgctgtcccagcaccaagcccaggggtgggagcggtagagggtggttgagtgaatcagctaacaggcagagttcacactccctcccgttcgtgcttcttcacaacgcatcctcctttgatagtcgataaatggaggctccaaagggcttgggtcctgtgtctgatcgttccagcatctggtcttacatggagtgtgccctggggtttctgctccctgttcagttcagcgaatcagcataggcgaacagccctctagagcattctctgttggttgcagatgaagaatctccggtttaggtcccaaggggagcaggcttttaaactcaagccaggctattttaccaactttgaggccaaagtacacccgaaagggctgttttaaaaatctgggcctcacccttagagattcagctgaggggctggggcaggaaaggcttattctagtgcccaccaatgtttgagggcgaagtgcgcgattcctggaagttcttctgactttcatttcttcagtgttcctccatttttgcctcgcactgtgaggcagctggcaggactgtgaagtaaggagtggagtttcctggtttcccgccttccatgaccctgtgccctagactcagcgcggcgggaaccttccctgccagccctgaaacacgctgggggcggggaggaaggttaaccccgccagggaacggccaatatggaggaaagtggagtcccgagaagcttgggatcgatatgtctcccaaggcagtcactgtctcctggggaaacgggagaaaattcatcccaaaccggaggggagaagacgccgcctccggggcccgagggcaccgcgggaaccaagggcccttgggggcggggcctggcgccgggagcgcgggctgaggcggggctgacgtgaggggcggtgacgcgggtggccaaagcggagcggagcgggggtgaggagagtcgagggaggtgacgcgcgctgccggggcgaggtgaggggaggggaggcgacgcgggcggtcggggtatggcgaggggaggggaggggaaaggaagcgacgcgagctgacagaggggagcagaggcccgagcggacgcgaggcgacgcggagagggcggcctgggccgaagtgaggcgacgcggggcggcggagtctgagggccggagcggagcggaggcgacgcggggaggggcgagggatcgcggccggtggctgggggccacctgctccccgagcaccggcccccgctccggggagc

SEQ ID NO: 30515 - DNA, 2300 bp, Homo sapien
ttctcaactcctcttgaatctatcccccaagaaaccatcttatccctgtaataaatcagcatgtatttattgaatgattgctacttctgcagactcatgcttcagggctccaccttccccttcaaggcctcccctaaagaggcagaacacctgccctgtcccccttgcacccacagccctttggctgttgtagtcctgtgaggcaggaccctctccccgtcatcgctgtcccagcaccaagcccaggggtgggagcggtagagggtggttgagtgaatcagctaacaggcagagttcacactccctcccgttcgtgcttcttcacaacgcatcctcctttgatagtcgataaatggaggctccaaagggcttgggtcctgtgtctgatcgttccagcatctggtcttacatggagtgtgccctggggtttctgctccctgttcagttcagcgaatcagcataggcgaacagccctctagagcattctctgttggttgcagatgaagaatctccggtttaggtcccaaggggagcaggcttttaaactcaagccaggctattttaccaactttgaggccaaagtacacccgaaagggctgttttaaaaatctgggcctcacccttagagattcagctgaggggctggggcaggaaaggcttattctagtgcccaccaatgtttgagggcgaagtgcgcgattcctggaagttcttctgactttcatttcttcagtgttcctccatttttgcctcgcactgtgaggcagctggcaggactgtgaagtaaggagtggagtttcctggtttcccgccttccatgaccctgtgccctagactcagcgcggcgggaaccttccctgccagccctgaaacacgctgggggcggggaggaaggttaaccccgccagggaacggccaatatggaggaaagtggagtcccgagaagcttgggatcgatatgtctcccaaggcagtcactgtctcctggggaaacgggagaaaattcatcccaaaccggaggggagaagacgccgcctccggggcccgagggcaccgcgggaaccaagggcccttgggggcggggcctggcgccgggagcgcgggctgaggcggggctgacgtgaggggcggtgacgcgggtggccaaagcggagcggagcgggggtgaggagagtcgagggaggtgacgcgcgctgccggggcgaggtgaggggaggggaggcgacgcgggcggtcggggtatggcgaggggaggggaggggaaaggaagcgacgcgagctgacagaggggagcagaggcccgagcggacgcgaggcgacgcggagagggcggcctgggccgaagtgaggcgacgcggggcggcggagtctgagggccggagcggagcggaggcgacgcggggaggggcgagggatcgcggccggtggctgggggccacctgctccccgagcaccggcccccgctccggggagcagagtccggagcgggatccgcggcccacaggttcgcaggtcgggcccggggacgctgcggactagcgggcgggaggcggggattctgcaccccggccccgggccgtccagtggccgccctcgaggtgaccggttgctggccggcgtgggtcgctgaccccagcggggactggggggaaggacggggagttgggggcaccaagtcacccggaggaggcgaccccagctagctgcgcttgccctgcttcgctggactgtgaagccccctccgctgcggctcttcctgcgctcaggcaggcatttgcagagctcctctcgggacttgcctcagtgccctgcacggagctgggcagtgggctcagggagcgaagcaaacgggcacatccttgtctttgtgggactttttggggaagactttagacggtggtcacggaggggcacggccctgtgggaacggaaagagaaggcggggactcaaggaataagacctaatatttgagatacgtaagccttttccttacgttttgtaatttaaaggttgcgaggggcggtgttgaagaatgtgtgggcgaacatcctgtcacttacctagagatgttctcacgagagcttgcgcctaccaggatcggcggggccagcagcggctcccggagtggagggaccctgataagtactgcccctcttacaacaagagtcctcaatccaacagcccagtgcttctgtctcgactgcactttgagaaggtaaccagcattgcactatgctagcccctcgcccagcctcgtgatggtcatctcctatttggtttggtgtgtgctcagcctctt

SEQ ID NO: 30516 - DNA, 2300 bp, Homo sapien
ggcggctccaggcgggagcggccgcggccgggcctggggccgggcggcagggctggggtgggggccgggccgggccggagcgagggttggggggcccggagccggggccggactaggggaccgagttgggggtcagagaccgagtccgagccggcggctggagctggggacgtagacctaggccgagccggagcgaagagaaatcccgccgaacgcgagacaccgccgccgcagcttccactggcgcctctggaactcgctgggcgtgcgcgctgcgctctggcgggagggcgcttctctcggctttttatagcttcatggcggaccacgttgagaacaacaacagcctggtccggggccagcgccaacttgtgcttcttggagccccttctccggccgctggcttctcggaccgcgcctctccagcgccgccgcgcccgcagcggggcgccccggacagggcctgagctcccggcgcagtggagaggcgacttgcgtcctggaagggctcagcaaaggcgaacggagaggtgcaccctaggctgcgggagcgcgagaggaggggggcacctcgtttggaggccaatagcgcgggccccagaggaggccccacggccgggagcttggcggccggcaacccagagaacgccacgggcacccgagccttgtcccggcccggggggctccaggcctgcccgcaagaggagctttaatttgtccaaactaacacagggcgcgccctcacgtggtcggctggggcaacgtgaactgcgctaggacatcctcgggggttttccgccccatccaaaggggatggcggatgggaggcactctccagctgcaccccgggttctggttgtgcctctgggagcctaggcacaacccggggaatggaggactacggcaggacctctctagggacactgcctcgccgctccccccaccctgttgccgctgatgttcccagggcctcattttgtaatccacaagtagctgccgccggtccccccaaagccaaatgggggctccagggtgggacagggtgggcgggggtgaggctgtgacacccagaggaattcctgtgagaggatggggaagggattcgctcttagttcctgggtgcacccctccccctctcccgtgcacagggaaatgatggcgggaacacagcaaaggagaccatgtcctggagagggtcccgggccccaccctccccgggggggcttgtgcaaggctggcggcccgatctctgctgattccagtattgggggtgcagagaaggcacaggacagtttttgttgaagccgttgcagcctccacttggggaagctgaggccagggtaagatgctcgggtaggagaggggatccctttgggggtaggtgatgtagggcacaggagtggggctggggctggggggtggcagggttgcaggcaggagacagtctccagaggcccagcatagaaaagcgatggaggggtgaggggggacaggacgctggcgaattggggttcccagagtgagagacaggaacatttacaggtggacagagtaaaaggccctgaaaagggggtgggttggtgcatttgtggccttgggcccaagcaggcttctctgggtgagggctagcagcacctcccctcttctccagctcacccctttcacacacacacacgccccccattttgtcaccctgtcaagggaataaaccccagagaggaagaaattatgtctaggaggaaacggtgagcctggatgggttttttaggggggaggctggcaggggcatggagccaggaaacagccttcgccccccagagcaccaggtaccctgagaaaagtgagaagagagattgcagcccaggtccctgcagaggaggatgggctcctttcccaggaaggactggctgagtggactgtctccagggcacaggacaacgttgagggcctgaggcctccaccttcttgaagaaggaccatgtgaatttcctgacagagaacggggatgggtttctgaaagcaccacccagctgagcctgccgaaactgcacagctgtttccaggccaggctggctgcatggaggacgtgagaggaacagccagctgtgtgtgctgggcccactgatcagggtgctcaggaccaggagccttctgaggatgtgcagaggggactctggggagaggaacatggtggccacagctggagtgaccgcagtgtacagagatgggatgggagcaggaaacccaaaagagccggccctggaaccaggtggaggggaggcagcccggccatgacccag

SEQ ID NO: 30517 - DNA, 2300 bp, Homo sapien
cctccaacactgaggattaaaactgaacctaaaatttgggtgggaacacagatccaaatcatatcacctgctctgggtcatggccgggctgcctcccctccacctggttccagggccggctcttttgggtttcctgctcccatcccatctctgtacactgcggtcactccagctgtggccaccatgttcctctccccagagtcccctctgcacatcctcagaaggctcctggtcctgagcaccctgatcagtgggcccagcacacacagctggctgttcctctcacgtcctccatgcagccagcctggcctggaaacagctgtgcagtttcggcaggctcagctgggtggtgctttcagaaacccatccccgttctctgtcaggaaattcacatggtccttcttcaagaaggtggaggcctcaggccctcaacgttgtcctgtgccctggagacagtccactcagccagtccttcctgggaaaggagcccatcctcctctgcagggacctgggctgcaatctctcttctcacttttctcagggtacctggtgctctggggggcgaaggctgtttcctggctccatgcccctgccagcctcccccctaaaaaacccatccaggctcaccgtttcctcctagacataatttcttcctctctggggtttattcccttgacagggtgacaaaatggggggcgtgtgtgtgtgtgaaaggggtgagctggagaagaggggaggtgctgctagccctcacccagagaagcctgcttgggcccaaggccacaaatgcaccaacccacccccttttcagggccttttactctgtccacctgtaaatgttcctgtctctcactctgggaaccccaattcgccagcgtcctgtcccccctcacccctccatcgcttttctatgctgggcctctggagactgtctcctgcctgcaaccctgccaccccccagccccagccccactcctgtgccctacatcacctacccccaaagggatcccctctcctacccgagcatcttaccctggcctcagcttccccaagtggaggctgcaacggcttcaacaaaaactgtcctgtgccttctctgcacccccaatactggaatcagcagagatcgggccgccagccttgcacaagcccccccggggagggtggggcccgggaccctctccaggacatggtctcctttgctgtgttcccgccatcatttccctgtgcacgggagagggggaggggtgcacccaggaactaagagcgaatcccttccccatcctctcacaggaattcctctgggtgtcacagcctcacccccgcccaccctgtcccaccctggagcccccatttggctttggggggaccggcggcagctacttgtggattacaaaatgaggccctgggaacatcagcggcaacagggtggggggagcggcgaggcagtgtccctagagaggtcctgccgtagtcctccattccccgggttgtgcctaggctcccagaggcacaaccagaacccggggtgcagctggagagtgcctcccatccgccatcccctttggatggggcggaaaacccccgaggatgtcctagcgcagttcacgttgccccagccgaccacgtgagggcgcgccctgtgttagtttggacaaattaaagctcctcttgcgggcaggcctggagccccccgggccgggacaaggctcgggtgcccgtggcgttctctgggttgccggccgccaagctcccggccgtggggcctcctctggggcccgcgctattggcctccaaacgaggtgcccccctcctctcgcgctcccgcagcctagggtgcacctctccgttcgcctttgctgagcccttccaggacgcaagtcgcctctccactgcgccgggagctcaggccctgtccggggcgccccgctgcgggcgcggcggcgctggagaggcgcggtccgagaagccagcggccggagaaggggctccaagaagcacaagttggcgctggccccggaccaggctgttgttgttctcaacgtggtccgccatgaagctataaaaagccgagagaagcgccctcccgccagagcgcagcgcgcacgcccagcgagttccagaggcgccagtggaagctgcggcggcggtgtctcgcgttcggcgggatttctcttcgctccggctcggcctaggtctacgtccccagctccagccgccggctcggactcggtctctgacccccaactcggtcccctagtccggccccggctccgggccccccaaccctcgctccggcc

SEQ ID NO: 30518 - DNA, 2300 bp, Homo sapien
gaccacaccgaagtcctcttggatttctatttggattgcctatgccaggggctttccaagtccaagtccacagctccttcctcctgagaacctgagtgtgaataacccactgcatcccagggaggatgggccagttctggatgatgctgtgtgtatttcctcagtgatatggtttggctgcatcccccacccaaatctcaactcgatttgtatcgcccagaattcccacatgttgtggaaggaacccagggggaggtaatttaatcatgggggccagtccttcctgtgctagtctcgtaatagtgaataaatctcacgagatctgatgggtttatcagggggttccgcttttgcttcttcctcattttttcttgctgccatgtaagaagtgcctttcgcctcctgccatgattctgagtcctcctcagccatgtggaactgtaagtccaatgaaacctctttttcttcccagtctcaggtatgtctttatcagctgcctgaaaatggactaatacagtaaattggcaccaatagagtggggcattgctgaaaagatacccgaaaatgtggaagtgactttggaactgggtaacaggcagagattggaacagtttgaagggctcagaagaagacaggaaaatttgcagcctgactatgcaacagaaaagaaaaccccattttctggggagaaattcaagctggctgcagaaattagcataagtagcaaggagcctaatgttaatccccaagaccatggggaaaatgtctccaggctatgtcagagaccttcatggaggcccctcccatcacgggaccagaggcccaggaggaaactgtggttttgtaggccatgcccagggtccctgtgctgtgtgcaatctagggacttggtgccctgtgtcccagctgctccagccatggctgaaaggggccaatgtatagtcgggctgtggcttcagagggtgcaagcccaagccttggcagcttccacatggtattgatcctgtgggtgcacagaagtcaagaattgaggtttgggaacctctgcctagatttcagaagatgtatggaaatgcatagatgcccaggcagaagtttgttgcaggggcagggccttcatgaagaacctctgttagggcagtgcagaaggaaaatgtgggattggagcccccacacagagtccctactggggcactgcctagtggagctgtgagaagatggccactgacctccagaccccagaatagtagatccatctaccacttgcaccatgcacctggaaaagctgtagacactcagtgccagactatgaaaacagccaggagggaggctgtaccctgcaaagccacaagggcagagctgcccaagaccgtgggaacctacgttttacatcagcatgaccttgatgtctaaggagatcattttggagctttaaaatttgactgtcctgctctccctctccctctccctctccctctccccacggtctccctctccctctctttccacggtctccctctgatgccgagccgaagctggactgtactgctgccatctcggctcactgcaacctccctgcctgattctcctgcctcagcctgcagagtgcctgcgattgcaggcgcgcgctgccacgcctgactggttttcgtatttttttggtggagacggggtttcgctgtgttggccgggctggtctccagctcctaaccgcgagtgatccgccagcctcggcctcccgaggtgccgggattgcagacggagtctggttcactcagcgctcaatggtgcccaggctggagtgcagtggcgtgatctcggctcgctacaacctccacctcccagccgcctgccttggccccccaaagtgccgagattgcagcctctgcccggccgccaccccgtctgggaagtaaggagcatctctgcctggccgcccatcgtctgggatgtgaggagcccctctgcctggctacccagtctggaaaatgaggagcgtctctgcccggccgccatcccatataggaagtgaggagcgcctcttcccgaccgccatcccatctaggaagtgaggagcgtctctgcccgtccgcccatcgtctgagatgtggggagcgcctctgccctgccaccccgtctgggatgtgaggagcgcctcgtctgggaggtgaggagcatctctgaccggtcgccccgtctgagaagtgaggagaccctccgcctggcaaccgccccctctgagaagtgaggagcccctccacccggcagccgccacgtcagagaagtgaggagcccctccg

SEQ ID NO: 30519 - DNA, 2300 bp, Homo sapien
acaagaggagtgtcaaagagtcaaactaaagaaatcctttcaaagagggatggaccgggggccagttccctctggactcaaagtgtccagtgtctcagagggtagatgtgtccaaggaatgacgtgcagtttttgactatttccctcccctgacctctgccctttctacataaagcaggttggagtttttctcatttcacctgtgacccagctgatgtgatttcttgctcaggagctgtgaccggggggagaccttgagcctggggaaatacaggtacattccctgggctattccagggatgactgcaggccacctccagcctcttgtcccgggatcccagtggggaaaccttgagcctgggggaatacaggtacgttccctgggctattccagggatgactgcaggccacctccagcctcttgtcctgggaccccagtgcccacagggaagcagtgtgggtaccccgtactctcctctgtgaagtgaggtggcagcatgtcccgtaccccacaaagactgagccatcaggttactgcttccaaatctcttgggtctttggaaactgaaggcaggctctgtggttcatgaaccctcccagttgatgaacccacttgacccaatcaagaccttttctttcatgacaggcatcattcaggctgccattagtaatgtgcttccctgctccgcatcccatctcactacatacagcctgcaggataagcaagattcatgaggtgtggaatagccacagatgcagcagggttctagccccagcactacggcttgccagctgtgtgacctcagacattccacttctctgggtctcctcaaactccccattctcctcacacccaaaaatctcaccatggagttgttaacacacccttctcacctctctctcattcagtcatcaatacaatccagtttagcttctgaccccatctggtccctggaactatccctgtcaagatcgccagtgacatctgtactgtgttccaggagtggaatctaggaggtttttttcctcctgaaatttgattttcaaaataatcttaaaaacaaaagctaagggctgggcgcggtggctcacgcctgtaatcccagcattttgggaggccaaggtgggcagatcacctgaggtcaggagtttgagaccaggttgaccaacatagtgagacccttgtctctactgaaaattaaaaaaaattagtcgagtgtggtggcgcacacctgtaatcccagctactacggagcctgaggcaggagaatcccttgtcccttgaacctgggaggcagaagttgcagtgagccgagatcttgccactccactgcactccagcctgtgcaacagagtgagactccctctcaaaaaaaaaaaaaaaaaaaaaaaaaaaaaagctaagcaaatcaagaacaagcttaaaaattagacagtagctgggaacaatggctcatatttgtaatccccgctactcaggaggctgaggcgagagatcgcttaagaccagcctggccaaaatagtaaaaccataactctacaaaacaaccaacaaaacaaagcaaggtagtttagactaatggttagaagcgtggagcttggagtaaaatctccaaaattctccttccacatatgcaaaatagagacaataataggttacattatagaattgtggtaggcccatcgtacgttagcggttccggtctcatcactatttactatgtaaattcagtgagggaattttgggaagtcggtcttgatctctcctgaccgctaggaagcgcacttcggagtagaggaaacaagggcggaaatagcccaaacgctagattggcttcaacttctggcggaagtagattcctccctacaccaggtctcaactcagaaagaattccaactttctaactagtgccaagggcaggtaagataaattttcctttacattcttagatattactctctattaaaacagttaaattcggcatttctgcagcactctttctttgacatgtcttttttttaaggacccggagccggaagtgcttgccttttccctgtcaggacccagaggttacctcccatcagccccggcgctctctcatcccttctctcttccttggtgcttctttttcctgctcggtgagtttgtttgtttgtttgtttttgagacagagtctcactttgcttcccaggctggagtgcagtggtgcgatctcagcttactgcagcctccgcttccggggttcaagcgattctcctgcctcagcctgccaagtagctgggactaccggcgcccacca

SEQ ID NO: 30520 - DNA, 2300 bp, Homo sapien
gctttgttgcccaggctgatctcgaactcctgggctcaagcgatcgtcccacttcagcttcccaaagtactgggattacaggcgtgagccactgcatccacccctggcttctgctagctgctgggttcctacatgagtgagcttcacctgtctgcaggatctcacgttcatgggcacacaggagcatcctgtgggtgggactaggcccaaatccatctctgaccactgtcttggccacttgctattcggtatctttatgacagaggcctgatctcctataagcagagaggctcaaatatcaggacttccagctctgtgttctagactagaccttggtggctcagactccaggcttcaagctcaggagccagaattctaaacaaggtctccccctcccctgtgaatatagctttattggctttccaccctggttttggcgataatacttgctcatttgaattttttgaaaacataaaaatcaaaattccccagcctgagttggctgttgtgaatattttagtgaccatcctttcacaaatctcttttccttttccatttacagaaaattatttatataactcattgttaaatcacactttaaaaaatcatgtgtaccttttgaaaatattaatgttacatatctcccccttccctctccttccttctcacctccacagccccttcccaacccccaaataaccaacattaactcgctggagcgtaacttccatcactttttctagaacatgagctttcatgtgttaccagcttaagacaagcactgcttgatagttgcagaaggtggagaccctggctcagtattttttttatattcagcacatctgagaaaactctcccaaggatctccatgagattaattcaagacaaggagaaaactgccaccaaacaaatccaagtgggctgggcgcagtggctcatgcctgtaatcccagcagtttgggaggccggggtaggtaggatggcttgagcccaggagttccagaccagcctgggtatcataacaagaacccatctctactaaaaatttaagaaatcagccaggcatggtggtgcatgcctgtggccctagctacttaggaggctaaggtaggagggtcgcttaagcccaggaagttgaggctgcagtgagccatgatctgtactttagcctgggcgacagtgtgagaccttgctcagaaaaacaaaacaaaaccgaaaattggtctaagttaacctcatcaagtcttggtcaaatcctcctgcctcctgggacagctcagacctcgttgcaccggggccttgggggctttgttgtccttgttatgaacaaacccccctcatctgtagtcccctgagccatattgtcccaaggcccctttcctggcatcacactacagctatatgcatgtcaccactgggacagtggttcaagggacccctctgcagtatttttgcaacttccagtgaatctacaactattcaacaataaaaagttactatatagataagaagaaaacgtcttaaaaatgtgaattaaaaaaaaaaaaaacacctcctctgaccccagaggcttagggagggatgggcagtctgggttgatgggtgcagatgtttctcttgctgtccacagccttgctgtacccaggagacaagatcattttccagatggacaaagtgtgccccatccggcagccgggaggctactactctgactggaaggtcttttctccgaatctggctctgctccggtcccagggccctggcaagtctaagaggactgacaagctgagtttcggaccccctttctccctgccttggcctcctgctccattgctatcccttcagtgtgggggctggaggctggagtacctggggcgccatgctgtgcttgcgtctgcatcctagggcaacatcccccaacctgactgctcactgcagactggccagtcccgggtcacccttggcgcatgtctcaggatcatggcctgctggcctcagctcccacacagctaccctcctgaccccagtcctgcacaatcataaggtttctggaaaagatgaaaaggagagcctccttagagaacagggctggagcgagggccttcacaaatccccagccaggtgtcagggccctgcagagaacagggggcagccctttctctgccctgccaccttgcagcggccacaccccttctctggcaagaggtgggcttgcagctcataggaggataaaagaacatttccccgggacctgcctccagccctttcgagaggccaacctgagtcttctctaagaaaat

SEQ ID NO: 30521 - DNA, 2300 bp, Homo sapien
gttcattgacacaagtttgctgagggttccatgtagcaagctattgtgaggatgacgattgtgaggttgggaggaaaaggaggatcccccttttacaaatgtggaaatagaagctcagtgaggccaacatttatccaaacatatagtgatagtaagtgataagggtactaccaactcattctctctctgtgacatttccttgggataagaagacagataagttgggtttaaacatagctctgctacttcctagctgtaccatttgggtctcagttttctcatctataaaatggagacaaccattgttcctacctcctggggtcgctatgatgtctaaatgcattcatttatataaggtgcctaggacgctattgggcacatagtgagcactcaaacatgatttccatctgtattattattgtaatctcacaagtgtccattgggttggttggcccggaaacttcagggtcagtccttgctgttattatagcccaaatcctaatttcatgggtctaacacaccctcttctgccagcagcatagtgtctaagaataagaactagacttgggttagaaatgcagctgtactgcttacctgctgtgtggcattgggaaaacctttcacatctctgagcctgattccttattgtgaattaggtagtacctcatacctaattcataggatcatttattccttcagcaaacaattactgcctgtcttcctacggcctgggctttgttcagtataaaggtgggagatggggatacactgtaaataagacacggtcttacttccagggtgtcttagcctggcctctcttgctgtcacagaagacatgatgctgggtaatttataaagaaaagagagttttttttggctcacagtcctggaggctgaaagtcctcatgaggttgcagtcaggatgttggcctgggccacagtcatctgaaggcttgactggttggcctctagggagggcctcgtgctgcatcctaacacagtggaaggcatctcagggtgagggggtgcacgagagggagccaaactggcttttctagctgatcccattcatgataacgagccctcttccatgataaccaattaatccttagcccattaatccattaatccataaatgaattaatggattcataagagcagacacctcatgacccaatcacctcttaaaggccccacctgttaataccattatgttgataacagtattaagttgcttctgacccagcccatctgtggatcatcaaaagatgctgcatttccaacgaactcctggtgatgcctgtggtagtggtccacgggaccacacttttacttttgctagctatttaataatgtaaattaattataaatttaaaaatggagtccttcaatcacaccagccacattttgagtgctcaatagtcacatgtgccaagtggcttaacaaaagtcatgttcagtttaaacatgtattttggaggggacaaacattaagccatagcacaaggtgttcacatgttagtgggagaggcagacacataggattaatggctctacagtttgctacaggccattaatagaggtgggtctctattataataagcaccctgggaggagcacagaggaacaataccctagggaatgggaaggccctttgtaaactgcccagtgctgcaccaaggtagaagattatcatccattacaaaatatgccctttcacttggaattggagaaggaggatttggacagatagagaaagagagaaaagtcttccaggcaggaggcctatagcagatgcaaaggctgggggcggggatggggagtctccacctggctccagggaagggtataggttttggtgcactgagagaccagaccagtgggattacgcatactgactggtttgacaggagagatgtggataagaatgaaattttagttcctatattgcccaagccttgtgtttttcagatgagaaaaccaaggctcagagaagcaaagtctcccaggcattttgtggccaaacacagttgccctgaacccagtgccctttgtactctatcctgctatttagagctgctcgtcctctccttagtccctaactctggggactgcatccgcctggcctgtctcctttgaactctctcctctgccctaccctctcacctcttccagaagaaagcccccaggctctcccggctgtcccgccagatggtgccccagctccagctgcccgagccccctgccctgtcggtcatgtactcctacctgcatagccgcaagatcaagatcctggagat

SEQ ID NO: 30522 - DNA, 2300 bp, Homo sapien
gccaggcacagtggcttacacctgtaatcctagcactttgggaggctgaggcaggaggattgcttgagcccaggagttcaaaaccagactgggcaacataatgagaccccgtctctacaaaaaattttaaaaattaattgggcatggtgacatacacttgtggtcccagctactcagaaggctgaggtgggagaatcccttgagcccaggagattgaggctgcagtgagctatgatcacaccactgcacttcagcctggatgacacagcaagaccctgtcttaaaaaaaataagtcttaatgccatttttattacaagtattgttacagttcaaataccaaagcatttactattagaaagaaaccaagggaaaaaactagttactatgtcttaattaccaactaccattttaaggtataatttgaaaattaaattgattgaataaatgaaaaataaatcagttgttcaggaaactgcctttgttgtagggcagtgtgaaccgaatcaggctgcagtgtgatgcagaggtagttggttgtttccactttagtgagtgtcagtttttagaaggatagattttgaccagagaacaggaaaactggccacacctccctctccccaaggcaaacccactttatagtttaccatcacattttcatttaacaaacatccaagtagcattcacaaagtgtaaagccctgtggtggggaggggcacaaagataaacaagttctgtacagaccctcacagagagaaagaagggcacctaataatggaagggaacaaaagcggtaaggagtagggacaagacacccaaagagggtggagaggggcctctgaaaccttgggcccagctgggcctggagggtggggcgagctcaccaagctcagggcatcaggtgtggctttgtggtagggctggtggtcacataccttcccccagcatctccatggggagtgtgggcccgtgtgaatgcaggaggcgagctctgcaccaggggagctcaggacacagccaggttgctcaggctctaggcctggcttttcctgtttcttgcaggtgaggttgcctgacctctgtacctgttaacttgtcttttaaaaatgggatagtggtgtctacctcacacaatgatggtaattatgaagttcagacatgtagtgctaaaatggtacctggcttgcaagagtgctgtgtgaatgtggcccatggcaacaatctgtttgcaagcgtcacaaagatagcttgtctcagcaaaggaataagggcttaggtgtttctctttaactttttaaaaattgagctaaaagccaccatttaaccattttaaagtgtacagttcagtggtttagtacatttacagtgtgcagccatcatcactaattccagaagtttccatttcttttttccactccaaaaagaatctctccacctgttagcagtcacttcaattactcaccccatcccctagcaaccattcatctactttccgtgtctgtgggttcgtctatgctgaacatttcacataaatggaatcatacagcacgtggccttttgtgtctagcttcttgcttagcatactgttttgaaggtttatccatattgtagcatgtacttcattccttcttatggccatcctatggatatacctcattttgcttatcagttgatgcacatttcaagggtttattattattctctggtcctcaggttctgtaactccaaaccatggcaccctgccataagcggggcagaacatacccaacacctctatctggccacagctcactttggttcttcctaaccctctggaggaggcagggcctatttttcctatgagaaaactgaggcctagagatatggagacctgcggaagatcccacatttcacgggaaaaccggagactttctacactggattcagggactactgggccgaacaaagaaatcccgcctttcaccaagcccagaactgggcggggcgtggatttgctcgctgcccctcccagaattggacgaaaacgaggtggggccagcaggcgctcggcagggcgggctcgctcttaacacgtgacagcgctcagccaattggcgcggggcgtccgtagccacggcaacaggttgcttctgcagtctgagctgagcgcctttcgcacgacttggagttacggtttatctgataccccggtacccctacgcaagcaagcccacatcgacacacattcacacacgcccttcagcaccccctcccagcaccacgaccatggacgacgactatgaagcgtaccacagtctgttct

SEQ ID NO: 30523 - DNA, 2300 bp, Homo sapien
caatgcaggaaccacatagattatccatattaaaatgagggagattaaagtcagtgtggaccagtcttgtgctatgggagtattttcctgtcttccaaaagcttcccatatcctctagcacaggttaaaaggtgttggaaatctctgcacaacaaaaaagtcaagctagaaacttttcggattaatcactgagtagggctattataaagatttctgggggcacttaccataaatttgagaatatgaaccaatagctaagctcttaagcaccagaaaatgcttaaataaatcagtgagttacactgtcttctctgcaaataaatgaggtaaaagttttacataatgtaaaatttctgggagagagtgtgtatcactttcatcagatgtaatcctccagaaggtaaataatttgatacagaatttttgaatcttcttcattcttgatcctcatggtaaccttgtaggtacaataaggtttactctcaatttattgataaaattgagtgacaggttaaattacttgcagaacagacacgagaacccaagtctaccaaatcttggtctaatacttctcccccatactgttattgaaaaaagctggcaaggcaaggtggctcattcctgtaatgctagcactttgggaggaggaagtgggaagatcacctgatcccaagagtttgagaccagcctggagagcacagtgagatcctcgtctttgcaaaaaatgaaaaaaaaaacccaaaaaaacaaaaaaaaacaagcaaccgggcgtggtggagcatacctgtggtcccagctactaaggaggccggggtaggaggactgcttaagtccggcaggtcaaggcttcagggagctatgattgtgccactgcactccagcctgggtgacagagcgagacctcatctcaaaaaaaaacccactaaactaaaacttcattaaagttccaatgtgtcttctatgatgaaaacatacttttaaaattaaaaaaaaaatttcagtaaagtgtatcctaatcactaaaccacagattgtaaaaggtggatgggtctagagagatcatttaacccaagttcttttctacaaatagggaaactgcaagaactagaattagaatcaaggttttctgatgtaatttggggtaaaataattttgaggagctggatggatcttatgaaatgatattgtttacaattttagagataaaaatactgaagcctggtggaatcagcacaaactcttaagagactggggctcaaattccagctctaccagctgtaagtttagcagcaagttacttaacatctcaaagtctcggtaaaagactctgtaaaaagaaggtgatgcctctttcaaagtagttcttagtattaaattttgaaaaaagtaggtaaatcttaacctcctatcacacacgtagtctaatgacttcctaggatcctccaaccccaaggggacctctttcacaaaacctcccggctcccccccagtctccctagtcatcttagatgaggaagtcgagcgcaccccagggctgatcgcacaggaagagcacctgggctccagaccctagtaactaaacccgtgggcttcgaggtttctgccgaccctctgtcaaaggttagaaaggcccacacactgtccactctcccgataccattttacaggtggtgaaactgaggcccaaaaggggacagtaacttaccggaggtcattcggcgggtctgggactaggcgctcactagaggtgacggtgggggcagctccgcggtcccccagactcagactctccagcccagtcgtgcccatcgagcagggtccggctgcagcaacgagcccagcgccgcaacgcccagggtgtggggcggagtaagatgtgaaacctcttcagctcacggcaccgggctgcaaccgaggtctgaatgttgcgaaagcgccccagacgccgccgctgctttccggccgccccctcggctacagccgccatttccacgctccaccaatcaaatccattctcgaggaagacgcaccgcccccacacgccccgaccaatcgctcgcgctctggttgcgctggcgccttaggggctccagtgccaccattgcttttgctgcttttctggctttccctttcggacatgcgcgctcggagcaaggcgccctcgcactcagcttaccgcgcatgtacgttgccaggggtaacgcaggtagccaaagtggcttgtggagtggcgaccgttagtgaggcggttgctgagacagacgctgaggcgggtaggaggagcccgagccgtaagggaa

SEQ ID NO: 30524 - DNA, 2300 bp, Homo sapien
ttgtttttttttcagagtggatgctaacatttaaaaattaggccatttcacataaaaacccagattcctagcttctggtaaaaacaggaagagctgagcacactaggccaaattcctgcatggtggtaattggcaggagctgagcagcagctgccccttttaggccgagcatgagctctgcagtttgccacactctattactctgacattgaagccaaatgttcagttgccagctatcatcagcttgtgctataggtacgtttataataaagttaaaagtaaaatgattttttaaaactcaaatctctattaaaagtacaaatgaaagattcactgatacggctgtgtttcaagaaaaatggggtacagaatacaagactattcctagggaaaacatacaattcctagtgttgaagatgcaaataaacatctcccatttatgttacctgcctgtctcctgcagacatttgagtttgccacgtctgtaacataaggaaaaattaatgtagtggctgagagcgttgacgttggagtgaggaagacctgagcttgaaagctggttccacccctcactgtgtgacgctggcaaattatccaccctctctgggcttcagtttcctcatacataaaatagaggaaattatagtacctaccttagagagtggtgaagacacaacgagataaaggatatgaagtgcttagccagcacctggcacatagtgtcagctaccactagtgccgaacacaaaagagaggacccgtctccaacgtgagccttgaaggatgttcaggatttccgtgtgagatgaggagagacggcatgctttacacagagaaagatctcagaagggacagaaccaaagacaagtaacctgctccagtggccagaacagaggcttcacaacaatgctgaatgattttcaaagtcaggccaagacctatcccataagtaagaatatgacaaaacagactgctatgttatagatttaggcgataacaatggaataggacattaaataactgaatcaaaaggtgacaaagtcattccccttcagttctttttcagacttcccaattaggagagcttgtgtttggtgctcattttgagcacctttctgatcatacctgcccatctccagttttagagaaacgagatctcaggtttaaaggctccctagcaacaatagctagctacagcttgttcagttttgtttctccctactttaagttttacttttacacttagagcaagcgacgctgattttatcttaacatttagagcaagtgacactggttttcataaatggagtaataaagtttccttgtaaaatgtgaaatcataattaaaataaatgagacaatttagagaaaaacgtcaagaaaacaagagtatgggtactatgtggatgtggcaagaactgtgaagcttgagcagcttcgtgctgtctcgtgggtgtgagatgaatccaaggcagcgacagggccagaccgtgagggaagagccgcctccacccgccaccacctcaggcgcggcacctccctttgccgctctccaaccctcgggagtttctccaaccgccaaggggcgggagggcgaccctgcagtctcccaggccggggttcagtgccctcggcccaggcagcaagcccgctgcccccctcaaacacgctgcagcggctcgcgcactccccgcgaggactcgacctcctgctcttcgcgaaccgccccgctcctcaccagtgctcggctttatctctccacgtcaacacggccctcatcacggcttcccttacggctcgggctcctcctacccgcctcagcgtctgtctcagcaaccgcctcactaacggtcgccactccacaagccactttggctacctgcgttacccctggcaacgtacatgcgcggtaagctgagtgcgagggcgccttgctccgagcgcgcatgtccgaaagggaaagccagaaaagcagcaaaagcaatggtggcactggagcccctaaggcgccagcgcaaccagagcgcgagcgattggtcggggcgtgtgggggcggtgcgtcttcctcgagaatggatttgattggtggagcgtggaaatggcggctgtagccgagggggcggccggaaagcagcggcggcgtctggggcgctttcgcaacattcagacctcggttgcagcccggtgccgtgagctgaagaggtttcacatcttactccgccccacaccctgggcgttgcggcgctgggctcgttgctgcagccggaccctgctcgatgggcacgactgggctggagagt

SEQ ID NO: 30525 - DNA, 2300 bp, Homo sapien
aaaacgctgggattacaggcatgagcaccgcacccagcctaaaatgtttatcatacttaaagtctgtgttgatattaatgccggagaggtacaatgaggcatgtcagaggcccacttcccgtcatggcctgaaacagtctctcaggttaaattttaaaagagccctggttgaggaggaagtccattcagacggttgggggggcttacaattttatttttgttttacacttgttatttctcactttcatgtctttgcttgttttattttctttgcctgaaatgtcctttacccagtgtcctcctccatgtttcaaaagccctacctttttcaaatatcttcttcattaatctttttctgatcctctccttgaattaaaatgctgttgaagcggcgtcattgtctggggtaaatatccgagatttgttgtctcaacagcaatggaaaactaggatacggacacaccagagtgaggttacgagtagaagtttaacaggcgaaagaaagagaagagctcactgcagctgacagcgttctcgaaaaaatgagttgccacctctgtggtgaaatgcaggttttatagataagcttgaggaggtggtgtctgatttacatagggcacaaaagattgattggattggtgtttcatttgcataactttcgaaaaactggttagggctaggtgtgtcatttgcattgggtgcgaaaagctggccacccccaccctaatcttttattatgcagttgggttatttacgtggccagcgccatgttgcccgtttctttactgtacacgtggtgacaaattaaagggaggacagaacctccatgttgaacatacttggcccccaggtagcctttttctattggcacagctgccggcattcaccagtgcaagcttccagcttgcctttttatttatttatttattttttttttttgagacggagtcttcctccgtcgcccagactggagtgcagtggcatgatcttggctcactgcaacctctgcctcccaggttctagtgattctcctgcctcagcctctcgagtagctgggattacaggcgctcaccacccaccaccatgcccagctaatttttgtatttttggtagagacaaggtttcactatgttggccaggctggtctcgaactcctgacctcaagtcttcctcctgccttggcctcccagagtgctgggattacaggcatgagccgctgcgccaggcctcagcttgcctatctatgtttgcagctcgatttttcaggctgctctttgttagaaaaaaataatttcttgggctgctttttattaaaagggaagttctgccgaagactcttttaccttcactatctggctaaataatttctttctagctcctgtatcactgcgtcttcctccttcgaatcctgttttcatgtgtctcttaaagcctttatcagagtactgttctgtatttcatccaatctaataggtcattgattataaaataccattgttttgtgtatcaataagaaagcaaaaaatgctgccagttacactgaaacatcatcaattataagacacaaccttagaggtgagaaaatgtgaaaaaaaaatgtaagctttagaattgatgacatatggtagttctttgtgaaagtgtctgtttcacaccttctcactggatagtaatttccctgaggggagggagggattatgatctgttcatatctgttggtgcctggcacctaagagggactcagtaagtatctgtggatttactggcccttaacacattctctcatgttgtctagcctttatgatattattagaagagttaataccctcaacagttgaccctttgaataatttcttgtgtctggcttctggacaagaggaaatcaggacaaagagctaactactgagtggatcatgattgaatgggctgctgtggtgtggcggttgaatggaatttgcaacaaatgcaattcgtagttattctttttctcctcagtacacacacagtgtttcttaatggcaataaagtttactttcctggccattagcagacttcatcattttggttcctaattgtctttttcccttgtcttctgttcagtataaatgacatcgcatttaagcctgatggaactcaactgattttggctgccggaagcagattactggtaggattttgtcttagtttcctcttaaagtgcttccctaacctccctcttgtgagtactctgaaatttgaccctttttttttttttttgagattaaaaaggcaagggtggaaaaaccttccctattactttt

SEQ ID NO: 30526 - DNA, 2300 bp, Homo sapien
ctacaaataagaaaacagtgggtgaggagaaggagaattaattctttaggagtaggagaattaatttctgtgctttttgttggtcacttgcagaagagcatgtggtctaaagtcagaggctgtgggctcattattaaaatcttcagttgtagccactgaaatctttgtggtttgctgcatagtaatctacagttgtttacttcccaggcacaatgatgctatacaatgtgtctcctacaatcctattactcatcaactggcatcttgttcctccagtgactttggtacgttctgattcctgatgtcctgtcctggaataactgaaaatctgggctaaaaatgctaaaatgcattcagaatatggtgattttatcctgagagagttaatactacttctctaccttcaatggctgaggggaggctgacagttattctttaaattgtgtggaaaccaagacagtgaatggtgacctttactctggtaagacatcagagactacaggaagggccccagcaaaggaaatggtaacaagattgggagggcacaggcataacttggtgttgctgcctttgggaagccttcccttggtgttgctgcctctgggaagccttccctgactcaccctggcagagacagtgcagttgtcctcacctttgtattgacccacatctatgtttatgtgaaattcttcactgttgcggttctacttcttgtgcaatttgtcgtcattactggtttaggtggctgtagctgtcctccctgaggggctgaacaccttgaggagttcatcctggccacggtcccgtgccagcattacagcactggtgtagtactggcacaaaagaggtgtcagtaaaatgtctgtggagggaggaagggagtgaaattgggcagaggcttgtaggttatttccattaatggttgattctgttttcagctctatcagtctgtgttcgttgctagtggatacaatgaagtcactagatgaggagtcagaggcctaatccctctcagtgttccagttcccttatctaaaaggagcatgctactcactgtgtctcactgatacggttctggttctgaggttcaaaagagagaatggaattgaaagccaattgtataaatacatggagaaaggcctgtcatttgtttaacatattttatagcattttcttcatgtgaagcactggtctgtgtgcttacactggaatattaaaaaggcaaaatagaatccctaccctcaaggagcttgtggtcttaggagaaggtgggattaaaaaaaatataatattaagtactagtatttattgaatgcttgcagtgtgctaggcactgttctaaggattagaaatgaatttctatttgagctttatgacagcccctgaggtgtcaggtattattctcattcccaccctactgatgaaaaagaggtagaggtcccttagctagtaagtggaggaaccagggcttggactttagaccaggtgattgcatacagagcctgctctgctaagcactgctgaaggaggcccaggaggaaggagtttcttccagcttggggctccaggcaggcttagtggaacacagataacatgtgcacacgtcaaaatgtttggaggaagcgttctggaccaggggaaaggcaaaaaataacttgtttgatgttgcacttggccatgtatttgtgcactggagttaccttcttgattgtacttcgcaacttggcaaatagaagaatttgcttatgttgtctagacatacacttgctatgaggcactgagccagggcatctgggacaggggggagcaagccttaggtgaccagtgtgccatgggagaggcacagctcagatagagtcatgtgttgtgattgagacctatgaaagaaaactagattttcagaaagcatcattgttattttaaatgctaggttatactctggttgcagtgtcaaagttataaacaatgaaactgtcatttctttgagagtcaaatccctgaaaagttggctagaactttaccaatctattttatttttcttctgaaagaatgatagattcatagtaagttacaaagatggtaccaagaagtctatgtacttttcatccagtttcccccagtggatccatcttatgtaactattatacaatatcaagaccaggaaactgagactggcacaaagtgtgtatattatatagttctgttgttttatcgcatgtgtagattgccatcagcgtgacacagaactaagccatcaccatgcagttaccacttagtgtcatatctactcaccttacctc

SEQ ID NO: 30527 - DNA, 2300 bp, Homo sapien
cggaggagccctgacacactcctgcactcctggagcacttgggtgggactaggggaggtgccactgactccaggagctgaggtttgggctgtgtagaggatgagtagggagatgcagaggcagagaggcctgtgttcaccatgggatgacacaggagaaaaggctggccagctctccctgtcttcccaactccctctaaagttggcgagaaaaagcccttaattgtattgcaatggttatggattcggaaatggtttttcccttgctgtgtgttctttttcctcagattggaaaggatcgggcactgaactttgacccctgctgcatcagctactttactaaaggcgagtacattttgctggggggttcagacaagcaagtatctcttttcaccaaggatggagtgcggcttgggactgttggggagcagaactcctgggtgtggacgtgtcaagcgaaaccggattccaactatgtggtaagaagagaaagtttgttctgtggggccatggcttgaagaggcactgagcagccgccgtgtctcgagtcacatcactggggtttgtgtctgacaaatgggggaatgcagactttctccagagagctgggaattgacagttctctcaccccgcaggtggtcggctgccaggacggcaccatttccttctaccagcttattttcagcacagtccatgggctttacaaggaccgctatgcctacagggatagcatgactgacgtcattgtgcagcacctgatcactgagcagaaaggtaagaggcaggtccagaccttgggaagagggacaggtggaagcaggtggaaagggctggtgacagggcacttgaaatgacaggaaaaggtttctctttggcgttttgcaaacctgttagccactgggtctgtgtcttgttttcttttttttttttttttggtgggggaagtagggatgccagtctccttgaggatctcatgaaagcaataaatcctctctgaaaaatgtaccaactcagaattttgcacataatttcaaggagtacatgaatttccttagtgagggaggatgatttatgacaggttggagccaggtggttgacctgcatgggtcttcgtggacctttatcctttctggtcagagtcactctggggtgcttctccctcagccctgtctccacttgcctcctggtgggtccttctgccagagatgagcagtggaattggattggcacaggctaggtcagaagatcagagttcccggcctcgcatagtcattctaagccctaagactgcagtctctccctctgtccacttaagttgctgtgctggttaaatagactcaatccacttacttcaggtgtattcatatctggatgtgctggccttagtgcactgctaggtgcctttgcaagggatccaggttgggggttgtcttgtagattcagatgagtgtcctttggtccccctgggggaccctatctttttgaagattctggctgtggtggttggggcaaagccccttgggcagcttcacagtgtcccccttagggacattttctccacctggtctgtagtgggagtgtagagcctggtgtgtaccagaaattacatgtcttccccgtttgtcaaggaggtgggcagggagcggccagaggtgaggtcagttacttaggcaggcttctgatcaccgggggccactagtgctgtgcagaggagtttatatttgtatccagcaagtgatggtaacagtgagtagtttatttccatactcagttgtcagccttggaccatgaagattgtgtcctataggactttggatcccagggttcagcagagttgattgtatgtattagatactctaaagatttttcaatgagagtatctcactttaattgccagtagcgctaagtaaatgatggcttttaatttctctgccttgcaccttacataacaacctcttgctagaactagatatttttttctttgacagttcggattaaatgcaaagagcttgtcaagaagattgccatctacagaaatcgattggctatccaactgccagagaaaatcctcatctatgagttgtattcagaggacttatcagacatgcattaccgggtaaaggagaagattatcaagaagtttgagtgcaacctcctggtggtgtgtgccaatcacatcatcctgtgccaggtgggcagcagcatgttgaaggagttgggctgaattccatttgtgctccccccccagtgatagggtgcccacctcatggttttaaaactggtcactagaaaacaagtctg

SEQ ID NO: 30528 - DNA, 2300 bp, Homo sapien
tagctcagagagtatttgttcagtggggtctatttttaaaactccactcaaattgtgcctcccaagtaagtccaagtgttagccatccatcatatgctcagctgtgatatgcctgcctgagtgcctgtcccactcacggggcagtcagcatggcaagcagttggtgtggttcggggaaggagcaccagctttcagtcctgactctgccatctcaagcagctgtaactagagcaactcatttcactctttggggcctcatttcttttctgtgaaatggggttaattatacccatctttcaggtttcgtcaagccaaatttctattattatttctccttattactgactcataaaatagcaaaaaccacaaaacacaactaaattgcaacaggctgtacttactgacggactttagaaaggaaagctcattgtgtgctttaagaaaagctttcaggagtttgagaaagcttccaggagatggtgaaacttgatctgagccctgagaggtctggaaaggaagagtggagcagggaagcttttcaaacaaagggaaaggtgggggtaggaacaagactggagagcctgggagatggtgaggagctggtgctgagaaaatacagtgaaggtaatgatcatgcctgcattttgcccagtgcttcattatttttggagcacatctctcctttgcccatggtagcctgagctgggcaggacatctaaacagaagttaatggatttacccaaaaagtcaccagcctaggatgtggctgagcctggcctgggttctaggtcacctgctccgtagcctatgcctgctgccccgctaaagggagcatttaatgtgccaatgaggagagatggcatggtggaaaagataagcacttggaagcagccatgttttgctctgagagtagacagactcaaaataaaaaaaattccttcaattctaaagctaaaaaatgggactggaaatttcaaagacagacaaaagccccaaatggagaaaacaatacttcaagctccacatttgggaaccattagcacagaggtcctggctgatttctcttccctgcccaggaagccaggagagatgcaggccactgaagcacactggctggcctaaaacaagggcaaggcctttccttgttaaagatgtcatggcccaactcaagactcattctcaggcctgcacgcacatatgcacatatacacgcgtgcatacatgtggcaggaaggggcacagaacctggagtccagtcacctctggctattgccagctatttgctgggacaggtcatttgtcctctctgagtctcggtctcctgggctgtagccagggagaaataatacctactgcacaggactgtggggacagccaaaagccttttataaacctaagaaagagaagtcgttaggaactattcatgggcactcacagcaaggcaaccccatcttgtaggagggcatctgtccccagggcagggatcaggagagctgtttccagaggcttccagggtaacttggagcaaatcacttacctttcttggactcagtccctggaagaagaggccattccagaccgcttcctcccacgaactcattcattgtgtcagcaaacgtagactggggttctgctgagggaggccgatacaacccaccactgcccacggctgtgcacggctttgctgtgggaacaggcctgtaactgcggcacaacctgcgatctggacaaagggcagaggaagctgagactctttcccctggggtgggggcttgaggggcttgggaggactctgcagaagaggtgacatttcaacagggccttgaaagccaaataggtattttccagaggcagagtggggaggggcaaaggcattccaggtgagggtgacatcctatggcgaggcaggcctgtaggtgggaaggaggggaggatgggcagagagtttgtgctgtggagcacagtagcccagtcatgagagaggtgcaggatggagcacacagggtgggctgggcaggctgggcagggtgctgattggcggctgcagggctgctccccaggcatgggtaatcatcccacgcatctggaggcaggctctgtatgcatctggttctttccatggctctgaaaacagtcttctttttttcccttgatgaaatcctgcagtccgctcccatgtaccagtacctggataggaaactgttcaaggaagcctaccagattgcttgcttgggtgtcacagacactgattggcgtgaactggccatggaagcgctagaaggtttagattttgaaacagc

SEQ ID NO: 30529 - DNA, 2300 bp, Homo sapien
gccttccaccttgggcatttctttccctctaatctgtgctgacttctcagcacattttttgcctcttgggaaagtctggcaagaaggactcctgacaggctctgtgcatgccgtcagtctagtgttacatctcttcccacagcagggtcagtggtctcaagggacctcatcttcccttacagtctttggctttcctgaaacgagaccccctcagggtccctcatctttatcaggtgctcacctggagagaaaccaccacaaaaggagcccagactcaacttaggctggaagtcagggcccagctcagcctcactttgcccaagccactccagagcctggctctcagctccttccctcagacttttctctcgctgctccctgtcctcttcctcacctggggcatggggctgagggctcctgtctctaacagctgagctctgctccaggacctacatgggactaggagctaaggggcctcagaccagctggggccctggctcttatcccagctgaatcttattaattgggccattccttcattcaataaatgcctactacgtgacagaccctgtgatgagacctggtgacacggtggtgaacaaaacgttgtccctgcagtcagtcccagtctagcaaacaggacaatccctcaggggaaacgtttagaggcctgtgaagagacttcctggaggaggtgtcctctcagccagaaggagggagagaataaaaatggggcaagtgaagtggaggaggattaggaagggtgtttgtggcaaaggtcacagcctgtgcaaaggcctggaggtgagtggtagtttgtggttcagcatccagggcccagcagagcagcactgattcagggcaagactggaaagggaagttcaggtccttcctggatacatggcatctttcccagaggaaaggactcccctgctacctattctctctgggacgttacttagcttccctacctagtgcagtagaaccacaggcagagttcatcttgttcttaccctggaaaggatgtggtctcaggttttcttgggttcttggagctaacaaaaggtatagaaatttacgtgtgaactaaatagaaaatgctaagctctgaactgaagaagtgtagagcaaagtgagtcctcaggagttcagaccaattaggggttaagctttggtggctcagtgatgagtagggcctcacaagacccttcttaagtgctcacaagaaagaggagttactggcctgctgtaatcctcaccatctaaagctttattagaaatgggcaatctcagtttatatacagtgtgccagatgccttcaaaataaggtattcttaaccttttgtagaccctcacacagaaaattccttatttgtctgctgagcttctggcagcctctaggtacgaagaccaatcactaatctgtgctaactgcctcctgttagtgcctatgccaggagccagggaaatgggtcagcagttgaggaactccgcatgtgtgctcgtttggtggcacatcagtcaagctgctgttggaaagcacagaagaggcatgtgggttcatgctggagagggctaaatgcctctgttgaaagacaggcttatatgaatcagtggttatgtcctaagctgcatagaaggtcttctcttttagagctaattggagacaacttgagtagttcagagaaatggaataattaccaactccagaggcagtacagcttggaagaaagacattcttgggctttggaatcagacctgggtttgaacagcagctcagctctgttctagttggtgacttgggcaaatcatctatctaggtgtcggtttcctcatcagtactgtgaggataaaaatgcataccacaaggttattatgttaaagaccagatgagacagtggctatatggcgctcagcacacagtaggagtaggtgctcaataatcagagccgctcttgttgatgtcactcagaattattggtgtctgccttttggcctggcccagcagcagctcttgaagaactcaatccctgtttgcttttctctcactgcaggaagatccgttcagtgtccatcgtcctgaaactcttttcaacatctccaggttcctgctgcacagcctgcccaaggacaccccctcgggcatctctaaagtgtatcctttctcttatccctcctccgtcccaccaccgttcttgtctaatggccccaagaaattccttccagagcactttcctggcagaaccttcctctctcagcaaccctcagggaagacagagaactcaccctcccgctgctgt

SEQ ID NO: 30530 - DNA, 2300 bp, Homo sapien
acaatccctcaggggaaacgtttagaggcctgtgaagagacttcctggaggaggtgtcctctcagccagaaggagggagagaataaaaatggggcaagtgaagtggaggaggattaggaagggtgtttgtggcaaaggtcacagcctgtgcaaaggcctggaggtgagtggtagtttgtggttcagcatccagggcccagcagagcagcactgattcagggcaagactggaaagggaagttcaggtccttcctggatacatggcatctttcccagaggaaaggactcccctgctacctattctctctgggacgttacttagcttccctacctagtgcagtagaaccacaggcagagttcatcttgttcttaccctggaaaggatgtggtctcaggttttcttgggttcttggagctaacaaaaggtatagaaatttacgtgtgaactaaatagaaaatgctaagctctgaactgaagaagtgtagagcaaagtgagtcctcaggagttcagaccaattaggggttaagctttggtggctcagtgatgagtagggcctcacaagacccttcttaagtgctcacaagaaagaggagttactggcctgctgtaatcctcaccatctaaagctttattagaaatgggcaatctcagtttatatacagtgtgccagatgccttcaaaataaggtattcttaaccttttgtagaccctcacacagaaaattccttatttgtctgctgagcttctggcagcctctaggtacgaagaccaatcactaatctgtgctaactgcctcctgttagtgcctatgccaggagccagggaaatgggtcagcagttgaggaactccgcatgtgtgctcgtttggtggcacatcagtcaagctgctgttggaaagcacagaagaggcatgtgggttcatgctggagagggctaaatgcctctgttgaaagacaggcttatatgaatcagtggttatgtcctaagctgcatagaaggtcttctcttttagagctaattggagacaacttgagtagttcagagaaatggaataattaccaactccagaggcagtacagcttggaagaaagacattcttgggctttggaatcagacctgggtttgaacagcagctcagctctgttctagttggtgacttgggcaaatcatctatctaggtgtcggtttcctcatcagtactgtgaggataaaaatgcataccacaaggttattatgttaaagaccagatgagacagtggctatatggcgctcagcacacagtaggagtaggtgctcaataatcagagccgctcttgttgatgtcactcagaattattggtgtctgccttttggcctggcccagcagcagctcttgaagaactcaatccctgtttgcttttctctcactgcaggaagatccgttcagtgtccatcgtcctgaaactcttttcaacatctccaggttcctgctgcacagcctgcccaaggacaccccctcgggcatctctaaagtgtatcctttctcttatccctcctccgtcccaccaccgttcttgtctaatggccccaagaaattccttccagagcactttcctggcagaaccttcctctctcagcaaccctcagggaagacagagaactcaccctcccgctgctgtttggctatagaggctcagcagggaggcccaggggcccaggccaagagaagatgagttttcagggctctctgagctgaacccagcagtgggtctctggccaacacactgtcccaatccctcctagaacccacagatgagggtgtgactgaaatggaagaagcaccaggccttcaggcttggaaccttgggcacttctccagactggggaggagggagtgtttgttcagcccaggtatacatagcaccttctgtgccccaagccctgggccaggcaccaggtggcaaagctgccatcaaagagggaggtcacaagttagggtctggtttggtggatgtgtgctgtgtctgagggtggaatgaagctgaggtcagggccatggtcagggaagtttacctggaggaggagatgtccatcatgcaagctgaggcagccagggaagatggccaagtggatgttccaggggaggacccagcatatggagaggcaagcaaggcatgtgggagagggtgaggggaccctgggtgggaggggccggagaggcagcaggacccaaggcctgagagcctacctttgggttttcctctcttctgtagccatcgagggccacagtggtaccataagcagagcaggtgcctgaagg

SEQ ID NO: 30531 - DNA, 2300 bp, Homo sapien
tgtggactcatgttacaggcagggagacgggcacaaaacacaaataaaaagcttccatgctgtcagaagcactatgcaaaaagcaagatgctgaggtactgctaagctgtgtgggatgggggctcagcccggccagggaggggccagttgtgggtcagtcttgacccaaggcatccaggacaccctccttctggccatgagggtccacgtcagaatcaaaccctcaccttaacctcattagcgttgggcataatcaccaggccaagcgccttaaactacgagaggccccatcccacccgccctgccttagccctgccacgtgtgccaaacgctgttagacccaacaccacccaggccaggtagggggctggagcccaggtgggctgcagggaagggggcactcttctgagcagacagatctgggaatcctgggtgggaagagagacagtgagagagagattaagggatatttcccaggcatcagggctttgcactctcaggggtccttccgcctggatgtccttcccctgaagcttcctcctgttgttccgttctcagctcaagctccagcttctcagagaagcctcctgtgttgggagtggctgcgactgaactgtccctactgttattcgctcttctatttgtttgtggtccctgtgccccctcaccccacaaaaacactggcttcttgtgagcaggagcttgctctttcgtgtaccctgtgtgtccccaaggaccaagcaccttgtctgggccacagtaggtgctcaatacacatgttggctggacagtggtcactgagcggccgcacgtcgggcactctcagcacttgcacaggccgccccagacaccccacttcattcctgggaggtgtcatcatgttgcttggacgacggggagagggggacctgccagtgttggcctccattttcccccagtcatctgcccccaaggctctgactactttctttctcacggtacatcctgctattctggaatcggccctcgtggggccacctggtacatggcatttgaggccctcgtggctgattaggcctcccccaacagtgccctgtctgctgcctccagggccagcctccccttcagactggagtcccctgaagggttctgcccctcccctgctctggtagccccctccatcctccctccctccactccatctttgggggcatttgagtcacctttctacaccagtgatctgcccaagccactgctcactttcctctggataaagccaggttccccggcctagcgttcaagacccattacaactgcccccagcccagatcttccccacctagccacctggcaaactgctccttctctcaaaggcccaaacatggcctcccagactgcaacccccaggcagtcaggccctgtctccacaacctcacagccaccctggacggaatctgcttcttcccacatttgagtcctcctcagcccctgagctcctctgggcagggctgtttctttccatctttgtattcccaggggcctgcaaataaatgtttaatgaacgaacaagagagtgaattccaattccatgcaacaaggattgggctcctgggccctaggctatgtgtctggcaccagaaacggaagctgcaggttgcagcccctgccctcatggagctcctcctgtcagaggagtgtggggactggatgactccagaggtaacttgtgggggaacgaacaggtaaggggctgtgtgacgagatgagagactgggagaataaaccagaaagtctctagctgtccagaggacatagcacagaggcccatggtccctatttcaaacccaggccaccagactgagctgggaccttgggacagacaagtcatgcagaagttaggggaccttctcctcccttttcctggatcctgagtacctctcctccctgacctcaggcttcctcctagtgtcaccttggcccctcttagaagccaattaggccctcagtttctgcagcggggattaatatgattatgaacacccccaatctcccagatgctgattcagccaggagcttaggagggggaggtcactttataagggtctgggggggtcagaacccagagtcatccagctggagccctgagtggctgagctcaggccttcgcagcattcttgggtgggagcagccacgggtcagccacaagggccacagccatgaatggcacagaaggccctaacttctacgtgcccttctccaatgcgacgggtgtggtacgcagccccttcgagtacccacagtactacctggctgagccatgg

SEQ ID NO: 30532 - DNA, 2300 bp, Homo sapien
tctactattaccttggtatgaatccattcagaacttttttctactgcttgtgactggtaagataaaaaaacaaaaaaattttttaaaaattaaaaagaactattgtgccttcacacacacacacacacacacacacacacacgcaagttttgtcttctcagtagttggggtgtactctccgatacattctggttcactccttttcactactgcatactactccactgtgcgaataggccacagtttacttgttcactctccacctgatgggcatttatgttgttttgaatttctgctaagattgaaataaacatctttgcacgtaagtgtatatgtttgtctcagatctacgcctagagtggaataggtgggttgtggagtgagtccctccttagttgtatgaaacatcgctgaattgctttctaaggcggctaccagctcactccccaccccccagcagctatactttccttgaatcctagtcactcactattgatagacacttacatctttgtcattttgctgagtgtgaaatacagcctcattcttgtttgttttcttttctttccctcccccttttttttggggggggcagggtcttactctgtagcccaggctggagtgcaggggtgtgatcacagctccctgcagccttgacctcccaggctcaagcaatcctcctgcctcggcctcccaggtagctgggactacaggtgcacaccaccatgcccagctaatttttgtattttttggtagagacaggatttcacttttttgcctaggctggtcttgaactcctgggctcaagcgatcctcctgcctcagcctcccgaagttctgggattacaggtatgagccaccatgcctggcctctcatccttgttttaatccatcttgtcattttatattatattatattattttattttatttttatttacttatttttgagacacagtttcgctcttgttgcccaggctggagtgcaatggctcgatcctggttcactgcagtctccagctcccaggttcaagtgattctcctgcctcagcctcccaagtagctgggactacaggtgcacaccaccacgcccagctaattttgtatttttagtagagatgaagttttaccatgttggccaggctggtctcaaactcctgacctcaggtgatccgcccacctcagcctcccaaagtgctaggattacaggcctgagccaccgcaccagcccaccttgtcattttagatggctgcagaatattctgcagaaagggtgtgatttagccaggccttgggtgtttgcttggaaagttttttttttttgtctgtcaatttgatgggaaaaagtagtatttcaccattgtttcaatttgaattttctcaaatgccaaggaagttgagtgtccattttcctgtttctgttcctcaccctttaggctggtgaattgcctgtttatattctttgtccattgtcccagtggatgttgtccttatctatgaagacttttgtgaagcatcctccgttattgatttatttctttaaaaacaaaaccaaaggagggcataggcccagagagcctggctggcctcagaaggggctactctgattgaggggcatgtgctctgggcaaaagtagcagttgggctgcctccaactgctactttttgagaaattgaggccagcagtggcgtggggcagcccattgcccacctggtaggattagagggccgcctcagcggcctccctgacaacacaggtgaccccaattcctcatcagcatctccagcccctggtgggcagagggcacaggcgagatcaagcatctcagctcccaacattgcaccatggggactgagacccagagaagtcaagcgacacccccaagcttacacaggagtgggtagtccagctggggctccctacagaaggcaggatgctgtgccccattccacacctccagccccagtcagcagcttggagcactcccagcccaatcagggctgattggagtggtgggggtgggctgctggtatataagcctagtgggcaggcccagcagcctcacacccgggtgaggggtctgctggctgcacctgtcggtctcatggctcctgggagcgtcaccagcgacatctcaccctcctcgacttccacagcaggatcatccaggtctcctgaatctgaaaagccaggtgagcaagaggaggcagctcctccctcatccctgcgagcccactccctgggttgcctttgatgctccacccctgcttctcgttctttcccagcctggccccagcac

SEQ ID NO: 30533 - DNA, 2300 bp, Homo sapien
tgcactccagcttgggtgacagattgagaccctgtctccataaaacaaaacaaaaaactttcaaatggatacaaaagtagactaccaaatggtctgtaactcccttccactgtacccgtcacccagctccaacagtcaccatcttgtggacactcttgtttcatctgctgggttatttcaaagcaaatgctggatttatgtatcatttcatctgtaaatatcttttataatatttacctttaacagataagagccttttaaaaagcaattgtaataccattagcacacttgaaacaatattatccctaatatccgatatttccttccagtgctcacatttatctgttgcctttctttttccagttggattgttcaaatcctgctctgggaatgagcatttggttgagaggtttcctaaggacctttagtccatagggtgcccctcccactttttctttccccccttatttgtggaagaaacccggctgtgtgccctggagagtctctcagtctgggtgcctctgagaatgtgcacatagcccccggaggtcctgtaaacccacagttacgaaattcacccaatttagattgtttttctaaaggaatactccattctttaaaaagagagatttggctgggcacggtggctcaagcctgtaatcccagcactttgggaggccgaggcgggtgggtcatgaggtcaggagttcaagaccagcctggccaacatggtgaaaccttgtctctactaaaaatacaaaaatcagccaggtatggtggcagcgcctgtaatcccagctacttgggaggctgaggcaggagaactgcttgaacccaggaggtggaggttgcagtgagctgagatcacgccattgcactccagcctggggacatagagagacagtgtctcaaagaaaaaaagagagagagactcagtgagccttgaggggagaccatccgggagctcccatgccagcggtcagtgtcttggggagaggggggcatctgatccttgctggaccctcacccaccccccacgggccagctgatgcctgccactgagttgtgactgggccccgggtgatggcctgccatctctcctcaggcccgagccacggcggtgtcccaccaggaggcccgagccacagcagcctcccggtgggacgccgccaccccccggtgctacgcatggtgctggaggcgctgcaggctggggagcagcgccggggcacgtcggtggcagctatcaagctctacatcctgcacaagtacccaacagtggacgtcctccgcttcaagtacctgctgaagcaggcgctggccactggcatgcgccgtggcctcctcgccaggcccctcaactccaaagccaggggggccactggcagcttcaaagtaagcgcccctgagggaggacatagcccagggttggagcaatggtcctggcctctgtgagtgctgcggcctctactggaaggcctttcccctccggtcccctgtccttgttcctcctgtggtctcagccgagatgccctctcctctaggaaggcaggtagtgtgccctctctgagctcccactgcaagagtcaccctgttggtgtccaggacaggtgaactgttgcatgtttgggatcccagggcctgtgtcagctgtgctaacttctgggtcctgggcacgtagccccttcctggaattcctcaccacagcaaagggttttccctctgctggcacctccctgagcagccatgtcctccgtttcaaaggggagagtttcatctttataaggaggctccaaaaggggacccatgccaggtcactcagagctgaggcaggtctgggacaaaactgcaccccaacatcaggactgtcatcagccaccaggaatacctcagggaccagacccacggcctgacttgtcattgctgggtcccctgcatcttgcctaacttcctgcatgtagcagctgccatgacagttgccatggaatgctggggaacattctcagcctaccccaagccggtccctgtggttacctggtgacagatcacagaaagtcccaccctggtagaactcctgggcgtgggtcagagcctggacttgcgtcacagcaggaccaggcggctaagcagggagaagagccagaggggcgtcaggtgtctgatgcggtgtgctggcagttgaggggtgaaggtagtttctagtcttggtgatggggagccctgagggttgggggacaggaaagaaacagcttgccaggagccctcccttccctgccgctcacagccttggtgattgtcct

SEQ ID NO: 30534 - DNA, 2300 bp, Homo sapien
tgaccctcaggaagaataccaccagcccaggcgcctctgtgcagggcagcagcttcctagagctctgggggtacacatgcccaggctgctgagtcactgggtggcctgaggtgggggtgggggtgttgctcaccctctctggcctcttgaggacaaggccagagctccaggccctgccccccacagccctgccacagctgctctgctaatgtcggacttcctgctgcctgcaagggttcagggaggagccaggggtgcccgggggccggcacctggttctaatgagaaccaggacctgactggaggctcaggagggggttggggggtacagctaagccctgtagctcctgccttgctccagcaggaaaccgggctctcagccccactgcaccccagctggccagggataggcaaactaaggttcccaaaggtcacatcttgtgacaaggctccaacctcaggcccttgagggacaaagccagctctctcctccacaactgtccctcgactgcttcctaccccaccctaccctcactgtctttgtcaccctaccccacagccttcctctccggttctgggtgaacatcctgaagaacccccagtttgtctttgacatcgacaagacagaccacatcgacgcctgcctttcagtcatcgcgcaggccttcatcgacgcctgctccatctctgacctgcagctgggcaaggtcagctgttcccaggaccaggccaggcccatgcacagggccagagtggggtgccgaccatgggtagcctcctcgactctctgaggctgagctcagagatcttcctgggaggggaaccaaaagatctcaggtctaggggatgtgggatgagtgactcattcagacagggagacacctagaagccagtaccttccatcagaaactctgtatcgctgcagaccaactgcacatgctgcagctgtgcctggcactggctttgaacacaggcctgagaacccggtgtgggaaagccagtatgagcttggacaacctgcttggtcaggcacaacatcatctgaaaaccgggccaggctctgggcagtagcccctgaaagtcaaaagccattcaagcgagcattcagtgaaggggtgggcagaggggtgatgggtggctaggagctctgagattcatgcggtgtgttgggggcacacaaggctgtgtctggctttagaggttgaagatgaaagaggatggccttccaggcagagagaacggcgcaggcaaagacagggaggcaggaaagcagccggttgctgtgagcagggatgagattgtatcattaaagctggcactgcaggattggtccaggtcgtgtgtgaccctgcatttagcccacgcatttcagagacggaccacgggaaggagaaaatgccatcgctccactactactcacgtactgcctccgaaggcagggtgcccgtgactgacaaagaactgggagtgttcttggcacttctttcaggcgttaggagcatgtggtgggaaatattccactgagccagcactcaggcttccaggaatcctagccaccaagacctatcaccctgagaaggacacatccttgttacgtggaatgggctgcgtgcagtgaagagctggcatgcccgtgcacttttcccctgaaagaagtagggcccctccccacccacatcattgtcctaacagtcctggggaaagtaggcggggcagacagagcacagtgaggagcccctggtctggggccggctgagtgcggggacgttcagtgaccgggtgagactctttgggcctcgggggcctgctaaggtcacttatgtggcaggagggatgagggctcatccagaaaacgaccagatccgtcctttctccagcagccatctaacaccctcgctcttctctgcccaggattcgccaaccaacaagctcctctacgccaaggagattcctgagtaccggaagatcgtgcagcgctactacaagcagatccaggacatgacgccgctcagcgagcaagagatgaatgcccatctggccgaggagtcgagggtgcggtggctcggcggcgggggatgggggcctgaagagctgagggatcgggggtcgggggctgggcctcaatgcctccactggagtaagggcagggagcgcagagggcatttcagaagtggctgtggcctcttgctggcctgcaaattcgtcatgcattttcccagagtttgaggagcgggggcaggagagcaccctctggatggagaggagattggacttcagggtccgggaagccgtcttcgtcc

SEQ ID NO: 30535 - DNA, 2300 bp, Homo sapien
ccatctttctgtcttcatttctgtttctctcctctcctctcccgtgtttatttattgtgtttttcctctcacagtgaaagacttggacacagagaagtatttccatttggtgagtgcccaacctcggccccgggggatccagcccctcagtgggtgtggccttggctttctgtggccctgggcctcttgggaaaagtgctcccagccctgcgaaaggctggggggtgggggagtagggatggggcccagaatcaggagggaaccacagcccttgtgtgctaagaagcatggcagagccagacctcccacaggcggccgaggatggggcctggtgcggacactgaccactgcccggcctcccaggtgctgcctacggacgagctggcggagcccaagaagtctcaccggcagagccatcgcaagaaggtgctcccggaaatctacctgacccgcctgctctccaccaaggtgagtccggcctcagtctcccctctgtgcagtgggtacaaggctccagccccagctccagagggtcattgctcagggccagctgtgcacccgcggctgggagaggggtgtgagttcttcctgtttcccctgtggggctggaggggcaagaggctgaaggcttagggtcccacttgaggaggcatttctcacagccaggaaaaatgcctgacagagacttctatgttagcccacgtaacagggtacagcagaggcccagagggatcagtgatgtccccaaggccacgtggctcagtggcagcgccggcaccccacagcccatactctggcacttccagttctcgactccatgtgccagtgcctcgattagtcctttcaacgcctctgggaggcaagtgagccagagaggctcggtgaccagcctgatgccatgtggcttcctcattcagcagcctggcatttcaagctccgcagagccaccaagggtgcccactagccctctgcacgtggcccggggctgacggcggccaccccactcccccgcagggcacgttgcagaagtttctggatgacctgttcaaggccattctgagtatccgtgaagacaagcccccactggctgtcaagtactttttcgacttcctggaggagcaggctgagaagaggggaatctccgaccccgacaccctacacatctggaagaccaacaggtggcgggtgggggggccgtgtggacttcactgtgccactggggcccctgtggcagggggttcagagtctagtcttctggcctcgcctgcttggggtcaagccctcctctgccatttcccagctgtgtgttctcggatgagtgacttagcctctctgtgcttcagtttcccctccactgtaaaatgcgacccatgttaatggtgggaattaactagaagagtgcccagaagcatggtctaggtgttgcccttactatcattctcccgcacccctctcaggtgggcaccatcagctccacttcacagataagcacactgaggctcggagaagcagcacctgctcaagaccacacagcctgggacagtagagccaggctcggccctacattatctgaatctcttacccagttggtagccctcctttgaggcacctcttagcttgtcggggtcatgcacccccacaagaagttgctggaaacccagcctgaccctcaggaagaataccaccagcccaggcgcctctgtgcagggcagcagcttcctagagctctgggggtacacatgcccaggctgctgagtcactgggtggcctgaggtgggggtgggggtgttgctcaccctctctggcctcttgaggacaaggccagagctccaggccctgccccccacagccctgccacagctgctctgctaatgtcggacttcctgctgcctgcaagggttcagggaggagccaggggtgcccgggggccggcacctggttctaatgagaaccaggacctgactggaggctcaggagggggttggggggtacagctaagccctgtagctcctgccttgctccagcaggaaaccgggctctcagccccactgcaccccagctggccagggataggcaaactaaggttcccaaaggtcacatcttgtgacaaggctccaacctcaggcccttgagggacaaagccagctctctcctccacaactgtccctcgactgcttcctaccccaccctaccctcactgtctttgtcaccctaccccacagccttcctctccggttctgggtgaacatcctgaagaacccccagtttgtctttgacatcgacaagacagaccacatcga

SEQ ID NO: 30536 - DNA, 2300 bp, Homo sapien
aaccgcagccagggcatccccttcctggagtataagcacttcgtgacccgcaccttcttccccaaggtcagcccgagcctgagcctgccctgaacctgtgccagccacctcaaggcaactcgacctctctgagccctgccagcctatagggtcccttgagcagtgccaaacctgcacagctgtccgcagccgtcctggccacttgccctggcctgccacggggagaagggttggaggcagattctccactgtcattctctgctcacttgatgtttaacagtccatatggaagccagctgcagccccgctgtcctggccagctgggcctgcctctccccttttcaaggtggggcagaagcggccagggctgtcccaggccagcctctctccttcctgtgcctcttcccagccaggcttcccttggtctctacactccctcctcctgtccactggactcctgccccatcccttccatgcctctcatgcctccccttgcccttccagggtccactaccctcactctacctcctagtggtaccaccctctctcccctgtccacaccattccccacacagtggccaaagcaagcccatgtttgactacatcatttttcacgaaaccctccagtagcttttcccagcctcaggctaaagctcagactcccagcctttctgcctcagtttcccccattgcacatggagctgcttttgcttccccttaagtcttgtgctgtcttgtgtggccacacccctggaattccacagcccccaggcttggcccactgcctcttagtcctttatggggagctaattccgtgccagtttcccccagcagcccaagccagtgcccctttctgtgtgagtgacctttccatgccagcagggggtgtccagccccgctgagatgctgggggtctgcctctgcagtgttcctccctttatgaagagcgttacgtgctgccctcccagaccctcaactcccagggcagctcccaggcacaggaaacccacccactgctgggagagtggaaggtgagtaccccacgacccacacacagtgggctgcttcagggcaaccctgctcccccctgggtcccctttccagttcatctaatgcattgatccctgtcatgcggagttgggaggcatctgccattgtaaggtactgagccctccatcccaggaggcattcaggcagccattcagggtattataagtgctgcccccgcaggccaggtagagcagacagaggattgggcccccctgtacaccccactcaacctgcttagaaaatggaaggtgagagtcctccacactgggatgccaggttacctccaggcacccttacccttctctgagccccacttttcaattcaaccaagctattgttccctgtcacaaaggttaggaggcatccaccgtggaaggtaatgagctccccatcccaggaggcatacaagcagccgtcgtaagcactggctgttaggctaggcagggacactgggcccctctggacaccccatcaccagttgcttccacagattcctgagagctgccggcccaacatggaagagggaattagcttgttctcctcactactcaacaacaagcacttcctcatcgtctttgtccacgcgctggagcagcagaaggactttgcggtgcgcgacaggtcaggctgtgacagactggggtggggtagggaagaggagcctgtccaaggccacacagcatcaggtcctgggtcctggggctctggggctcttgacacccccatattccagcccttcctgggccgggatgcccaagaccttggctcacggggcacgatggttgctgtggacgtagaagaaggtggctgtttctccaggaggattctagccccactcacccctcgcaggacccacccacacaggcactcctgggatcgatgggcccggggatgaggcggcactgagaccctgggacccacagctcctagggcctcaaggtgcagttgacacctgcctcccgctcacaggtgcagcctggcctcgctgctgaccatcgcgctgcacggcaagctggagtactacaccagcatcatgaaggagctgctggtggacctcattgacgcctcggccgccaagaaccccaagctcatgctgcggcgcacagagtctgtggtggagaagatgctcaccaactggatgtccatctgcatgtacagctgtctgcgggtgaggctgcctggggacagacagagcccaggcgggggacgtggcagggactcagcggcagtgaccccacggcctcccaggc

SEQ ID NO: 30537 - DNA, 2300 bp, Homo sapien
aacggggctagacaaattctaacagagctgtaacactacacacttctttttctaaggacgggtcatcaggcattgctttgctggccattccccaagccctctgtccacgggagagctccccgcaactccccaccccccaccccaaccctgcccaggagggaggactgcagggcctcctcccacaccctgcccagaggagctggagcggaggccagaatacagcaggcgccaataaaggctttccaaagggcaccagaggcctgacctgcctctccactgcccgcagccctgttcgtcttctgtaccaagagccgacgtgctgagcgttactggcagaagacgctgctgcagatggaggagatggaatctcagatccgagaggaaatccgcaaaggtagtgggcggggaccctgcagggctgggcctcaactttccctcctaggggatgggttctcgggccgctcacggctgtccgtgtgtccgccaggcttcgctgagctgcagacagacatgacagatctcaccaaggagctgaaccgcagccagggcatccccttcctggagtataagcacttcgtgacccgcaccttcttccccaaggtcagcccgagcctgagcctgccctgaacctgtgccagccacctcaaggcaactcgacctctctgagccctgccagcctatagggtcccttgagcagtgccaaacctgcacagctgtccgcagccgtcctggccacttgccctggcctgccacggggagaagggttggaggcagattctccactgtcattctctgctcacttgatgtttaacagtccatatggaagccagctgcagccccgctgtcctggccagctgggcctgcctctccccttttcaaggtggggcagaagcggccagggctgtcccaggccagcctctctccttcctgtgcctcttcccagccaggcttcccttggtctctacactccctcctcctgtccactggactcctgccccatcccttccatgcctctcatgcctccccttgcccttccagggtccactaccctcactctacctcctagtggtaccaccctctctcccctgtccacaccattccccacacagtggccaaagcaagcccatgtttgactacatcatttttcacgaaaccctccagtagcttttcccagcctcaggctaaagctcagactcccagcctttctgcctcagtttcccccattgcacatggagctgcttttgcttccccttaagtcttgtgctgtcttgtgtggccacacccctggaattccacagcccccaggcttggcccactgcctcttagtcctttatggggagctaattccgtgccagtttcccccagcagcccaagccagtgcccctttctgtgtgagtgacctttccatgccagcagggggtgtccagccccgctgagatgctgggggtctgcctctgcagtgttcctccctttatgaagagcgttacgtgctgccctcccagaccctcaactcccagggcagctcccaggcacaggaaacccacccactgctgggagagtggaaggtgagtaccccacgacccacacacagtgggctgcttcagggcaaccctgctcccccctgggtcccctttccagttcatctaatgcattgatccctgtcatgcggagttgggaggcatctgccattgtaaggtactgagccctccatcccaggaggcattcaggcagccattcagggtattataagtgctgcccccgcaggccaggtagagcagacagaggattgggcccccctgtacaccccactcaacctgcttagaaaatggaaggtgagagtcctccacactgggatgccaggttacctccaggcacccttacccttctctgagccccacttttcaattcaaccaagctattgttccctgtcacaaaggttaggaggcatccaccgtggaaggtaatgagctccccatcccaggaggcatacaagcagccgtcgtaagcactggctgttaggctaggcagggacactgggcccctctggacaccccatcaccagttgcttccacagattcctgagagctgccggcccaacatggaagagggaattagcttgttctcctcactactcaacaacaagcacttcctcatcgtctttgtccacgcgctggagcagcagaaggactttgcggtgcgcgacaggtcaggctgtgacagactggggtggggtagggaagaggagcctgtccaaggccacacagcatcaggtcctgggtcctggggctctggggctcttg

SEQ ID NO: 30538 - DNA, 2300 bp, Homo sapien
aggtgggaggatcacctgagcctgggaggtggaggctgcagtgagatgtgatcgcgccactgtacttcagcctgggtgccagagtaagactgtctcaaaagaaaaaaagaaagaaaagaaaccattgaagtatacactttaaatcactggattatatggtatgtacgttatttcacaataaagctgttttatttttaaagtgagtatattcaatgcagaaaatttttggaaaaactgaaagatgataaaaggaaaaaatacccatcattaataccctgtgtatttttgtatcttccctcccagtctcttttctgaaaatactatatattaatagatattttaatacattatgtatatattcctccccaccccaggaaaggttataatgtaatattgctttgtaatctgcttttaaaagtttcttaatttacaagtaacacctggtcattgtagaaggaatagaaaatgctcaaaagcagaaagtaaaccgaagtcacccagaatcctcccacccaggaaagccactgttaaccactatttcacacacacgtattcctgtttctttttttttttaacggggctagacaaattctaacagagctgtaacactacacacttctttttctaaggacgggtcatcaggcattgctttgctggccattccccaagccctctgtccacgggagagctccccgcaactccccaccccccaccccaaccctgcccaggagggaggactgcagggcctcctcccacaccctgcccagaggagctggagcggaggccagaatacagcaggcgccaataaaggctttccaaagggcaccagaggcctgacctgcctctccactgcccgcagccctgttcgtcttctgtaccaagagccgacgtgctgagcgttactggcagaagacgctgctgcagatggaggagatggaatctcagatccgagaggaaatccgcaaaggtagtgggcggggaccctgcagggctgggcctcaactttccctcctaggggatgggttctcgggccgctcacggctgtccgtgtgtccgccaggcttcgctgagctgcagacagacatgacagatctcaccaaggagctgaaccgcagccagggcatccccttcctggagtataagcacttcgtgacccgcaccttcttccccaaggtcagcccgagcctgagcctgccctgaacctgtgccagccacctcaaggcaactcgacctctctgagccctgccagcctatagggtcccttgagcagtgccaaacctgcacagctgtccgcagccgtcctggccacttgccctggcctgccacggggagaagggttggaggcagattctccactgtcattctctgctcacttgatgtttaacagtccatatggaagccagctgcagccccgctgtcctggccagctgggcctgcctctccccttttcaaggtggggcagaagcggccagggctgtcccaggccagcctctctccttcctgtgcctcttcccagccaggcttcccttggtctctacactccctcctcctgtccactggactcctgccccatcccttccatgcctctcatgcctccccttgcccttccagggtccactaccctcactctacctcctagtggtaccaccctctctcccctgtccacaccattccccacacagtggccaaagcaagcccatgtttgactacatcatttttcacgaaaccctccagtagcttttcccagcctcaggctaaagctcagactcccagcctttctgcctcagtttcccccattgcacatggagctgcttttgcttccccttaagtcttgtgctgtcttgtgtggccacacccctggaattccacagcccccaggcttggcccactgcctcttagtcctttatggggagctaattccgtgccagtttcccccagcagcccaagccagtgcccctttctgtgtgagtgacctttccatgccagcagggggtgtccagccccgctgagatgctgggggtctgcctctgcagtgttcctccctttatgaagagcgttacgtgctgccctcccagaccctcaactcccagggcagctcccaggcacaggaaacccacccactgctgggagagtggaaggtgagtaccccacgacccacacacagtgggctgcttcagggcaaccctgctcccccctgggtcccctttccagttcatctaatgcattgatccctgtcatgcggagttgggaggcatctgccattgtaaggtactgagccctccatcccaggaggcattcag

SEQ ID NO: 30539 - DNA, 2300 bp, Homo sapien
gctggtctaagacaacactgagcattatcctcacggctcagtggggggagctgcaggatgcagcaagatgaaccagatgagcgggagacaggaaggaagagaggaggggctggagagggagtgggggtgagggatagggagggagacagagagagagacagagatagagacacagagagacagatgaagagtggaaagggaagggggcaagacactgagagaaggagagacaaagagagtgaacgggaggagcaagacagataggaacagagatgggtgggggcaggagagagagagataagacagagagaccagcggatggactggggtgggggcactgaggatgtgagtgaggaggaggggcatggaggcaggccccatgcacccctgctgggctctgcagttggcccccacgggtggcacgatgtgcgccttctccatccagagaggaagacagggacacagtcccacgggcagtcccctgagtggctcttggtgggtggatgggcctgggagggggcctccaatttcctgcagctcaacactcccggccatcaaagcagtggccagaccagggctgaggggtctggaacaaggcgggcaggatggcaggaaggcgagggtgttgagggaagtggggggcggctgcaggcccagcctttcctgccggccccatggtgcacagacacccctgcccttccttcctggttgggtgggaaagaggaaaatgaggtcccgctactctcagagtgaggcccaccgggcaccctgtggaagctgggggtctgatgggaggccccgttctgagaggtcggagctgaagggcttttgctttcaaacactgtagctctgctcctcatgagctgtgcatcttgggccagtcccttcccctcagccttggtttccatatctggaagatgggttaccaatagcgctcgcctcgggggaatctgtgaggaaaaagagagcccgtacatggcaagtgcttggcacagtgtctggcacgggctagccctgtgtgagcacccccgcaaaacagccacggcgcatggtcctcacagggctgtgaccttggaaccaggctgcctgcccctaacgctgcttttgagatcaagaaccctgcccagtgccggcttttgtgggactaatcttccactaagcctgggaggatgtcagggaaagtgcctggcgggggtgccaggggtgggggtgcggctgggtctccacaggaggcaactgtgggctccaggaccaaggccttgctctggctatcggttgtgggccactggctggaactatttcctctctccatgttttcctcatttatatatctgaccctgagcactggtccctctggccctgccacttgtaaatcccttttatgggtctggggtttgggggacagattatggggtctggggggcccgactggccggcaccgggggagcgaaggcctggacagtgcctgagaaaggtggtggagggaggctgagtgtggaggggagacacagggttcgggaaggcagagggagaaggaaaggggagctcagagggaccgagagagggacggagggtccgagggggaggcagagggagccacggagagagggagcgagcgtcagggacggaaaaacggagcaggagagagaaggagactagaaagggccgggggcggggctgccagggactggagagcgaagcggagtcggagggagaaggagaagcagaggcagaacccggagaagcgccacacgcgcggagtttggggtggggacagagacggagagacgcagagaccgagagacgcagagagagggagagacggggtgggggagagggcggaaaagagaaaacaggcgcgagcgaggcaggccaagcggccaagtgggaggaaagagcgaggagagcgagcgacggcggcggcggctacggggagggaccctggggccgcgggcgggtcctggagggcgcgggcggcgggacccgcggacggcggggcgtggcccagggcggccaggggcaggcgggggtcccgggggcgggcggggccggggcggggagtgagggcgtgtccgcagcggagccgcccccgccccgcccccgggctgcgcggcgaggctgacccgggcccgggcgccggggtcgggggcggctggcgcgggcaggaagcgcatcgcggcccgggcccgccccccgcctcccgccgcctccgggctcccggctcccggccgcgcctcgccccatgcactcgccgcgccgcgcagcccgcgcacgcccggatggctcctcgcgccgcgggc

SEQ ID NO: 30540 - DNA, 2300 bp, Homo sapien
gggctcaagtgatcctcccacctcagcttccctactagctggaactatgggtgtgtgccaccataactgtgtaatttaaaaaaaaaatgtgtagagagggggtctcactatgttgcccagggtggtcttaaactcttggcctcaagtgatccttctcctttgacctcccaaagcactgggaatatagacgtgagccactgtgcctggccaagaacagtttctagagccttcttctttgggacctattcaaattcaccaccacaagccacacccagggatgacctactgaaggatttttttgtcctgaatttgggaaacttgacctccccaaatttagctaactatgttgaagagtgaacatttatgcttttaaatctgagtatcttgtctttttcttcaactcctttgaatggttctcacccacatgaaaggattaagtatacgtgctttggagtcccttgcctaacaaaaaccttttactggataaaggtcacaaaatatgggctccgaaagacctgatccttgtccctgacttgttaacttagctcttactgttcctgtccctgagttttcaagttttcttgctcaaggttatcacctttgatttggtaacattcatctttgccactttcagcagttactttcccatcttgcctccaaccatctccagctgccacttaaatatccttagaatatatagaatgatccatcacccttgacatgatttggataaaaatcattatgataaaaattgcatttttatatctagccagtaacatacctattcttgccgacacatttaggtgaccataatctataagtgtggatcagaattacagtgatgtctgaacaccaaaagggttttcatataattatattgaaatgcagatgcaacttgttttacatagatgttcttctgaataaaaattatgtgtaaagaaagtgaattaattcatactttaaacccactaagggagtgttattgtgtgaagaaacactgaaaaatcctctagcaaaggaagaatcccccagcttatatcttgtgcagatcttttttcatatatctgttttgcttaaagtatacttgtatgagggcagtatgtaagagggagacagggctggcataggacaagggggaattataggtcagttatctactgagatttgagagtagacacatttccaatacattttggcccattgattttgaagacgtagtcctcttgggcttctaacatgtacctcttgtttttacactagatcgaacggttggaagtaagcagccttgcccaaacatccagtgcagtggcctccagtaccgatggcagcatccacacagactctgtggatggaacaccagaccctcagcgcacaaaggctgccattgctcacctgcagcagaagatcctgaagctcacagaacaaatcaagattgcacaaacagcccgggacgacaacgttgctgaatacttgaagcttgccaacagtgcagacaaacagcaggctgcccgcatcaagcaagtctttgagaagaagaaccagaaatctgcccaaactatcctccagctgcaaaagaaacttgagcactaccacaggaagctcagagaggtagagcagaatgggatcccccggcagccaaaggatgtcttcagggacatgcaccagggtctgaaggatgtaggagcaaaggtgactggcttcagtgaaggtgtggtggatagtgtcaaaggtgggttttccagcttctcccaggccacccattcagcagcaggcgctgtagtctcaaagcccagagagattgcctcactcattcggaacaaatttggcagtgcagacaacatccccaacctgaaggactctttagaggaagggcaagtggatgatgcggggaaggctttgggagtgatttcaaactttcagtctagcccaaaatatggtagtgaagaagattgttctagtgccacttcaggctcagtgggagccaacagcaccacagggggcatcgctgtaggagcatccagctccaaaacaaacaccctggacatgcagagctcaggatttgatgcactactacatgagatccaggagatccgggaaacccaggccagactagaggaatcctttgagactctcaaggaacattatcagagggactattccttaataatgcagaccttacaggaggagcgatataggtaagtcacatggaattaatatctgaaattatttgtgtagggttcccctccctttagatatggggaaatggcttttaaaagtctttatctttctctagagtgtcc

SEQ ID NO: 30541 - DNA, 2300 bp, Homo sapien
aaagataaaatcattacttttatataatgatttaaaagcagacacaaagtctgctttaggcccagacaactctccagggcagctgtcctccatttagtggtttatccaatcaaagcagatttgatccatggcaccatgtctcaacatatgcttcagtgatctcagtggtagggtaagagaggataaaagagcttcacattagcaattaaatgctttgacttaggttacacactcacttcctttttttcacaacccattggtcagaactagtcacatggccttgcaaagggaactgggaaatgtagtcttccatgtgtgttcagaaagagaagcagcactggaaatatcagtgagtgccaacaattgtacttaaaattatacaattgtaacaaacattaatcttacaaaagattaaatactgtacctacccagggaagaatatgcagtccccaacattcagctgtataattgtgaagaaaataataacttactagattttattttagactgcacacaatctagtagctcggtatatttaaaagcccacatcagatatattactatgggaatacagttacaataagtgatttttgagagaaggaaggcaaaaaatatggattctcttatagagtccttcaaattgaaatcacaactgatttgaaataacaaaatacttgtacatatatttttttaaaactgaagggatggaaatcacagtggtaatagcggtttgtttggtcttctaagtggtgagattacagatagtttttgctttcttttctgctcatttgtggttttctacaataaggatgattgtcttagaagatactgaaaatgctagtaaacagaattaagcaaacagcagctagtgttgatgctagtggtacaggattagggtttttgttgtttttgtagaaacgtatttactcagttgaaaccttaccacctaatttttaagtgaaaacaaaacttctattaaatcaaattctttattaatttgttgtggaaagtcagggtcagagttctgtgtctctagagatggaaaaggaatttctggagccatggtttcaacccagcattttctttatattcattcaaggtgctttggattccgttcagagggctttgtatggtttaagtgaaagatgttaaacgcagctggtgaatactgatagaccttctttgacctgttagtactgtgctggcctgagcttccagacccatacttaactagaagtaaagaaattatcacacctccaggctcatagaaaggctcatatcacacccccaggctcataggctttactgtattaaattgtcttcatgtctgattcctttctgcatgttaacctcagagaaatattagtagatatactttatacatgccacactatattttgtaatcatttaaattcctcctatgtgtgttccccacaactgcttttacaaataaaggaataaggttcagatctgataacttgcctaaatcccaaagtgactttttcaagtcagaaacagtcttaataagatattcagttctgtcacgtagtgtcttgggtgttcagtaaatagtgtgtgtgatgatacaggggctgagcctgggcttatgattgtgatgttttaatctcttgcttagatttcagagtgtttttctctctgtccatagtgaatacgattttagagtgtcgtgctcagttttctttttctagttgttctctcactcatgttctattttcattttaaatgattttgccaacctaaaatgaaaaataagagaagaaacattacaaaagcatggaaatctgttctggcagtcttctgggcctttattgaaacataggtagattgctttttctttgtatttattgaaccaagctacctaaacagtgttattttatttagaatgtttttaatcttctttaagcgattctttcaaccttatctgatttaaatgagaagacaaatgtgaatgttgaattaataccctgtagctttaaatccaaccagtgtggtgcttttgtcttttataaaagatgctcacagctggagaagagaggcagatactgtctgtgatctccattctcagagtcaaactattcatttgcattagctgctctagcaaactgcgtgcgcgcgcacacacacggatgcttgtttggcagaagctttctgtttattcagcacagagttctcctaggctcccagatatagaaagctctaagagttgctacaggagatagaattgaaactatacataggctgaggtgggcactgcggaggattggctatgcgagggtatt

SEQ ID NO: 30542 - DNA, 2300 bp, Homo sapien
ggagtttgagaccagcctggccaacatggtgaaaccctgtgtctcctaaaaatacaaaaattagctgggcgtagtggcatgcacctgtaatcccagctactcaggaggctgaggcaggacaatcacttgaacacagggccggaggttgcaggagccaagattgcaccactgcactccagcctgggtgacagagcaagactctgtctcggaggggaaaaaaagatactattgtgtttagggttggttggttggtttgaagagacagggtcttgctctgtcagaaaggctggagtgcagtggtgcaatcatggctcactgcagcctcaaactcctgggctcaagggatcctcccatctcagcctcccaagtagctgggactagaggcacttgccaccatgcccagctaatttttaaattttttttagagatgaggtcttactatgttgcccaggcttgtcctgaattcctggcctcaggtggtcctcctgcctcagccactcaaagtgctgggattatagatgtgagtcactgtacccagcctggagttttgtcttttttttcccgaatttttgttttgttttgttttttgagacaggtctccctctgtcactcaggctggagtgcagtggcaggatctcagctcactgcaacctgcacctcctgggtccgagtgatcctctcacctcagcttcctgagtagctgagactacaggcgtgtgccaccacatctggctaatttttgtatttttttgtaaagatggagttttaccatgttgcccacactggtctcgaactcttgggctcaagcgatctgcctgcctcggcctcccaaagtgctgggattacaggtgtgagccactgtgccagaccttttttcttaattcttatgtaaaatttaaaaatatttagatctggctgggcgcagtggctcacacctgtaatcccagcactttgggaggctgtggcgggtggatcacaaggtcaggagatcgagaccagcctggctaacatagtgaaaccccatctctactaaaaatacaaaaaaattagccgggcatggtggcaggcccctgtagtcccagctactcgggaggctgaggcaggagaatggcgtgaacccgggaggtggagtttgcagtgagccgagattgcaccactgcactccaacctgggtgacagacaagactctgtctcaaaaaaaaaaaaaaaaaaaaaaatttagatctatttccgtaggatagcctctgaaaagtggactctgattcaaaggatatgaatatatttaaagattttgaaggctgagcacggtggctcatgcccgtaatcccagcactttgggagggtgaggcaggtggattgcctgaggtcaggagttcaagaccagcctggccaacatggtgaaaccccatctctactaaaaatagaaaaaattagccaggcgtggtggcagatgcctgtaatcccagctactcaggaggctgaggcaggagaattgcttgaacccaggaggcagaggttgcagtgaaccaagatcacgccactgcactccagcctgggcaacaagagcaaaactttgtctcaaaataagtaaataaataaataataataaaataaagattttgagacaagattttgaaacattcttttacctaagagaaacaactcctttatgttaatgatgacttatccaagaaacactattactgtgaatgaaactataatttggaacaaagtgtattttcttaaaaatgcataataatgcatcatatgcatataatttcattataatgcagtacatgtgttctgctgaaggtgtaaattgacagagaagaacttaaccatttagaggtctactgcaagattcaaaacaggagcccagtaggtactcaggatatttgagtcatagattcaatttgaatcatagattcaaatattggaaagctgagacaggtctcaacaggattcagtctgtccccatatttagatttctgtatttgtgtgtttctggaacattgatttgcctcacaataaagtattttatgtataaagagaaacatggttcatgctgcatattaaatattcccttttcctattatcctgttttatctagaatctagatatcaaacttttataatgatagttataacttagtcttggcaaatcaaattcagaattaaccaaaattcctttttgacctgaaatcaaaaacaaattagtttactaatttgtaaaaacatctttgtttttacttctctgaaacaaatgaagatagctggatttttttttcttttaagagatca

SEQ ID NO: 30543 - DNA, 2300 bp, Homo sapien
agaaagaaatgcagaatgttggtaaaatactaacagttttcaaatgatacctaatctaaatgttaattgaaatagaattcacaacaaatctgctcatgtaatcctgaatctaaaataaaagtttttaaaaaattatgcacaaaaagtaaaaaaaaaaagaaatataatttataatcttgaattaaatgtaatccccttcagtggatgcacacacatacatatatatacatgggtgtatatatgtatgtgtgtgtgtatgtagagatactttttttattttttatttttttttgagatggagtctcgctctgttgcccaagctgtagtgcggtggtgtgatcttggctcactgcaagctctgcctcccagcttcgtgccattctcctgcctcagcctcctgagtagctgggactacaggtgcccgccaccacccccggctaattttttgtatttttttagttgagagggggtttcactgtgttagccaggatggtctcgatctcctgacctcatgatcctccctcctcagcctcccgaagtgctggggttacaggcgtgagccaccgtgcctggccgagatacttttttttttttttgagatggagtctcgctctgttgcccaggttggagtgcagtggcatgcaatctcagctcactgcaacatccgcctcctgggttcaagcgattctcatgcctcagcctcccaagtagctgggattacaggcatgagtcaccaggcccagctttttgtatttttagtagaggtggagtttcaccatgttggccaggctggtctcgaactcctgacctcaggtgatctgcccaccttggcctcccaaagtgttgggattacaggtgtgagcctctgcacccagccgatatagagatacttacaaataaatgcactagtctaatccttattaaatcttgctctgttaaatttatgatcatgatgtggtacatgtttaatagtagtagtagcagtaagaaaaagttatagtagctcttagtattcttttgtgccaggctgtatattaagtgttttccatgtgcatattgtgtcatttattctttacaataagactgtagaatgggcaatatttttatctccattttggaaatcaagtaatttgctcaaggaccaacaattagtagaggagcgagccatagtagcagaatgtttcaatgatgtaggaagtcaggtcataagaggaatgaaggtgggggagggagtattagatttgaagagttaagtgtgaaatagtccttcatgagaatatgggagtgaatagactagagaaacatagtcagattacagaatagaatcaaatgctcatttgaggttagtggacatgaatttaaagtttcattggttggcacggatttgtgtattttcttgtactttcaactgcacagtgtactttcaactataagggttcaggtatggaatcagagttagattggcaggattggggttttgccagttgtttgaggaaaggaggccaaggaagctaagggtgtgcaagggaatgtttataatgatggctcatataatctaagctaggggacttattataggagaaggggttaaatagaatggaagtggagttatttttatcctgtgtatattcactcttttcaacagatggtcctagaacaattggagattcatacgcacacaaagaacctcaacccttacctcacaccagacacaaaagctaccttcaaataaatcataggcctaacttgaagagctaaaaccatgcaactccagaaagtttttgtcagaaagaaaatacaggagaaaatcttagtgaccttggggtaggcaaagatttcttaagacacaaaaagcatgaagtataaaggggaaaaaatcgctaaattggatttcatccaagttaaaaacttttaatctttgaaagatacctttaagaaaatgaaaaagtacgccttgggctgggagaaaatatttgcagaacgtgtgtctgacagaggatgtgtatctagaagatataaagaattgtaactcaagaattgaaagacaaccccataagaaaagggggaaacaatttgaataaagttcatcaaagaatataaatggcaaataagcacatgaaaagatgcccaaagtcgtaagtcattagggaaatataaatttaaaccataatgagataccactgcatactccctagaatggctgtaatgaataggattagtcacatggtgacaagaatggaggatcatctggaactctcatacactgacgataggaatgtgaaatggatcaactactttgg

SEQ ID NO: 30544 - DNA, 2300 bp, Homo sapien
atgactgtacagatatctcttacagaccacactttaaatcttttttgctataaacccagaagtggaattgctggatcatatggtaattctattttcatttttttaggacttccatactgttttccccagtggctgtagcatcgtacattcctatcagcagtgcacaagggttccactttctccatatccttgccagcacttgttgttttctgttttttttttttaatcatagctatccctaatgggtatgagtggtatctgattgtagttttgatttgcatttccctaattatttgtgatattgagcatctttttatgtgtttatcagccattcatgtatctccttcgtagaaatatcctttgcccatttttatcaggttgtttttgttttgagttttaagagttctctgtatattctggatgatagatgatctgtaaatattttctctcattccatattcctctggctccttttaagatttttctttatgtctggtttcaaggaatttgattttgttgtgccctggtggagtataagctttcttttgagttttttgctcttgttgttaagcttttggagtttgtgggtttatacttttcatcagatttggaacatctttggctattatttctccaaatagtcacacatcgctcctcggattccagttacatatatattattaggttcttgaagttgtcccataccttactgatgctctgctctttttctttggtcttatattttgggtttcattttggatagtttttatttctgtgtctttacattcactcgtctttccttctgctgtgtcttgactgctgctagttccatccaatgtatttcattttatatattctataatttgtggtttgatagaaatgcagtgatgtagcaggtatcaataaatactgccttaatttgttgcgaaaatataacagatttcttgttctgtatgttagctaaaaaggtatgcaaaccaccctgtatgtcatattaacatttatgtccctttgttttcatgtcaacttttagtttctctgccaaaacctacatatgttttttttatatgattattctacattttctgctgagagtggacatctgcattagtagttctatgatatttgttttataagttgccagaatggttgctctgtttggcagactgcagacaaatatttatctatgattcgttgcatgatatgaccatgattttgctacaaaaaacttgaaatagattttaatattttctttactattatcagagagagagctggattacctgcaaaagtgtacttttgcttattgctgtcattgataactcagtgccagctgggcgtggtcactggtattacctccatgtgatcactttttgttcactaatgttaatttaaaaaattttaggctgggcgcaggtggctcacacctgtaatcccagcactttgggaggccgaggcagggggatcatgaggtcaggagatcaagaccagcctggccaacatggtgaaacccagtctctactgaaaatacaaaaattagcctggcatggtggtaagcgcctgttatgccagctacttgggaggatgaggcaggagaatcgcttgaacctgggaggtggaggttgcagtgagccaagattgcaccattgcactccagcctgggcaacaagagcaaaactctgtctcaaaaaaaaaaaaaaaagaaaaaaaatttgcagcctgagaactgatatacttcagaccagaagtatttcagattttttttagattttggaatatttgtattatacttatcagttgagcatccctagttggaaagtctgaactctgaaatgctccaatgagtgtgtcttttgagcatcatgttgggactcaaaagttttcagattttggggcattttgggttttggcctttcaaagttgggatgctcagcctgtcattgcttgtcagacagtcatttgcattcagtagttctttctccttttcttgcttctctgtcccagcaggtattaatctctggagaagacacatccacagttagcactttcttcagatgctgacgctcggtgaacagttgcctttggtcacaagatttagaagacacagtgtccatcctcccagattggatctctttttcatatggatcttctgtttctatgtctttttaaaaaataactttttgggaaaccttttggattacaactgttcatcctcacctatgcaaagaaagggaagctattgctgggattttgaggaggtatgtcgttttttcttctactgcaaaatcacatcacccagg

SEQ ID NO: 30545 - DNA, 2300 bp, Homo sapien
ttaatgaatgatccataaatgccactctgaggagcttaaacctaagccctgagccattatatgttctgcacatttatgagaggcataagcagtcttgcagaaaaggggaaatattctactatcaagaaggcccagtttaaagtaatggtggttggtcaccaactagtctagggcactggggttcttcatcaaattgtagactacaggtcttttgtgctcataaaagagtccttctgcaaggtgtcccaacactgtcagcggtctgtgcttctgtttatcttaagatgcaaatgctctgagaaatctcattcttatacacagtacacagcacctacaccataccaaatcttaatcaatgctcataattataacagttctacatcacatgctaatgaatttttaacgtctaaaattttcctatgctgctgatcagcaatctataagcagctcaaaactcttcagaaattaaaaggttaccacccacagaccagaagcagctttttaatctttctacactagccagagagtgggtgattgcaaaaaaatacaagccaactctgttggtagaggacagggttattaagttaaaatcccatctataagcatcgttttgtcacatgacactagtaaaactaccacctactcacaatttgagtttcaatctcctaatatacagagaaaaaaatgtatctacctcctggaacaaatcaaagttttgttttattttaaagcagctatctgatatttatgccctggattttttttttttaagaacagaataagctaatttaggaattcacacctttcgtagagatgcttatggtacaggtacctctgacggctaggctctaccaacactaacgtgtaacgtgtcacaaaagccaacgggcgttgcgggggccgggggtagccaacagctcaagtgggctgcttcactccgtggcagattcacctggggattcctcaccaagaatgttgttaagggacgaaccaaaccaaccacaaatgatacccctttaccgaggctgaaaaagcagagattcgcaagctataaacgaatctctggccctttagggaaggtgcaactcgctgcacctctttcccctatcctacaggggttaacagggggcatcctgaggccgagaccaagcccagccagctcctcctcacatcccacctcccactacatattctccccagtacgccgggctccctcctcccctcgaaagacagttcaaaatcaaaacaataggtgcaaaactggtttcaggtggaaatggctgagtcctggtggctaacttctgggacgccatggcgatcgagggctcctaaaaccccagattccgacgggaaccggctcctaaacagtccctcgggcctcggcccgacttctcacacgcccctccctcacctcggccctgggatgctgggaagggaacgaggcgaggggctggaggggaaccccaggtcaaaatgacagcggaatgagccgggaaaggaaagaggccccgtgggatgctgggggtcgagtcctaggcccggggcttcaacctcgaacgggggcgacggcaggtcccagccccgacaggccgcgagcgggaggccaggcccgcgtccgctgcgccgccaggccacgctccctcacgactgtccccacccaccgcggagggccgtgagggggccgcgaccgccgccagcgtccggggcgggggcgctcactcaccggcggggaggggaggagcagccggcgtctccgccagcgccgtcgctcgagctcaagcgcctgctccttccactgcggccgccgcacccggtccatcccccacaaccacccccccctcccgaccctccccccgcgccgcctcagccgccgccgcctcagtcaccgccaccgccgccgccgcctcagccccggcgcgggagggcgaaccggcgcgagagagcgagcgcgcgcgcgcccccgccacagccgccaccgcccacaacctccgcccccggccggcggcgcacgcgcaagggagcgggcggacgggcgcgcgcacgccgcaggggcggggatgggccctggaaggcgtggcccctcccctagcccgccttcccacgcggtctctgggctggttgagctgcgccgctgcaggtagtgctgagttgctccaggtaagctcctcctctcaaaaagctctaggaaccgagccaccctcgccctaggagcaacgcccctgagtaatatggggtttcgtcggatttctgcccgccgctctggatcacacgtttgttctccctatttgagtcgcaaggcc

SEQ ID NO: 30546 - DNA, 2300 bp, Homo sapien
catagttctctactctgcttctgggagcttattccacatgagtgcatatggaactgccttattcttttaaaggctgcatagtaccccacagttttagatgggtcttagttgacttaagtgtccccctcctgatggacagacatccaggctggttccaattctggcttgtataaaccatgctgcactgaataccctgaggtatacattctcatgtatataggtgggagtatctgtattatgaattctgaaaaacagaattgtctcatggaaggtacatatgtgttaaattttcagattgccacccaaaagattggatcaatttataccctcgtcattgtgtacaaaagacaacaggtctatctgatttcatcttagctagggtggcatttcttcaaatcctggagtctagttgggagaccaagcctgaggtttcatgtttgcagtgtctccctcactgcctctgaactttttgagggctggggctgagcctcattcacttctaggccttcaggacctaccaaggagtctgacaccatagtgggtgcttgttaaatgtttagagatgggccgggtgtggcggctcatgcctgtaatcccaggactttgggaggccaaggaggaggattgctagagtctaggagttcgagaccagcctgggcagcataagaagactccatctctacaagaaataataataaaaaatagccataaaaattatggtgcctggctgtagtcccagctacttcggaggctgaggtgggaggatcccttgaactggggaggtcaaggctacagtgaggtcagattgcaccactgcactccagcctgggtgacagaatgagaccctgttttaaaaaaaaagtttcaagatggaggcagtccccagggctagatgtggcagtcccacatctgggactttgggaactgactcggggggcaagctccttggcacccatgtgtttctcctccctgcttcccctcccctcctttgctagagttgggtgaactccaatagattcctgtgcaggggctgcagactcgaatgtccctcctcagtgacaggggcaacacattggaagacattagggagtggtggagactgtggtggccgagagcagccaggctcagctccacctggctgttgacaggaggaaatgggggcccattctttttcaagagaagccataaatccaaaattttctaagttatcttggttttaaaatgttggttattcagatttttttcaaaacactgtggaagtcaatcaaaattgtccatgaactggttgtagcctacaggccgccacttttggaattctgaaagctttcctctggctcctattacacagaggagaaaactgaggcccagagaaacggaggcactagccaggaatgacacagttaagattagcaccctggagcctgcggggtggctcacgcctgtaatcccagagacgcaggagtctgaggcaggaggatgacttgagcccaggagttcaaggctgcagtgagccgtgatcgcgccaccgcactccagtctgggggacaaagcgagatcccatctctttaaaaaaaaaaaaaaaaaaagtagagctccgctcccacttgccccccattctctctctctctctctttctctctctctctctcttgctctactctcgcccgtctgcgttctacattggttctgcggccgtgtccctttcgtgtgtgtctgccctgtgtttctccgtcgtctccgtgtggatctcggtctttgtctcgccctctagctctctcgtgcgcctgtgtttaatcgtgcgcttctctcaatctctctgtccctccctttgccccctacacgcgtgttctcgtcaacagatctccagaggtggtgcagaaacgaccccgcgccggcgccccatcctgcggccagtgcctccgcgccccggctccggtccccaccgtccccgccccagatttccggaggagcaggcgggcggggtcccgcggggccggctgccgtcagcgccccttcccggcggccgcgacccctccccgctgacctcactcgagccgccgcctggcgcagatataagcggcggcccatctgaagagggctcggcaggcgcccggggtcctcagcgctgcagactcctgacctgccgactgcggatcccgagtccccggatcccggacccatcctgtggagcccactcctggcaggtaaccgccccaacccctctccttccgcagacggtgtccgggagcactggaaagggagccctctcggcccgccctcaccttcggttctctgagagc

SEQ ID NO: 30547 - DNA, 2300 bp, Homo sapien
gtttccttccctagactacacctaaccctaacctctcaacacctcttgttgaaggccctcccatccaggttgccctaccaagtgaaattttttttagagacaaggtctcttgcccaggctgtcctcgaactcctgggctcaagcagtcctcccgtgtcagcctctagattagctgggactattcggcacacaccaccacacccaacgaagtgagtattttatatgccagctggctggtattacaccattccatcccaaatctcccctccaaacttggtgaaaatcatctgaccatttttacagattagaacgaaagcaaacaagctctcactctgtctgcccccagcacgaggctgtccacacggagcttttggacgagctgtacgaggcgctggcagagaccctgatggccaaggagtccacccagggccactggagctatttgctggtatgagaagggcaccctcctccccctcacagcccagatacccttcctgcacagacaaagtgaaaacgtgggtgtgggttcaaatcctgactcacccattctgcagtcttagacatgaggtccgttaaccttctttagcctcagtttccctgtctgtaaatcaagcacttcaacaacaacagcatgtctcgtggggttgttgggtatttgtccaataggtgacacacactacctgcttcacaaggacctggtgcccagtcctcaaagaatatttgacagggctggacatggtggctcacgcctgtaatcccagcactttgggaggccgaggcgggtggatctgaggtcaagagttcgagaccagcctggccgatatggtgaaaccctatctctactaaaaatacaaaaattaggccaggcgtggtggctcatgcctgtaatcccagcattttgggaggctgaggcggggggatcacctgaggtcaggagtttgagaccagcttggccaacatggtgaaactccatctttactaaaaatacaaaaattagcggggtgtggtagtgggcgcctgtaatcccagctactcaggaggctgaggcaggagaatctcttgaacccaggaggtggaggttgtagtgagccgagatcacgctattgcaccacggccttggcaatgagagcgaatctttgtctcaaaaaaaagtacaaaaattagccggacatggtggcacacacctgtagtcacggctacttgggctgctgaggcaggagaattgcttgaacccaggaggcagaggttgcagtgagccaagatcatgccactgactccagcctgggtgacagagctcaaaaaaaaataagataaagcatagatacagaaaaccacaaaggaaaaacatagcatattgaatcatcacaaggcagccaccccttcatagccacacctggcccctggccaccactgacctgtgctccatcgccagaattccgttgtctcaggaatgttcgatgaatggaatcctgtgtggcctgagatgagtgtctttcatgccgcgtgacacccttgaggcccgtgcaagctgttggtatgtcaacagttagctgcttctcattgctgagtggcgattggtcctgtcatggtttattcagccatgtggcggatggctacttgtcttctaagccacttgttttctgattgctggacttactgtctcaccctctcttggtacagccctcggaaggctcggtcacactctccgagcacagccatcatctcccacggtaccacaggcctggtcacatgggacgctgcccgctaccttgcagaatgggccatcaagaacctggcagccttcactaacaggtgacctcggggcacagggcagccgccatctaccttgcagaatgggtcattgagaacctggcagccttcactaacaggtgacctcggggcacagggcagggcaccgaggcaggcttaccctggtgcagtcgaagacacggtcccctttcctcccgccaggactgtcctagagcttggcagtggcgccggccttacaggcctgtccatctgcaagatgtgccacccccggacatacatcttcagcgactgtcacagccgggtcctcgagcagctccgagggaatgtccttctcaatggcctctcattagaggcagacatcactgccaacttagatagccccagggtgacagtggcccagctggactgggatgtagcgacggtccatcagctctctgccttccagccagatgttgtcattacagcaggtaatgcccagccccgggcatcctgtgcaggcggtgtccttgcagctctacccagctcttggc

SEQ ID NO: 30548 - DNA, 2300 bp, Homo sapien
gttctgaagccaaccttccttaatcacccagacccatccctggttaggacttgctgtggattctcacgtgactccatctcaggctacagggactgagagggtgtatgcaacatctcagacccagaaaccgttgattctgcctaaaaacacagcaataaccacatctcatcctcttgatttaaatgaaagggtatgggggaataaaagatgaacctttttttttctttgtcagatcttgcgctcatttggttctggtggggaacaacagctataagagaacaagtgtattcaattagaattaattccccctcttattctcatagctgagcagggctcaagtgcctctcatctgaaagaggtaataagatttaatctgtctcctcatctaccttctgcaagtatacttaacaaattagctctcgggactcttccaaatggagttttatgaggaatttgctaaggtaaacgttttagactttgaacacagttcagatttcagggacagtactgaaatctgaactgtgttgctaactgccctgcctttcaactcaagacacaataactttgaactaaaataattatatttttgttgttttccactctgtccccacgtctatatcaccacaacccccaatcccaccccgcaggagctaactcctccttcctgtccccgcaagatcaaaactcctcctgcaagccccgctagctctgtctgctcaccttcgtggcagatatgctattgtacttttacactcatttgtgtgataaatacttcaatgtccacttcttccacgagcccctgagcccctggagggcctggacaacaccgagtttttctcaccgttacatctccgttgtcaggcacttaataagtatttggtgaacgaatggcttgtttggtgacactccaaaggctgggggacagaggtaaagctccctccttttgggccccagacgggtggcgctgatggagagaggaggctaggataaggcctccaggaccgaagcgcgcacccgtaaggcccctgctaaaaagaccttcctgaaggcggaggaactgcgagtgcctacgttagcccaaggcctgacctgacgatcccagggaccctcgctctaactggccccgcctcccgggccccaaacccggactcggccccgcccgaagctccggatcctggggcccgcccctggccccgcgtcggcagaccgtgggctcgctcctggacctgcctcaaaccctccgcaggtaacgcctcccgaacttgagccacattccgatcccctcctcaaacccctccccgtttcccacaccctggacccctcgctccgtctcggccccgccccaagcccagctaggtctgggcccctgagcccagccccgaccggcctcccagtccctgggtccctcccgacaccggcccctccctaagctccgcctcccagggcccgcctcctgagcgcagcccgcagcctggactccgccccgcctcccggaccctgggcccctccccacgtgggcccgtcctaagctccgcctcccagagtccgcgcaccgcctggccatgtgctaagacatagtcaacgccccgccccggccccgcctcctgagcccttctctgggtctggccttagccccgccctaggacctgtctcctgggctctgctccgagtcccgcctcctgaacccaatggcgtttatccccgccctaatgcccgcctccaggactcttatcctgccctcacgcaaggcaccgcctccaggacgccaccaacctggacgcttccgaagcccagcttccaggatcgccctatcctggccccgccccaggacccgccaacctggaatctacccaggacctgccccaacgacgttaattctggccctaccccaggcctcgctctcatgacgctcatcctggccccaccccaggccccaccctcctaagctcatcttggccccgccctagcgcccgcccccaggacgctcctcctgaccctacccctaggccccgccacctctctgcctccgcgcactaccctgggcccgcccccttttcagtccaggcccggcttccgcccggtctcctggcaacgctgcggccccgcccacgtcatggcgcctgaggagaacgcgggtaccaaactcttgctgcagagtttcgagcgccgcttcctagcggcgcgcacactgcgctccttcccctggcaggtgggcggcggggcgagcggagaggcctgcggggcttgcggaagtccaggggcagacgggatgggtctccctgctgaaacccccggcgctc

SEQ ID NO: 30549 - DNA, 2300 bp, Homo sapien
cagtttctccccagtgctggccctgtgctgctgggggattcagtaaacatggctctctgactaatccacgttctgttgctctgtctgctgctgacgcccttgacactggcttcttgggtgtgagatgtgccctttcctccctctggcccacactcaaacctgtcatctcactgagtgcccactacttgtaaacctttcctgcccatggctgtggatggtcttcccagggcctaacctgtagtcggggctgcatggcaccttagagcccttgggtggcaaggccattggagccagtggctatgtcaatttcaaaacctcctggtctcctagaggcctgctgatgtagaccctcagggtctttaagctcggtgcaagtttggagccattcaccttaattctgcaaaaatataccttgcaaagagtaagtgctcaatacaacttcatggatttggattaaatatatctttcatttttcttattctattgtttattatcagctttcatattttaaaattactgaaatttcttcatggtaaaattctttgattcaaaacacttctctaaatgaatacttctctatttttatttctaagaacagtggttgggatatgggatattttgagtgtaatatgctttgggagttagccagattggggatagagaacagcctgagcagatggaagtgcttattaaaagaaaaatcatttttctcttcctgtgttcagactttaacaaggacattgaaaagtgaggtttgatacatagggtagattttctatgaaattctaaagttcagtcatcataagacatgagtattgagctaggaatggcagatagtcccatttttataagagcttattgcaaacttttcttggttcccgttgcttccttcctcttgccaccctggccttcactgaaagccagctttcctgaagcccctgagatagcccctttttggaaacagcctctttatcctctgaatcctcattaagaataatctttactctgtaccttatagtataatgatccttgccaatacaagttcctcgaaggcagtgctgcacttgattcatctttgcatgcatttcacagtgaatgttatgctgcatttcatgtggtaggtactcaaatatttgttgcataagtggatggaaatcttacatctatctttataattaatagatcatttcagaagattttgggggagagcagattttcaagatctccaataagctataatttatttttattcatttttaaattttacacacagtaaaatttatttctctttgtatgtgttcagttttaccaaatgtgtagattcatgtaaccactatcccagtcaggacacagaagagttccatcagctcaagaactcccaccaatttcattttacacagctgactgattgatagtgggctgtgaagtctgagcattatatagccaaatattcatgctctgcatttatgttaacagcttcaagtttgcaggccagatttctttcctttctttgcacatgggtacctttagttctagagctggatgaagcacttgctttgcctctgtatgaacccacttcattggagtaaagagttggggaaaggattttgatccagtgaaataacttaatacttctgcttttcttttttctagaaaaatgtccagcatatccaacagagctagtatttgctctggacaattcctacgatgtcacagaagagagctttaataaaacacgggacatcatcacttccattgtcaatgaccttaacatcagggaaaataactgtcctgtgggagcaagagttgccatggtttcctataactcaggcaccagctatctcatccgctggtctgactacaataggaagaagcagctcctccagcagctttcccaaataaaatatcaagacaccacagagccccgagatgttggtaatgcaatgaggtttgtgacccgcaacgtgttcaagcggacgtatgcaggagccaacgtgaggagagttgctgtgttttttagcaatggtcaaacagccagtaggtcatccatcatcacggccaccatggagtttagtgccctggatatcagtccaacagtctttgcttttgatgagagagttttccttgaagcttttggggtaagaatttctcttggcaacttctttaattttaagatagaggtaggtattgtgatagggcaggatgggagtggtagagagtcaagaaatatatgtggcctcttgaaaactcctttacagttttcacagctatattgttgtcaatgtctgtgaaatccaatc

SEQ ID NO: 30550 - DNA, 2300 bp, Homo sapien
aacacccaaagcatccaatttaataaaaatagagagtaggaatgtagtaaatagtttctaaacatatggctggaatgattataaatattttccaatgttgattcagcactttacagaaaaacagagggtttggattttctagccctttaatttgctcagagagaaagagaaaaagcatgaacatctttgttgatggagagatagcctcctcaccacctgggaatgatagatttctttcataataaaagtatctgttttgcatggtgcctcacatagagtaaatgcccaataaagagttattgactcactgaatgaatgaatgagtgctgtatattgcccattacagtgagtattaaagtattttaaaaagtaatcaggaaataagaaatcagacagtgtaccaccaggaattttgaataaaattctgtccattgctttttgaaatagacttttaagtggaatttgtgattgagagggtcctcttgacaactgagagatgtgccttcttctagatagagtggactggaaatagttgggatcactacccacggaggccaaaggaagcttgggaacgtacaatttctgcagggcccaacttcaaaagctggcatgtggtgtataatcagctggtgcataatcagaagtgtgtacaaatttagtccagaattgcaggcttggaaatgatagattttaatacttgccccagtgagtgaatctggtcaggttatctcatggcagttttctcatcataatctagggatgatgatacttgttctatagatactttttgtgttatgtttgggataagcaggggattgtgtgtgtgtgtgtgtgtgtgtgtgtgtgtgtgtgtgtgaacatgcactgaatggagcaaagagctataatgcaaggtaatagtgattagttgggtgttttttaaactaatccttaaagtggtttcctactagtgactaaaaacaatgagcaaacatgcgttcacttcttttccaatgcagtttgacaacactggaacatttcaggtgattccagttcctccaaatggggaaaatcaaacattagaaagacttcggcgctgtgcactttgctatggtaagaccaatgaagagaattgactgtgctgaagagcttaaatgccttctagatgagttattgaatgtggttttatccagagatttctatttttaatcataggttctattttcagttttctagtttttcaataccatatgtcatggtttcaatctctggaatgtttggagtttccatagaatgtgaaaattggtttagaaaattatcccaaccaatgtagcatttcttggggacaattgggtagtttgtatcagaagtctctaaaatatcaaaaatatttcctaaatgagcttggacatgacttgtacactgcaggtatctgtgctacctacatctgctttcaacaaagcccttcccttattgtctgctagtgcccggagaagtaccgggacattgaaaatttctcattaatttaaattatgtgagatcaaagagatattgatcaaattataattcttggtaattagtcactgagtcacttgaagatctcaaacaagtgtcttgttgggtcagtgttgaaccaatgatgtgtctctctgtgtgttttcagataaatgttttccaaatgcttgcattcgagaggctttcttacctgaagattcatacatggatgtagtcttcctcatagacaattctcggaatatagcaaaggatgagtttaaggctgtgaaagccttggtgagctcagtgattgacaacttcaacattgcttcagaccctttaatctcagactctggtgataggattgctttgttgagctattctccttgggaaagttccaggagaaagatgggtacagtaaaaacagagtttgatttcatcacttatgacaaccaactcctaatgaagaatcacatccagacttccttccaacagctaaatggagaagcaacaattggtcgtgccctactgtggaccactgaaaatctttttccagaaacaccctatctaagaaaacacaaggtcatctttgtggtctcagctggagaaaattatgagagaaaagaatttgtaaaaatgatggctttgagggctaagtgtcaaggctacgtcatatttgtgatttctctgggctctacacgtaaggatgacatggaggagttagccagctacccacttgatcaacacctgatacagcttgggagaatacataaaccagatctgaattatattgcgaagttcttaaagccatttttatactcggtcag

SEQ ID NO: 30551 - DNA, 2300 bp, Homo sapien
ttccttctatcacattattatggaatcatttgtcaattcaaattaaacacaaggaacttgtttacctaaataagtttgtacgttcagcaatctagacaaaaatttaaaatacacaatgtttataggcaacagttcccaaggtcacttgatgtcattttggtatttctgctggttggtttttttcacacaattctgttttccttaaagacattatcatatcttggttactacctggttttctgctcaggtttaaacagtcatcatcaaaaatgaaactttcaagctcaagacagatatgagaagacgtagatgcaagaggaattttggaaaggatatattctgcttttttctaaatagtttatcttattttctgatgaagaagagatttccaataaaatacagtaaaataagatgctcagtcttccagatttttgataacactttgatttaccttgaatctcatgatgaaaattgattatcaaataaaatttttgttttccctcagtcaattctcattaaaaatcaagttgccaacacttgttttaaaagttgaaattgatgattttggttttaagcatttgcaaatgtccaactgaccagtgtgtctgggaagtagttaagcatttgtctttacaaggaatatcttaaacattgctgatctaagcaaaccaaattaaaaacaaccactcattttatcaagcaagctgtatgtgttcagtttgctgaaaaaaattagagtttttagccaagttaaaaattcgtgaaaggagagtgtatgagtcacatgactttattgttctctaattaactgcctttaggacactcagcttaaaatatcaagccctttctagtttctccaactcttaagtttccctagaattaataagaataagagcaaagcactttaatgcaacatgcctctaagtatttaacctcaaaatggcagtgtccgtggcttctggaatggctgagctcctgaaagcagcaccatctttgacatggtcgaatgtgaataatttggttatcagtttcttcatttgtcagacttacaccaagcaagatctcaaaggatctcctgaattttttagtttttttttttttcttttctgcatggatgttagaagacaacaagaggaatcaaaaaggccctttttagaaatataaatcatcaaaaccattccttagatgagtcctttgtgatttatttttttctagatgactttattcaaatgttcttaaatttcccttatgattattgtaatttaatatttgttgaatgacctcaattgataagtagcattatatgaatgtcttattttagactaatgacatttccacagtgtactttagggatatttaaatgattctgcatgactttttcaatagctaaaataaaatctttcagaacttcattatagaatcatcagattttatatgacctgaaaaaataataatgaacccttacacttttacaggttagaaaagagttgattcttagcctctttctttattcatttatgcctttctttgtgttccaactttataactgaaatagaattccaagtcccttgattcagacatggtgtctgagttaaataaaggcgtttgttgatttattaagacatgcttttcctttgaatcctagactgtttcgtggatgttgtggtgggatttgatgtctcaactcaggagaaagggcagactttgcttgaaggtcagccttggatggaaacctaccttcaagacatcttacgtgccatcagctccctcaatggagtaagctgtgaggtgggcacagagactcaggtcagtgtggcttttcaagtgaccaatgccatggaaaaatattctcccaagtttgagatctacagtgaaaacatactgaatagcttgaaggatataacagttaaaggaccatctcttctcaatgcaaacctcttggattctctatgggatacatttcagaataaatcagctgctcgaggaaaggtaacatggatttatcttatttgttggtctatgattgcaatgaaccctttttaattcattttactttttttgaatactttcttaggtggtccttttattttcagatggattggatgatgatgttgagaaacttgaacaaaaatctgatgaacttagaaaagaaggtactgagtatggagaagtgggaagggagtgcttattaactttataatctcagaactaaattctggctcttaaatttccaggctcttaaattttgaataaccctgattttgacaatctccgtattctgtatgtactaggcagaacaa

SEQ ID NO: 30552 - DNA, 2300 bp, Homo sapien
gaatgcttacaactcaataataaaaagacaaataaaccaattaaaaaatagtcaaatcataaacatttcttcaaagaagatatatgaatagaaaacaagcacaataagaaagatgcttaacggaattggttattagggaaatacaaattaaagcaacaatgagataccacttaacagccaccaggataataaaaaaagaagataataacagtgtcagcaagaatgtggagaaattagagccctcatatattgctaatgggaatgtaaaatggtgcctgcactttggaaaacagtttggcagtttctcaaatgttaaacatagagctaccatatgagcccacaatttcgttcctcagtatctatccaacagaaatgaaaacatatggcaacacaaagacttatagactaatgctatgaacataggaacattattcataataacgtaaaagtaaaacaactcaaatgtctattaactaacaaaagggtaaacaaaattatttgcaacaacaaataaatgaagtactaatacaagctacaatagggataatcctcaaaaacattacccaaagtgaaagtcagtcacaaagaccacatattatatataaaatgtccagaaaaggcaagtgtatacaaacagaaagtagattaatgattgcctagggctggaagggggaggagaaatgggggagaacagggagtgactccgaatggtttcagggtttccttttggggtaatgaaaatgtttaaaatcaggcaggctgggcgcggtggctcatacctgtaatcccagcactttgggaggtcgaggcggcggatcacttgaggtcaggagatccagaccatcctggccaacatggtgaaaccccatctctacaaacaatacaaaaactagcggccgggcgcggtggctcacgcctgtaatcccagcactttgagaggccgggtggatcacgaggtcaggagatcgagaccacggcgaaaccccgtctctactaaaaaaaaaatacaaaaaattagcccggcgcggtggcgggcgcctatagtcctagctactcgggaggctgaggcagaagaatggcgtgaacccgggaggcggagcttgcagtgagccgagatcgcgccactgcactccagcctgggcgacaagagcgagactccgtctcaaaaaaaaaaaaaacaaaaacctagctgggcgtggtggcacgtgcctgtggtcccagctactctggaggcagaggcatgagaatcgcttgaacccgggaggtggagtttgcagtaagccgagatggcaccactgcattccagcctgggtgacagagccagactgtctccaaaagaaaaaaaaaaaggccgggcgcggcggctcacgcctgtaatcccaacactttgggaggctgaggcaggcggatcacgaggtcaggagatcgagaccaacctggctaacacggtgaaaccccgcctctactaaaaatacaaaaaaattagccgggcgtggtggcgggcgcctgtagtctcagctactcgggaggctgaggcaggagaatcgcttgaacccgggaggtggaggttgcagtaagccgagatcgctccactgcactccagcctgggcgacagaacgagactcagcctcaaaaaaaaaaaaaaaaaaaaaaaaaaaaaaaaaaaaaaaaaaaaaaattaaaatcagattatagggatgattgcacaactcgatagatgtattaaaaactactgctttgtacattttaagcaggtgaactttatggtatgtaagttatatctcaccagaactctaaaaatccagcttgggatatattagttttcctaaatattcttgagttctcttaactctgttctgctgtcctgggagtgaaggcgtgtctgagcagattctaggggatgtcagaaacctcagcgttcgtgaatgaaaggtagaagagcaggaaggggaatagatctttgtcagagcatcattttctccctgtagactcgcccaaagtaagaccacgccttccctagtttcctagcaaccggtttcctaccctggcaattcctcaaggctcactctttttcgtcacttccgctcggcgacaggaagtgaggtcagaccggttgctttcccgggagttcggcgtttgctggggctgcagcagctgaagtgtagtgttttcttgggactggcggtctgcacttctctcccgggttccatctccccccgcccggtggtgaggccctcgaggagggctcggacgggtgtagcgatccgcgctagaggaagacgaggcccgggaacgcatgt

SEQ ID NO: 30553 - DNA, 2300 bp, Homo sapien
accccctcagacaccaaaatttccagatgcttaagttttttatataaaatgactaattggtcaattcttcttggtaaagttgatcttgatcttaccagtttcttttttggcttagtaataggaacaatgattttcataatttaggggaccaaaagtaaaatttcagtttaagtcattttaggaataaaccatggagctataaatcttttggaggagttatagattcagtgttaatgctagagtattgcagtatattaatacaacagatagttctgaaaagttgctttagaaaaatgtttcagctaaagtgacccaataccaaattctgtacagttaccctctattttgtaaatgcatatgttaatatcaaagtatttatattgtgtaatttcctaccttaggtgcttttgtttttaatataatgctgtttcaaggtcgaatatgtacagtaataactgttacaaattgattacgagagatcacaatcattgtacaaatcacaggctatgtcattgtgtagacaaaaatcactgaccatgcatgccagaggtggatcataaatagtaactcctaagactagaaatctacttgatatttttatgggttcatctttaaaagtgacctcgctgaataaaagttcaatatttcttaaaagaaaggtaaatctaaaaaccgtccagaattttcgatcctagtctagtaccacttacttgggaacaaatatagaagcacaggcaaccccgtccgttaatttggctccgtcattgtgcagacaaaaatcactgaccatgcatgccagaggtggatcatagttaactcgttaagactagaaatctacttgatagtgatttttatgggttcatctttaaaagtgacctcgctgaataaaagttcaatatttcttaaaagaaaggtaaatctagaaagctgtccagaattttcaatcctagtctagtaccacttacttgggaacaaatatagaaacacaggcaaccccgtccgttaattctgatgttgaacgtgtggttagagagcacactgcgatatgttacaggacctgagataaaaagcaaatttgtaaagtgtctaagtgttgatggagaaaaacacatctagcatatacggaaattttcttttgagttctctgtaggatgatcaccaactcagtaggtgaagccctgccctctagtggttatgggtgtgagaggacttctgttcaacattatatgtctggctcaccacggtttattaaaaccaatcgttcattaaaaagcacttattaggggtctgggtaagatgccgagcaagtgaaatgtttacgtgtgaaaaggcattgacactggacaaaggtacagctgctaaaagaagtgctcgttcattggcttcgacagctgtacgactggtttctaattgctgttccagcctctccccagttccatataccacaaacgaatgaaaaagattagctctccctggagctctctgaggctgaaccttgctctctcattacacatggtaactaagcacaccccttaaagaattttgggaagtcgccccgcgattaccggctcccccaagaaccaagcagtcagtgcagggttttgcaagtgagagtgcgagactcgggaggctgctcacggtgctccagtccctggcaggagcatggacacctcgccccttccttccgtgggcctcaacgttgcctgctgagattgtgactgccaccccgacgggagcagcttcccctacagactttgtagagagcgcttaaacgcctcggggacagcggccatgactctcagcttgggccgaccccgcggccgccccacgggaatgcgtggccgacacggggcgtgggcgaatctccgaccctcgcgttcagggggtgcatataaacgggcggacaccgtccctggggtaagggaggcgccagcaagaacaaggcgggccaccaaccccgagcgacctcctaccggacggatccaaacccaaacattgtccattccgggccgaagtctcggccttcacttcacttccgccttcccagcccgtgaacacgaatgcgcctgcgcgcacctctctcagcggaagtaatagtgacaaagctgggttcgcggctggcccaggagtgcggggcgcgactgggcggccggcggcggggaggggcggagcgcaggagtcggaggcgggagcagaccagcacggcctcgcggagccggcccggcggaccgtgacgggtcccctcacctcctcttctctcccctccccgcccgccctctctccctcccttcctccctccc

SEQ ID NO: 30554 - DNA, 2300 bp, Homo sapien
atgggttcatctttaaaagtgacctcgctgaataaaagttcaatatttcttaaaagaaaggtaaatctaaaaaccgtccagaattttcgatcctagtctagtaccacttacttgggaacaaatatagaagcacaggcaaccccgtccgttaatttggctccgtcattgtgcagacaaaaatcactgaccatgcatgccagaggtggatcatagttaactcgttaagactagaaatctacttgatagtgatttttatgggttcatctttaaaagtgacctcgctgaataaaagttcaatatttcttaaaagaaaggtaaatctagaaagctgtccagaattttcaatcctagtctagtaccacttacttgggaacaaatatagaaacacaggcaaccccgtccgttaattctgatgttgaacgtgtggttagagagcacactgcgatatgttacaggacctgagataaaaagcaaatttgtaaagtgtctaagtgttgatggagaaaaacacatctagcatatacggaaattttcttttgagttctctgtaggatgatcaccaactcagtaggtgaagccctgccctctagtggttatgggtgtgagaggacttctgttcaacattatatgtctggctcaccacggtttattaaaaccaatcgttcattaaaaagcacttattaggggtctgggtaagatgccgagcaagtgaaatgtttacgtgtgaaaaggcattgacactggacaaaggtacagctgctaaaagaagtgctcgttcattggcttcgacagctgtacgactggtttctaattgctgttccagcctctccccagttccatataccacaaacgaatgaaaaagattagctctccctggagctctctgaggctgaaccttgctctctcattacacatggtaactaagcacaccccttaaagaattttgggaagtcgccccgcgattaccggctcccccaagaaccaagcagtcagtgcagggttttgcaagtgagagtgcgagactcgggaggctgctcacggtgctccagtccctggcaggagcatggacacctcgccccttccttccgtgggcctcaacgttgcctgctgagattgtgactgccaccccgacgggagcagcttcccctacagactttgtagagagcgcttaaacgcctcggggacagcggccatgactctcagcttgggccgaccccgcggccgccccacgggaatgcgtggccgacacggggcgtgggcgaatctccgaccctcgcgttcagggggtgcatataaacgggcggacaccgtccctggggtaagggaggcgccagcaagaacaaggcgggccaccaaccccgagcgacctcctaccggacggatccaaacccaaacattgtccattccgggccgaagtctcggccttcacttcacttccgccttcccagcccgtgaacacgaatgcgcctgcgcgcacctctctcagcggaagtaatagtgacaaagctgggttcgcggctggcccaggagtgcggggcgcgactgggcggccggcggcggggaggggcggagcgcaggagtcggaggcgggagcagaccagcacggcctcgcggagccggcccggcggaccgtgacgggtcccctcacctcctcttctctcccctccccgcccgccctctctccctcccttcctccctcccgctcgcttcttctcacgccgggagcaggctcccgcctcgcaccgctgccccgcgagcagctcctcttctcccgaggcgcgcggggcgcccccgcgagccccgcggctgagaccccgcagcctggaggagggctgtccggggctttgggtgggtaccagtattacctcctgcccccatttctagaaacttccaggttctgaaggaaggggaggttcgggtatcccctggatgggggggcatctctagggcgccgccccgctggcgtgagctggggacgttgcgggcacacgacggggcgggtgcgggatcttggggaggggggctcccgagatagtggctgggcggggaactccttcctcagcctctcgtcagcgccgcttctcctggtttctcttgcagatgctgctgctaggggtggtgggagcagccgtgggacgcgtggccgggagcgggggtgacagcctgggattccgggggcttctcttccttgtcctcctcctctcctctctattcccagtgtggccgtggctgacactaaagactttgtagccatcaacccgagtgcagtttcgatggaaaatgaaggtaaaggcccctgg

SEQ ID NO: 30555 - DNA, 2300 bp, Homo sapien
tggtgcgttgaaagagtagccagttgtcttttctgggtagatcagctatgagctgactgactaagaggagtagttaaaatggagaaagcttagctgtactttgtcttgcatgttaaacgtaatgagtttagaggattatgattatttgtaatcatcaggatctgctagacaggacatctgttttactttttactcttatgttggtggagaaatagcgtgcttttcattcaatgtgaaaattttgtgttctagctgggcaccgatggcttagtttttgaaatgtaatttcttgagaagtagcatgtggttagtataaaattgtctttcctattaggactagctacgtaattagtctgaaatatttttctaactggaaaattagttgctgtgaacttttggatttttattattctagactgcattacacttgtttgctatattcaaatattttttctttggttttacttcctaggttgcacgttttcaaaaaatacctaatggtgaaaatgagacaatgattcctgtattgacatcaaaaaaagcaagtgaattaccagtcagtgaagttgcaagcattctccaagtaagtggttagtggggaggaagggactagatggtgtaaagtcagtcacttagactctataaaacagtgctgtctaatttacttttcttcagtgatagaaatattctgttctgtgccattcagcatagtagccacaagttgaacaggactgttgagcttgacatggggttaaacttgacagaattaaacatgactatatgacttgaaatgtggctagtgtgatggagaaactgactttaatttaatttaaatttatttaaataactacaggtggcttagtggctacctgattggacagtgcagctctagaacataatagcttttctaggaactatattagtgctgtgtaaggattggttggattaggaaaataattaacgtaagtagtggtaggagtttatctttttttgataagggttttctaaggtaaagtaaaaacttaagtacaagtttagaattgcagataatctgtaattgcttatgtaggctcttcctggttttcaaaagtagtatctatcgaaacatgaaaaagataatattttttatttttccttcagcagtcacatatcttagtgatagcattaaaaacatgggtatccttttttaggtttttgttgttgttgttattgtatttatactctgctttaaaaccacttatttgtaatatgtttgttttgaaaggctcctttattggactctattataataaccttttggtcagggcaactattttgggggtacagataattttattctttaatagttagaatactaaatcatgagagagaataactgaaggatgtaggtagtgtttatagaacataaactgttccaagaagaagttcatctgaacttcactgcttttgagtaatttaggaagcacaaaatttgagcatgaaataattacacagtccaagagtataaattaataccaaccccagggttttgataggcccagagaacaaggaagacatttatggcccattgaacgttctttgggagaaactaattttagaaaatggcgaaacaacaatgaaaaggaaaaagctaattaaaatgtactgttatgctttctgtaagtcttgtggctgattgtgttatttttctccctaaattttgtttgtttggtaaactctgcctttttgtttacattttttttaaaaaatcaattttgttgagatataattcacataaaatacaatgtactttttaaaagtgtacaatttgcattttgacaaatgtaatcaccaccaccattaagatagaacatttttatcactccagaaagctcccccatgtccctttgtaattaatccctccctctctatgtgtcacttctggtcccaggcaaccactgataggttgctctcataatagactagttttgactgttgtagtttctgtaaatgtgataatacattatattatgtgcttttttgtgtttttcttttctgtgctaacattttcaataactttcatgtataaactctaataggctgatcttcagaatggtctaaacaaatgtgaagttagtcataggcgagcctttcatggctggaatgagtttgatattagtgaagatgagccactgtggaagaagtatatttctcaggtgagatacttttacttcctcttctactgtgtaatttattaatacatggacttctgttatgtagttgcttacttttgtgatactgtttatggagaaaggaaataa

SEQ ID NO: 30556 - DNA, 2300 bp, Homo sapien
aatcaaccagtaaataaagcatgaaaaagtcaattacggttatagaaaaggatgctaatgtactagattatgcaaagaaaaagttggtaatggaaattaggaagtagaagcagcagagggaacagtggtagaatgaagggttaaattgcttatgtccttatttctagcagatcaagaaatagtatttggaatggcacaaagaaagacttgttattttttaattataaaaggcgagtgaaataattctttaaactgtgataaaatacgcatattataaaatttacagttttaaagagttaatttggtggagttaagtatggtcgcaatgttttacaactgttaaccgctatctagattcagaaccttttcatcatgccagaagaaaaccctgtacacattaagcagtcactccccagttttcctcttcccctagtccctggcaaccactcactaatctgctatctctatggatttgcctattctagatatttcatataaatgaaatgatataatatgggaccttttgtatctgtcttttttcacttagcataatgttttcaaggtttattcatgttgtagcatgtgttagtacttcattcctttttgtggctaaagtaatactccattgcatggatgtcacaattttacatttatcagttgatgaatatttggcctgtttccatcttttggctatcgtgaatagtgttgccgtgaacattcatgtatgagtttttgtttgaacatttgtagttatctgtattttatagatgaggacagtaaactacagagctagattagtaagtagcccaggatcacacaagtaagagatggtgaagccagggatacaaatccaggcaatttgatgtcagaacctacattttttaaccactgtgcttaacctggcagctactaggtatccagtaaatgttaactttctcttccttttgagaagtttattttttaggtattgactatattaattttgcgttttattaagctttaagtaacatccaatttaaattttgctgtgagtgctgtttaacctacattttaatactttgtatatgttggttatagtttggctgtagcagcaattcctgaaggtctccccattgtggtcacagtgacgctagctcttggtgttatgagaatggtgaagaaaagggccattgtgaaaaagctgcctattgttgaaactctgggtaagtctgtgttaagagcattcttatgcaatgatgcgtaagtttatgtcaatagtgaatcatctcagagttttacagtttttatcttagagatttgcataatgatgtttggcttatggcaaaattggatatggttttaacaaccaaaaaaggcaattaaaaattcctatcccttaggtgaggggacttgaagagaaatctttctacatcatgttctaatgcacaaatcatgttaagaaaatccatacaacaactgaaatcttggagtaaaattaatagaatttttttcttgtgacatgtcaaagaagataatgtattattacagatcccaaatgtcatacttgagttgaatttgcctgtaagaacagtaaatttacagtagttatattgctgtaacaaaactttatgtgcaatatgctttgaaactccaaaaatgtactgaatttaatttctagtttgtattttaatatcttctccatatatgagaagctgaaataccttgaaaaatcctgattgaagaaattatacgggtttatatttagaaactctccaaactttctagaaaagatgttatataagatcattacataaagctaatgtgaagtagctttgtagaaactaactgtatataaataagaacatgtcatcatctaatttttatttttaatttcagaaactgtaccttatgctgaaacaagcataatgagagaagttaatctaaaattaacaatgagtttgatttctataaaattcagagaagtaggacaggattctagtctttgatttgttttttaagtgaacctatatttctccttgattcttttggtgacttgtaatgatttaattctttaggctgctgtaatgtgatttgttcagataaaactggaacactgacgaagaatgaaatgactgttactcacatatttacttcagatggtctgcatgctgaggtactctataggtttttaaaaacaaacaaaaacagtatccctttaagaaacttggtgtttaacattcctaacagttccagtgtcttaccttcaaaagggctgtaaattagtagtggagttattttctctctctgtgattttaccaagt

SEQ ID NO: 30557 - DNA, 2300 bp, Homo sapien
agagtaggtgggctctgctgcaggtccgggcggcgggttgtgagggccgaggtggcacggtgtatgaaggcctgtgtttgaagacttaggtcagaccttttgcccgcctttcccctatgcagctctatgcaactgtctgtgcaaggtcctgtaatttgcgtaggacgccttgacacagtctctgcttatggacgctttacaaaactatcttgcaaagaaataagtactatacaggataaggttctgagatactgacagggctggaactagggtgagataagtgtaaaatgtaaatggatgccaataaaattcagtaatcaaggtaagttttaatgcaatctctaaaaatcaaaattatagcaaaaaaaatccatgactgacaaaatgtcacgattttaagtaatagtaacagtaccgtgctgtgccatattgaagcccgaggtgtcaaaagaaaaaccatcaattctgatcctgcgagttaagttagccaggtgaggaagcgtagctgggccagatatgcaaaataagatgatgaaaagagctcgtggttaggggtgtaactggatagaggggttcctagaggcatgaagcagttttccttataccaaaaactatgccaattaagaagggcccacaaatccaaagcctgaaagaagttccgtgactgattgtcaatacaaaagaaaaacttgatccttatcataggtcctacacaccttactttactgaagcccaaatgctttgtgattatgagatgaatatgatatcttttttttagcttaggactttttactttgaccccacaaaacaaatactctgtgctgtaagatgttgactattaccacttaagaatcaaagttcacagaacttctatactggtgtgtcagtaatggacttcaactgatttttctttagaattagcagcagcctctgtcaccatccaaagattacaacccatgaaaccattgaatttgtgccttgtatcagaaagcaaaggagaatgaaaaagcacagctaacattgcttgaggatctaggtaagaatttatgatgttgatatctatgttctatctaaagagcacttcataacatttgctattgatttaatggtgctggaagcaatgacttggtgccccataactagcatcaattgaaaatgttttctgttgttttaaacaggcgattaattctttagactgtcatcatgggtatccgaggactaatgagttttgtggaagatcatagtaatgagttcttcactgatttgaagttgcgggacacaaaaattgtcattgatggttatgctcttttccaccgtctttgcttcagttcaaacttggatctccggtatggaggggactatgattcttttgcagatgttgtacaaaaattctttgaatcactgtttgcttgtaatatatgcccatatgttgtattagatggaggatgtgacatttcagataaaaagcttacaactttaaaggatagagctagagagaagatccagatggcccattccctttctgttggtgggagtgggtacgtatgtcccttactcatccgggaagtattcatacaggttttgatcaagctgcgggtgtgttttgtccagtgcttttcagaagcagatcgggacattatgacacttgctaaccattggaattgccctgtgttatcatcagatagtgacttttgcatttttgacctgaaaactgggttttgcccattgaatagctttcagtggagaaatatgaacactattaagggcacacaaaactatatccctgccaaatgcttttcccttgatgcattctgccatcacttcagcaatatgaataaagctctactacctctctttgcggtgctatgtggaaatgaccatgttaatctacccatcatggagacattcttaagtaaagcgcgtcttcctcttggagctaccagttctaaagggaggagacaccaccgaatcctgggacttctgaattggttgtctcattttgccaaccctaccgaagcactagataatgttctgaaatacctcccaaaaaaggatcgagaaaatgttaaggaacttctctgctgttccatggaagaataccaacagtcccaggtgaagctacaggacttcttccagtgtggtacttatgtctgtccagatgccttgaatcttggtttaccagaatgggtattagtggctttagctaaaggccagctatctcctttcatcagtgatgctttggtcctaagacggaccattcttcccacacaggtggaaaacatgcagcaaccaaatgccca

SEQ ID NO: 30558 - DNA, 2300 bp, Homo sapien
attcaatgggcaaaacccagttttcaggtcaaaaatgcaaaagtcactatctgatgataacacagggcaattccaatggttagcaagtgtcataatgtcccgatctgcttctgaaaagcactggacaaaacacacccgcagcttgatcaaaacctgtatgaatacttcccggatgagtaagggacatacgtacccactcccaccaacagaaagggaatgggccatctggatcttctctctagctctatcctttaaagttgtaagctttttatctgaaatgtcacatcctccatctaatacaacatatgggcatatattacaagcaaacagtgattcaaagaatttttgtacaacatctgcaaaagaatcatagtcccctccataccggagatccaagtttgaactgaagcaaagacggtggaaaagagcataaccatcaatgacaatttttgtgtcccgcaacttcaaatcagtgaagaactcattactatgatcttccacaaaactcattagtcctcggatacccatgatgacagtctaaagaattaatcgcctgtttaaaacaacagaaaacattttcaattgatgctagttatggggcaccaagtcattgcttccagcaccattaaatcaatagcaaatgttatgaagtgctctttagatagaacatagatatcaacatcataaattcttacctagatcctcaagcaatgttagctgtgctttttcattctcctttgctttctgatacaaggcacaaattcaatggtttcatgggttgtaatctttggatggtgacagaggctgctgctaattctaaagaaaaatcagttgaagtccattactgacacaccagtatagaagttctgtgaactttgattcttaagtggtaatagtcaacatcttacagcacagagtatttgttttgtggggtcaaagtaaaaagtcctaagctaaaaaaaagatatcatattcatctcataatcacaaagcatttgggcttcagtaaagtaaggtgtgtaggacctatgataaggatcaagtttttcttttgtattgacaatcagtcacggaacttctttcaggctttggatttgtgggcccttcttaattggcatagtttttggtataaggaaaactgcttcatgcctctaggaacccctctatccagttacacccctaaccacgagctcttttcatcatcttattttgcatatctggcccagctacgcttcctcacctggctaacttaactcgcaggatcagaattgatggtttttcttttgacacctcgggcttcaatatggcacagcacggtactgttactattacttaaaatcgtgacattttgtcagtcatggattttttttgctataattttgatttttagagattgcattaaaacttaccttgattactgaattttattggcatccatttacattttacacttatctcaccctagttccagccctgtcagtatctcagaaccttatcctgtatagtacttatttctttgcaagatagttttgtaaagcgtccataagcagagactgtgtcaaggcgtcctacgcaaattacaggaccttgcacagacagttgcatagagctgcataggggaaaggcgggcaaaaggtctgacctaagtcttcaaacacaggccttcatacaccgtgccacctcggccctcacaacccgccgcccggacctgcagcagagcccacctactctgtcctcccagaggagtagctcctccatcagaagcccgctagagcccagcgaggactggctcctgcacgtgagagtccaatctcaagagcgggaatcggaagtctcccggtgtgacgtctctgggaagtacagttccgtgatgccggtggcgccagactgagccaaggagcaggtgttctcgggcccagaggcgctaagtagctaaagagggctgggacgtacgttccgaaatggctgctgtcaggctaggaaagcttggcccgccggtcctcctctgctttctccgcctacttgggtcggcgaacacttccgccttggtgccgcctcgccccgacttcccagtatgccccgcgccgtctccctggccacggttccaaacagccgtggcccgcggtgtctggcgctcggtgggtgtggttgcccctagtttgaggcctgcccgattacccgcaagacttgggcagccccgggcgccgctccgaccacgacagggaaaggtaaagcgaactgtcctccttggggctagccaggctcccctgcgagggggaaggtaatggtttcaagctgcc

SEQ ID NO: 30559 - DNA, 2300 bp, Homo sapien
gctacagcacaaatctacctttaaagtaaatcttaaccttaaggtaaaacgaacaattccttgcttcttcacctttttaaacatttacattttggcaaagcaggttaacgtttattgaggggcactgagactggagtacatccggaggtaagatgtccaggaaagcgaggagatcgcagccatggcgtcctagagattcggaacccagcccgggcagcttgaaaccattaccttccccctcgcaggggagcctggctagccccaaggaggacagttcgctttacctttccctgtcgtggtcggagcggcgcccggggctgcccaagtcttgcgggtaatcgggcaggcctcaaactaggggcaaccacacccaccgagcgccagacaccgcgggccacggctgtttggaaccgtggccagggagacggcgcggggcatactgggaagtcggggcgaggcggcaccaaggcggaagtgttcgccgacccaagtaggcggagaaagcagaggaggaccggcgggccaagctttcctagcctgacagcagccatttcggaacgtacgtcccagccctctttagctacttagcgcctctgggcccgagaacacctgctccttggctcagtctggcgccaccggcatcacggaactgtacttcccagagacgtcacaccgggagacttccgattcccgctcttgagattggactctcacgtgcaggagccagtcctcgctgggctctagcgggcttctgatggaggagctactcctctgggaggacagagtaggtgggctctgctgcaggtccgggcggcgggttgtgagggccgaggtggcacggtgtatgaaggcctgtgtttgaagacttaggtcagaccttttgcccgcctttcccctatgcagctctatgcaactgtctgtgcaaggtcctgtaatttgcgtaggacgccttgacacagtctctgcttatggacgctttacaaaactatcttgcaaagaaataagtactatacaggataaggttctgagatactgacagggctggaactagggtgagataagtgtaaaatgtaaatggatgccaataaaattcagtaatcaaggtaagttttaatgcaatctctaaaaatcaaaattatagcaaaaaaaatccatgactgacaaaatgtcacgattttaagtaatagtaacagtaccgtgctgtgccatattgaagcccgaggtgtcaaaagaaaaaccatcaattctgatcctgcgagttaagttagccaggtgaggaagcgtagctgggccagatatgcaaaataagatgatgaaaagagctcgtggttaggggtgtaactggatagaggggttcctagaggcatgaagcagttttccttataccaaaaactatgccaattaagaagggcccacaaatccaaagcctgaaagaagttccgtgactgattgtcaatacaaaagaaaaacttgatccttatcataggtcctacacaccttactttactgaagcccaaatgctttgtgattatgagatgaatatgatatcttttttttagcttaggactttttactttgaccccacaaaacaaatactctgtgctgtaagatgttgactattaccacttaagaatcaaagttcacagaacttctatactggtgtgtcagtaatggacttcaactgatttttctttagaattagcagcagcctctgtcaccatccaaagattacaacccatgaaaccattgaatttgtgccttgtatcagaaagcaaaggagaatgaaaaagcacagctaacattgcttgaggatctaggtaagaatttatgatgttgatatctatgttctatctaaagagcacttcataacatttgctattgatttaatggtgctggaagcaatgacttggtgccccataactagcatcaattgaaaatgttttctgttgttttaaacaggcgattaattctttagactgtcatcatgggtatccgaggactaatgagttttgtggaagatcatagtaatgagttcttcactgatttgaagttgcgggacacaaaaattgtcattgatggttatgctcttttccaccgtctttgcttcagttcaaacttggatctccggtatggaggggactatgattcttttgcagatgttgtacaaaaattctttgaatcactgtttgcttgtaatatatgcccatatgttgtattagatggaggatgtgacatttcagataaaaagcttacaactttaaaggatagagctagagagaagatccagatggcccattccc

SEQ ID NO: 30560 - DNA, 2300 bp, Homo sapien
caccagtatagaagttctgtgaactttgattcttaagtggtaatagtcaacatcttacagcacagagtatttgttttgtggggtcaaagtaaaaagtcctaagctaaaaaaaagatatcatattcatctcataatcacaaagcatttgggcttcagtaaagtaaggtgtgtaggacctatgataaggatcaagtttttcttttgtattgacaatcagtcacggaacttctttcaggctttggatttgtgggcccttcttaattggcatagtttttggtataaggaaaactgcttcatgcctctaggaacccctctatccagttacacccctaaccacgagctcttttcatcatcttattttgcatatctggcccagctacgcttcctcacctggctaacttaactcgcaggatcagaattgatggtttttcttttgacacctcgggcttcaatatggcacagcacggtactgttactattacttaaaatcgtgacattttgtcagtcatggattttttttgctataattttgatttttagagattgcattaaaacttaccttgattactgaattttattggcatccatttacattttacacttatctcaccctagttccagccctgtcagtatctcagaaccttatcctgtatagtacttatttctttgcaagatagttttgtaaagcgtccataagcagagactgtgtcaaggcgtcctacgcaaattacaggaccttgcacagacagttgcatagagctgcataggggaaaggcgggcaaaaggtctgacctaagtcttcaaacacaggccttcatacaccgtgccacctcggccctcacaacccgccgcccggacctgcagcagagcccacctactctgtcctcccagaggagtagctcctccatcagaagcccgctagagcccagcgaggactggctcctgcacgtgagagtccaatctcaagagcgggaatcggaagtctcccggtgtgacgtctctgggaagtacagttccgtgatgccggtggcgccagactgagccaaggagcaggtgttctcgggcccagaggcgctaagtagctaaagagggctgggacgtacgttccgaaatggctgctgtcaggctaggaaagcttggcccgccggtcctcctctgctttctccgcctacttgggtcggcgaacacttccgccttggtgccgcctcgccccgacttcccagtatgccccgcgccgtctccctggccacggttccaaacagccgtggcccgcggtgtctggcgctcggtgggtgtggttgcccctagtttgaggcctgcccgattacccgcaagacttgggcagccccgggcgccgctccgaccacgacagggaaaggtaaagcgaactgtcctccttggggctagccaggctcccctgcgagggggaaggtaatggtttcaagctgcccgggctgggttccgaatctctaggacgccatggctgcgatctcctcgctttcctggacatcttacctccggatgtactccagtctcagtgcccctcaataaacgttaacctgctttgccaaaatgtaaatgtttaaaaaggtgaagaagcaaggaattgttcgttttaccttaaggttaagatttactttaaaggtagatttgtgctgtagcagaaactggtgacaaattgccttcctcttattacctgggaagataactactggttttcaacttgtgataaatactccttccgttgtcttttgcccccagccagatctgtttcaccgagaacgggtagtttgcacaaggtagtaactttctccaagttcccatctagctttcttaactaaccttttttctctcctttgggcggcagttgatctgctggacacttacttgccttaacaaggtttgttaaacacctagtatatgccaggaggtatgccagggattggggatgcagaaataaagaagatgtgttcgcagtgcccaagttcactcaaacctcgagggggagcgtgttgtcaagtgaacagatagttctagaatctagacaatgcgacacattcttgggtaggtttatggttgcgcagaggagactaatggaatggatgacctaaaagtggactgggatgggggtggcagggctgagtctgtgagggtgggcgggagggaacctagtcccagagtcttctgcagcctggaccagactacttaagcactgctgggtttagactgtcctttaaaataagagccgctagaagtgaacttctcattctgtccgtccctaattctgtccttctctaaaa

SEQ ID NO: 30561 - DNA, 2300 bp, Homo sapien
tcctcagggagctatgagacgtggcagttatgaaaggcaggactgtttaggccgggcgcagtggctcacgcctgtagtaccagcactttgggaggccaaggcgggcggatcacgaggtcaggagatcgagaccatcctggctaacacggtgaaaccccgtctaatacaaaaaaattagccgggcattgtagcgggcgcctgcagtcccagctactcgggaggctgaggcaggagaatagcgtgaacccaggaggcggagcttgcagtgagatctcgccactgcactccagcctgggcgacagagtaagactccatctcaacaaaaacaaaaacaaaaacaaaaacaaaaaaaagaaaggcaggactgtttcatatgagtaggtacaaagtaaaatcacttttatttcatcagaatgttaaatgttttgttagttatcaagaaaagtgtgcttttgttttaaatctatatagaaataacattttaaattgaaaactgcctacaccttgaagttaggttttcatattcaacaattccaaagctatgagacaaaaacctagtttttaaggatggtcaatgggctttacgtggtggtgtccgtcaaccacaaaaactactagggcaattaaccacaaaaatcctcaaaacagaacataagtaaatgcccatttacaacattttccttcttaaaatgtatgaatcagttaagttgtacctaataccagtgagattagttaccagctttttcttttcccttccaaagacacgttagtaaaatctgctggaaaaacaactacagagcaggcctctaaatataccttttgtttttacttccccttcactgtcataaaagtgatgccgtctggccatactaagctgttcaaataaatatatggacttacagactttccagctgaaaagggtccttcaggtcactcagtaattctccttattttaaagatgagattaaggttccttttagagaaggacagaattagggacggacagaatgagaagttcacttctagcggctcttattttaaaggacagtctaaacccagcagtgcttaagtagtctggtccaggctgcagaagactctgggactaggttccctcccgcccaccctcacagactcagccctgccacccccatcccagtccacttttaggtcatccattccattagtctcctctgcgcaaccataaacctacccaagaatgtgtcgcattgtctagattctagaactatctgttcacttgacaacacgctccccctcgaggtttgagtgaacttgggcactgcgaacacatcttctttatttctgcatccccaatccctggcatacctcctggcatatactaggtgtttaacaaaccttgttaaggcaagtaagtgtccagcagatcaactgccgcccaaaggagagaaaaaaggttagttaagaaagctagatgggaacttggagaaagttactaccttgtgcaaactacccgttctcggtgaaacagatctggctgggggcaaaagacaacggaaggagtatttatcacaagttgaaaaccagtagttatcttcccaggtaataagaggaaggcaatttgtcaccagtttctgctacagcacaaatctacctttaaagtaaatcttaaccttaaggtaaaacgaacaattccttgcttcttcacctttttaaacatttacattttggcaaagcaggttaacgtttattgaggggcactgagactggagtacatccggaggtaagatgtccaggaaagcgaggagatcgcagccatggcgtcctagagattcggaacccagcccgggcagcttgaaaccattaccttccccctcgcaggggagcctggctagccccaaggaggacagttcgctttacctttccctgtcgtggtcggagcggcgcccggggctgcccaagtcttgcgggtaatcgggcaggcctcaaactaggggcaaccacacccaccgagcgccagacaccgcgggccacggctgtttggaaccgtggccagggagacggcgcggggcatactgggaagtcggggcgaggcggcaccaaggcggaagtgttcgccgacccaagtaggcggagaaagcagaggaggaccggcgggccaagctttcctagcctgacagcagccatttcggaacgtacgtcccagccctctttagctacttagcgcctctgggcccgagaacacctgctccttggctcagtctggcgccaccggcatcacggaactgtacttcccagagacgtcacaccgggagacttccgat

SEQ ID NO: 30562 - DNA, 2300 bp, Homo sapien
ttgctctgggaaaaaaaaggtcaaacgttacccaaccccggaataggataagggcactttctacattttcctacttaggctctcagcttctaggacagatttcctaacttagaattgtaacgagtttttaattttgttttgttttgtttttttaattgtagtctctcactgagaaatgggatgggggaatactatacaatagtgtgctgactgcaatatcaaaacttctagaccctgaatatgaaacaagaagaaagctctacctctggtaatgcctgaggatattacggttcttccattgtaaaacagagggagaggcttgtttgaattactgagaagttaatagcataatcacatttttaaaaatggtagaagctcttctctccaatgtgattgaagctggtacttggttaaaaaaaggaaacaattttaaaataaaatgacattaattaaaacatttacatcaacttaaaatatataactgtacattttctccagtttttggctgtatagccagcatccaatgtcctctggttagagactccttcatcttttttttttttttgcataaactacatccataaaatatatattatttttatattattttttaggacctagttttctagatttattttctgtaacaatctgaattcagaatactagattttcacatttttaacctttttagaactgtcttttcagttacttgacagctgtttatttttgcaactttttattttcaagttttttggtaatcatttgacttagttttcctagcagagataactttcacgctcactcttcatttaagttatattgaagtcataaatttacaatgatgagcataactggcattagcaggcttgggaataaacacaatgacttggtaagcatacatctcaactgggagggcagaagttcatgggcatgccaaggagagcttattagctggaggcattccctgtggcaagggcatctgtcagcatctgttaggaaggactggagaatgatggttaatctatgcattggttaaagggcctaaagaaattttctactataatacatttttattgatatgcataagtagcaactcctaaagaagatttttgtaaaatgttttctagtacaggtcctgcagcacttgccctaatgaactgccaatgcttgcttataatcatcagactgtgtctgcaaacataattggtgttctaaagtattttttcctatagtctagttcacactttggtactataattgatttgtttatcagactcttttttttcttagatgggaagagataatgttttggtctattcccaaagagttatcacaatttttaaattaatgacttggggatttaatgagctcttctttcatttatacatgttagaaatactaaatatctctattaatgtttttagttaatttttcctgttaaatactggtagtaatgaagtatgatatgccaaggatagttttaaaaagaaaataaataaatattgctcctattgatattaagtcgatatatttggaaaattttaagctgagagagagaagcatgcctgtgagtgtgtgtaaatacatgtaaatacatacacagaggcaaagagagacacagaaagaggcagagacacagaaggaaagataggcaaagaaagaataagatacagggagacagagtgatggattacatatatatatgtgtgtgtgtgtttgtgtgtgtgtgtgtgtgtgtgtgtgtatgaacacacatagaaagagacagacagaaatagataactataagagaaaccaagagacactgaaacatctagagaggtggaggaagggccaccccagcaatattgctcaagattagttccatggctgcccttatagaactgtaggatacacagatgaggaggtcagaggccttggggaagcaggacaggaaaacaggcccaggtcccaccaggagacacagtgtcataataggcaataccagatatatgagtaggtcacaacctgggcattaattaatggctctgtaccacttgatgatatttgttaaatgtgtttttcagctctaaatgtttttaaaattttttttgatctcagaaaggtacttaaggaaatatctgttggagaactaaatccaaatgaaactgtacaggccaatttggaagcccaactcctctccaagctggaccacccagccattgtcaagttccatgcaagttttgtggagcaagataatttctgcattatcacggagtactgtgaggtgagactctccttttctcttggaagtctttata

SEQ ID NO: 30563 - DNA, 2300 bp, Homo sapien
gtgatttttcttctttattctgttgatgtgatggatacattaattgactttcaagtgttaaagcagccttgcatacctagtataaatcccacttggttgtggtgtataattctcctgacacaatgttggatatatatatgtatattttttggacaacatctcgctctgtcacccaggctggagtgcagtggggtgatctcagctcactgctacctctgtctcccgggttcaagcgattctcctgccacagcctcacaagtagctgggattacaggcccctgccaccatgcccagctaacttttgtatttttagtagagatggagtttcaccgtgttggccaggctggtgtcgaactcctgaccccaggtgatccacccacctcggcttcccaaagtgcttggaccacaggaatgagctgccacgcctggcctacaatgttggatttgatttgctaatatttcagtgaggattttttcatctacattcatcagagatactggtttttagttttcttttcttgtaatgtctttgtttggttttaatgttaggatgatgctgacatcttaaaatgagttagggagtatttcctctgcttttattttctgaaagagattatagatatttggtgcaatttcttccttaaatatttggtagaattcgccagtgaacccatctgggcccagtgttttttatttggaaacttactaattattgattgaatgtatttactgaagatgggcctatttgattgtctacttcttgtatgatttttggcagcttgtgtctttgaaggaattggttcttttaatctaggttatcaaatttgtggttatagattgttaatagtattgcttttttattcttttaatgtccacggaatctgtagtgacgccctctctttcatttttgattttaatagtttttgtcttctatctttttattttacttaggctggctagaggctagttgattttattgatcttttcaaagaaccagttttatttttgttgatattctctattggtttcttgttttcaattttattatttctgctgtaatatttctccttacttttggtttaatttgcttttcttttctagttttctatggtggaagcttagataactgattttagatctttctttttttctaatatatatattcagtgctgtaaatttccctctaagcactgcttttgctatatcacacaaattttgataaagtgtgttttcattttcatttagttcaaaatattttaaaatttctcttgagatttcttcttcattgtttagaagtgtgtggttttatattcacatattttgggattttccagttatctttctgttattaatttctagtttgattccattttgatgtgagagcagaaatggtatgatttctcttctttcaaatttgttaatgttttatggcctagaatgactttcagtttctttttgaataattcgcagggattttttttcatttttatgtgagctcaactgtgcatatatgaagatatttgtatactttattcggcattttagtttttttatgcaaagattttcaagttttctagttctttataattccataaaataaaggtcttaactgacataatttacattactgacttatagtcagatttaataaatgttacctattcttaaatatcatcaacaacgttattattttcacaagtatataaaacttggacatttgggtaataatagattacaaactggtctatcaattgaggatatggttactggatatagtactatgtagattatgctacaaaaacataataaaatatagcctattgaaatagttgaaagcatatcaccgttctccaaactacatgttccccaacctttaaaatctttattttaaaacttttgtttcctcagggaaactggaaagtattgtggctttgtagcttttaaacattgaaagatatatctatgggagtatatatttatgtgtaaatcatgtgcaacaacatatattatttacatggggatttaaaaatgttatattctgcatgaagttgtatatcttttttgccttttgtaggaggatacttcatcgagacttaaagtcaaagaatgtatttctgaaaaataatctccttaaaattggtaagattttaaaaagtatgaattccaaaaacgcagaacagtatattctagatattatcatatcaaattgaagtaaatggtacgtggaagtattagagtaatcattggtttgtttaaatttctcaaatttttaagtacatgtgctgctgaaatgaacacta

SEQ ID NO: 30564 - DNA, 2300 bp, Homo sapien
cacatagtcccatatttcttggaggctttgttcatttctttttattcttttttctctaaacttcccttctcgcttcgtttcattcatttagtcttccatcactgataccctttcttccagtcgattgcatcggctcctgaggcttctgcattcttcacgcagttctcgagccttggctttcagctccatcagctcctttaagcacttctctgtattggttattctagttatacattcgtctaaatttttttcaaagttttcaacttctttgcctttggtttgaatttcctcctgtagctcggagtattttgatcatctgaagccttcttctctcagctcgtcaaagtcattctccatccagctttgttccgttgctggtgaggaactgcgttcctttggaggaggagaggcgctctgttttttagagtttccagtttttctgctctgttttttccccatctttgtggttttatctacttttggtctttgatgatggtgatgtacagatgggtttttggtgtggatgtcctttctgtttgttagttttccttctaacagacaggaccctcagctgcaggtctgttggagtttgctagaggtccactccagaccctgtttgcctgggtaacagcagcggtggctgcagaacagcggattttcgtgaaccacgaatgctgctgtctgatcgttcctctggaagttttgtctcagaggagtacctggccatgtgaggtgtcagtgtgcccctactggggggtgcctcccagttaggttgctcaggggtcaggggtctgggacccacttgaggaggcagtctgcccgttctcagatctccagctgcatgctgggagaaccactgctctcttcaaagctgtcagaccgggacgtttaattctgcagaggttactgctgtctttttgtttgtctgtgccctgcccccagaggtggagcctacagaggcaggcaggcctccttgagctgtggtgggctccacccagctcaagcttcccggctgctttgtttacctaagcaagcctgggcaatggcaggcgcccctcccccagcctcgctgccgccttgcagtttgatctcagaccgctgtgctagcaatcagcgagactctgtggttgtaggaccctccgagccagttgtgggatataatctcctagtgcaccgttttttaagcccgtcggaaaagcgcagtattagggtgggagtgacccgattttccaggtgccgtctgtcacccctttctttgactaggaaagggaactccctgaccccttgcgcttcccgagtgaggcaatgccttgctcgccctgcttcggctcacgcacggtgcgctgcacccactgtcctgcgcccactgtctggcactccctagtgagatgaacctggtacctcagatggaaatgcagaaatcacccgtattctgcgtcgctcacgctgggaggtgtagaccagagctgttcctattcggccatcttggctgccctccttctgatttttaatatctattaattcttaacaaactggagacattgctaatggtttaatggatacccggaaggtcattatcatctaatattcattactcaagcccccaaatttacaaggatttttaaagcatcagaacttaaaaatatctactgataaatggttgtgtataaaattagtccaccctgaaaactgcctctttgctgaatgctagtttctatctctgtccatcacactaagagttctgttaccggtgagctgtgacagggtaaacacaaagtgcaagtgcaaagtaaactgacttcattaaaatggcactgcaaaacttgcagatgcaggatgtcacatagtgcatgaatgtgtcccccaaggttcatgtgttggaaacttaattcccattgcagcagtgttaagaggtgggacctgtaagaagtaatttggtcttgagggctctgccttatgaatggattaatgctgttattatgggagtggttagttattgtaggagtgggttcctgataaaaggatgattttgccccccccccttccttctctcttttcccctctctcttgcccttccgacttctgccatgggatgatgtagcaagatggcccttaccagatgctggcaccttgatatttgacttcccagcctccagaactgtgagaaacaaatttattttctttataaattactcagattgtggtgttctgttacagcaacacaaaatggactatgtgaagaaaaccatgttggaatcttgtgctgtcattgataagaaaggatctgagcattaggtcaa

SEQ ID NO: 30565 - DNA, 2300 bp, Homo sapien
gctcagccctctacctccagccttgagtcctgggcattctgcctcaggatagtgaatgggggatggttggcggaggtggggaggtgaggcagaagcagagagggatttgaaagggatggcaaagttgggggttcttatgggcttccattttcttcatccagaaaaagctctggtctccaaagcattaattcctgtatagctgttgccttggcttttatagattttcatgttgccttataaatagttgagtccatctttaaaagtctcttcaagcaaccaggaaagaaagaacagcctgaagatctggaaagggcatgtttaaccctaaatccttaaaagtagctaatctaggagagaaggttacctttgaaatgctggggagaggggtagatcacctcttctccaccttggctattagttacctgaaacatctttgaaaagccacatgtccctgtattacctccacagattctgattcagttgctctggctggaacccggaaattggcagttgctatccgcttttagagcaaggtgagtgtaacatgaagccagggccatttccaagtccccagaatgatagcaggccaacatggattgtgtcacacctacagctttatcaccttgatctgcccatctgatgttagtatttggcatctccaccctgcaactcagaagactaagctaggaaaaatgatgcctaacagttttcatccctgcttgaaacactggggccttgatgagtgtggctcagttccaactcctgggtctttaacataacacacagcagcgtgtcccaaccctcgactccaagaatggatacatttattttctgccttgcactgttctaagtgctttacatatctcaacatccctaataggttggtatcatctccacttaacagatgagctgctgggatctgagagagttaagtgacttgttaagggcacaaacctgtttctgggtgggtccggactctttcccaccatatgccgtcacttacaggctgtgagtttatgcccagcccccctcaaggagctgcctcctgctttctattgcataatcaatatcgacacctggtgtaggggcgctctgcacggtggggaaggcctggcctggagtgagggatcctgcatctcagcatcaggccctgagtaggcctctgcccttgtggtagggtaacccaccctccttcatagctcagaggtctgagggggtttgagggaaagactagaaagcctaggaggcttcttctatctctcacccctcctcactcccagtcctgtgccacaggatttcactcacagctccttccacccccacccttcccctgaaaatctcactgccctgtgacttctccatgtgccacttcctgtgcgtcagatccccgcgataagctgcccactgcctgtggccgccccaattccttagaactacacttatcactgctcacccttctcctactctccccctctcagaaaatgacaccacatccaggaaactcggaaccaacactagcccagcgctccctcttccccattcactcagttaccaagtccccacagtttcaccactcaagacagttgtcagaccatggcgcctctccatccccatttccctaggataggccttggtgtctgaggccaaccctgcctcatttcctcctaacccccacccaggccttgtgctttgtgtaccaccacacccaaccaaaggtagttattacttctttggctcccagcactcaagtgagcgccccagctctcccttacctgctggcacactccagctgactccagattctgacgtaggcgtttatgtactagcctttctccaggttcagggcgctgccacaccttcagccccgccccgccccgccgcaagcccaacccagaggttgcttatggtttccctaaggttcctgggctctggacatcagtccggtctgcaagccccgccctgattggctgcctccggcaccggtcgctgcgccctgacctaaggcgcccaggttcctcccccttatccctgcagggctggtgccttgcggcaccgcccacgctcggattggtccgaggtgagattcgcccttgtgccctcgtaggccttcggaacagcggaagagcagtgtcgggccatggccagggcccgcaggctggagctggccgaggccctggcgctggggccaggctagaggcatgcctgctatgcgctcctgcacgcgccggaccctggaattctctctggccgcctccctctgcgctacgccatactggtgaggagggcgcgcgcccggccac

SEQ ID NO: 30566 - DNA, 2300 bp, Homo sapien
gcatgtttgatcctaaatcattaaaggtagcctatctaggagaaaaaccaagtcgcctttggaatgctagtggaagggggaaggccccggttctccaccctggttattagttacctaaaacatattttaaaaaccgcatatgtccctgtaggaccccatacattctgattcaactggtctgtggtaggaaaaagtggcagcttttaaaaatttttagaagctttttgcgaggtgactctaatgttaaagcagggctatttccaaaccccctggaactctagcaggccagtgacaattgtatcacacctacagactcatcactttaatgcagttgcttcatgttattagataatatccctgccccacaacgcagaagactaagctaggaaagatgatgtcatacagctcatccctccttcaaacactggagcgtgatgagtgcagctcagttccaacacttgggtctttatttattattattattttttgtagagacggggtctcgctatgttgcccagactggtctcaaattcatgaccttgaatgatcctctcacctcgcctctcacagtgctgggattataggtatgtgcccagccctggctcctcaacgtaagacatagcactgtgccccaaccctcaactccaagaatggctacatttactttctgcctggcactgttctaagtgcctaacatatctcaacatccctaataggttggtatcatctccacttaacagatgagctgctgggatctgagagagttaagtgacttgttaaggtcacaaacctgtttctgggtgggtccggactctttcccaccatatgccgtcacttacaggctgtgagtttatgcccagcccccctcaaggagctgcctcctgctttctattgcataatcaatatcgacacctggtgtaggggcgctctgcagggtggggaaggcctggcctggagtgagggatcctgcatctcagcatcaggccctgagtaggcctctgcccttgtggtagggtaacccaccctccttcatagctcagaggtctgagggggtttgagggaaagactagaaagcctaggaggcttcttctatctctcacccctcctcactcccagtcctgtgccacaggatttcactcacagctccttccacccccacccttcccctgaaaatctcactgccctgtgacttctctatgtgccactccctgtgcgtcagacccccacgatcagctgcccactgcctatggccaccccaattccttagaactacacttatcactgctcacccttctcctactctccccctctcagaaaatgacaccacatccaggaaactcggaaccaccactagcccagcgctccctcttccccattcactcagtcaccaagtcccctcaatttcaccactcaagatagttgtcagaccatggcgcctgtccatctccatttccctaggataggccttggtgtctgaggccaaccctgcctcatttcctcctaacccccacccaggccttgtgctttgtgtaccaccacacccaaccaaaggtagttattacttctttggctcccagcactcaactgagcgccccagctcttcctcacctgccgggacactccagctgactccagattgcgacgcaggcgtttacgtaccagcctttctccaggttcagggcgctgccacatcttcagccccgacccgccgcaagtctcatttcctcctaaccccaacccaggccttgtgctttgtgtaccaccgaacccaaccaaagctagttccctgacttgctcttttggctcccaggagcctttaggtaccggccttgcgccaggtttagggcgcggccacacctctagccccgccccaccgcaggcccaacccagaggctgctttcggttaccctagggttcctgggccctggacttcaacccggtctgcaagccccgccctgattagctgcctcccgcaccggtcgcggcgccccgcccccaggcgcctaggttcctccccttatccctgcagggattgggccttgcagcaccgcccaggctcggattggtccgaggtgagacccgcccctctgcccattgggccttcgggacagcagaggagcagtgtccggccatggccggagcccgcaggctggagctaggcgaggccctggcgctggggtcgggctggcgtcatgcgtgccacgctctcctctacgcgccggaccctgggatgctcttcggccgcatcccgctgcgctacgccatactggtgagaagggggcgcgcccggccactttctg

SEQ ID NO: 30567 - DNA, 2300 bp, Homo sapien
aggcaggctctgagaacctgccagggtgcctgggataagctgtgactttttgcccctgatgccataagttggagggtcctctgctcaaaacatatggtacacacttctccttcttttcatctggtatcatgtatcatctctcagatccaataagaaaacattcccacgtccttccctccctccctagtaccaaggtcctcatctcagttttcatgggtccatggagggctgcctctagtgatgagctggaatcttaaggcctgaaatagagccagactgcagcagtcccaagtcctggagagcttcaagtaactgctcccgcgcagagccaataaaggaattctccaggaaggtaggcaggcctcctacaccatcccgcagggtatacaggggcactcgcaccaggcccagcacctgtaaaaggaaggagacaggagacactagggccccaggtggctcattcccttaactccatcctttctccagcagatcaggcctcaccccttaatactccagcagaaccaggcccaaggctcacacctcactaaagcctagtggcccaaccttctgcaggaaaatgacccaaaacatattatctagctctatcaattaatctttcccacatctgcttctaaacctctagtggctactgcctcaaagatgtattcataccctttcaccagtggttgtcaaaatgtggtcctcagattatttgcatcagcattatttgggaacttttgaaaactacaaattctcaggtttcctctccccccgccccaccaccaatgcaggaatgctgagagaaatcgctattttaataagacgccccgatgattctgctacctgccaaattttgagaaccaccttcatacataatctatctactagccctgcctgaaatatcagggccacatctcctacacaagaaaagcaaaccccaagaataaaacctaggttgccacacctagataatgtgataatctatcacactgtcaatagggaacagcagagagacatggatgagtgtgttctagaaaggatctctcctggtaaagggtgggaaagacctttacagaaagcccaggttggcagtactaattcagagtatagatgatcacgatcccaactccaccaagaaagctggggagagggcaaggtcagaggggcaaagacttttctccagggatgctttcttgggggagagaaagctttgggagaagaggaaattgggaaagggacagagtcccaggctggtcccacctccagcccgtggtccttggcgcgtgttgcgccggcctccacagccaacagctcctcgagcgtcagacgcttggcatagaagtgggccacaacgcgtggccctgacccgacgtgggagctgcggtagtcagtgcgctccacgcggaaagcggcagccgcttcgcccagctcctcgcgcagctcgcggttcagcccgtcctctaggcttctgtcctgcgtgtccacgaatccgccggggaagcccaggcgtccatcgaagcgcatctgcatctgcgggagggggaagcggggattggcaggggcgccccagaggagaccaccagagagggtgcggggctcaggcagaaagtggccgggcgcgcccccttctcaccagtatggcgtagcgcagcgggatgcggccgaagagcatcccagggtccggcgcgtagaggagagcgtggcacgcatgacgccagcccgaccccagcgccagggcctcgcctagctccagcctgcgggctccggccatggccggacactgctcctctgctgtcccgaaggcccaatgggcagaggggcgggtctcacctcggaccaatccgagcctgggcggtgctgcaaggcccaatccctgcagggataaggggaggaacctaggcgcctgggggcggggcgccgcgaccggtgcgggaggcagctaatcagggcggggcttgcagaccgggttgaagtccagggcccaggaaccctagggtaaccgaaagcagcctctgggttgggcctgcggtggggcggggctagaggtgtggccgcgccctaaacctggcgcaaggccggtacctaaaggctcctgggagccaaaagagcaagtcagggaactagctttggttgggttcggtggtacacaaagcacaaggcctgggttggggttaggaggaaatgagacttgcggcgggtcggggctgaagatgtggcagcgccctgaacctggagaaaggctggtacgtaaacgcctgcgtcgcaatctggagtcagctggagtgtcccggcaggtgagg

SEQ ID NO: 30568 - DNA, 2300 bp, Homo sapien
aggaggcccaatcctaaaagtttgggcagagggaaccaggcacgttaaagaagacagaaagcggactatgcagagtgcttgtgagggtttcactaaaacagaggcaaaactgtccattgaattcagtaacatgaagtgtttgatgactatgatggcagcagtttcaggaagggcggtatggaaggcaggctgtactggttgagtgaatggaaagttggggagtagaacgtgtgagaagttggccttcaaggggctcaggttaataatagagagctatggagtcaaggcatgtttaagatgggaggtagagcatgccaatattgatggcaacagtcaagatggtgtgatgagagagatgggaggggcacaaagaggaggacccctgaaggagcagagtccatgagaaagaaggagggatgggacctttgtaggaagagacacagtcctgcagcctcatatggctcaataaaacagaaaggggcaagtatagaagattaggatgactaaattaatggggaaatgatgaaggagtttgaatctcttctttgtgaaatgaagtgagactatcagctagttgtgggtggagtgtgttctcagaaggtatgaagtagatgttttcctaggtgttggaaaacaggttgattaaggcaacagcagaagggcagggcaaggctgagctctgagatggtcagtttagagtaggatgctgggcactcaggtgtgtgtgtgttgagtggggctctgcacacacctgtcttcccctcatcaggattcaggagctgggatgggtacacttactgcagtgttggggttttgccagggaagtaaaaggagttgagagaaagatgggtcagttcagaagacatacacaggagaaattgtagtgatgaaatgtgcagtctaaggtttaatctgaccaagaaattggaattgaaaacaggaggtgactagggagggattaggaaattagaggtcttgacaagatagaaactccagcatggtgaggggttgggcagggaggtatatttgagccagacaggagtgctttggaaattgagaggtggagcaatctcaggtaaaggcaaaatagagggtatgacctggggttgctggccagagccagggaggagccttaagaagtgaaatctagggttggcgaggctggagggcagggtgagcctccacatgggtgctgaagcaagaaaccgacagatgttgaggagaatggtgtgacctaggagtcagcatccttggtgaacaagaggagtggccacaaggccagtggcacctgccagaggggaaagcaggcatgacaggatagcatctcccaggtgagagccttttgaggaagggagggtgggcagtggtctggaagcttgatgcagagcagtgtgggtcccactggcagcccttggtcttagaagaatgggagtacccagtgggggagcagctgtacaatgaggtagactcctagaggttaattatcatctcctaatcttaccctgacccttttgtcaaacgttatctagattaaacctcagtataggcaggctgcaggaaatggacattccagtggcccctggggttccagcctgtagcagcttcatctgtgctttgtgcacttggttctcagtcatctctgcaagggaccctgacgcctgggagatcagagccactgaccctttatggcactgctaacagaccccttccctcaggtaattctggatccagaactcattatgggatgtaatccaggtcaacactaataccacttggaaggttccgctctgtctcactctgcttgagtatcccactgatcagtctctcagtgcctgcctactgggcagctcatctgtccacttattcgtattaaatttgctttttatttaggtctctggagatggttgcgtggggaagagcccatgactttcctatatgatcccttgaacatactctccaagtcagtagattacctctcaggcagccttcataaaagtgtttcactgtactggggtttgtgttcatctcactcacatagacagtctctgggtaggcaggtggggggtgatacaagttcacactctgtgtttctcctcctgttagccattcccaccctgctgatgtttaaggaaagccagggatgatgacccacttaagctttccttggccttgttaagtccaatcatctggggcaggaagaagagaaatgctcattgcaatctttgacccccactaactgctgtggtgactttgacccaagcccttgacctccttttccttatctgaaatgttgctgtgat

SEQ ID NO: 30569 - DNA, 2300 bp, Homo sapien
atattgtgggtttggtttcagaccacggcaataaagcaaatatcacaataaagcaaatcacagaatttttagtttcctgatgcatatagaagttatactgtactgtagtctatagtgtgtttcaatagcattgtatctttaaaaatatacataccttaattttaaaatattgtcagaaaatgccaaagatcttctgagcccttagcaagttgtaatctttttagtggtagagggtcttgcctcaaagttgatggctgctgactgatcagggtggtagtttctggaaggttgggtggctgtggcagtttcttagcataaggcaatggactttgccacttgattgactcttcctttcacaaaagatttccctgtagcatggaatgctgcttgatagcattttgcccacagtagaacttctttcagagtttgagtcaatcctctcataccctgctactgccttacaactaaatttatggaattttctaaatctttgttgtcatttcaacagtgttcacagcatctccaccataagtagatccaatctcaagaaacctctttctttactcatccataagaagaaaccacttttactcatccataagaagcacctccttatctgttcaagttttagcatgagatggcagcaattcagtcacatcttcaggctccacttctgcagttcattcctccactggagccttgaacccctcagagccactcatgagagttggaatcaacttccaaacacctgttaatgttgatatttttactttctcccatgaatcatgaatgttcttaatggcatctaaaatggtgaatcctttcctgaaggattatggcaacttcatatattaaggactatggcaactgtaaccttacaaaacatatttcttaaataattagagtttgaaagtcacaattacacgtttatgcatggactacagaatagatgtgttaggcatggaaacaacattattcttgtacatcttcatcagagctcttgactaacttaggtgcattgtcagtgagctgttatcttgcgagacaaatggacagttatttctgggagaacataaaatcttttacctgcattatttgtgaaaaaggaatcagtatatgaaggtagccagttgcccagacataagattttttgacgaaggcaggcaaccttctgcacttaaagagcctgccccaaacttaccatcttctttcactatagtcggtggtctgtggatctgtttttgagttttaaaatagcatttctgatcaccttccaggattacaagtatgatccctgtcttctagaatcagggaacaaaactttcactctcaccccccaaccccaaccagtccccactgccagcagcttctacaggtacatatcctttgaagaggatccagactccattctggcaaactgagtggcccagacgaactgtgtccttctctccagttgtggaatacctaaaccagtctgcctagtccaacactacaaaatgtgatttcccaagaaccttagggttactatttctggctacagcacaaacattttgcctcagcatctgtcctcaaatgttcagctcggaaatggaagtctgcctactatagatagggagtacatggtcccagtactctcctgctcaactctctggatcccaggcagtactagaagtctgctcttgagcagtgctgaccactggacagatacggtggcaattcacttctcagcagtggagctgtcttgggcctgagttgagcttgagtttgatttactgttttagattttgtcttgaaatggagaacctttttgtaattaaacttcattcaaattagacatttgttccagcatacttggtactagctattaggaataaaatatggaaatactgaaccttggataattctctaagtcttatagaggccaacagattaaggaatactttcaagagtatcccttacactacttagactactggtcatccttcctctccaagacctttttcctacctgctagggtagccgaagctgaaatgcaaatgttaattagtcctatttccacagtggcccctggcatgggtaaattggatgatgccagctgtcacaaacattaagttgtaaatgaaaatatttcttacagcaagtataaggatatactttacaagaatattaagcatttcagaatcagtagtgcttttgagtcagtagtgcttttgcagtctaatggtgaggtacaaatctgcttttcaactttcctcaaggggtagaatataaggatgacctttacagctaatttccaaagg

SEQ ID NO: 30570 - DNA, 2300 bp, Homo sapien
agaaaatacactgagagagtaaaaatgaatactattagtaactggactgcagtgtttatagcagaacatcaatacaatatttcttttttttttttttgagacggagtcttgctctgtcacccaggctggagtgcagtggctcaatctcgctcactgcaagctgcgcctcccaggttcacaccattctcctgcctcagcctcctgagtagctgggactacaggcacccgccactacgcccggctaatttttttttgtatttttagtagagaaggggtttcaccatgtcagccaggatggtctcaatctcctgacctcgtgatccacccgccttggcatcccaaagtgctgagccaccacgcccagcccatcattacaatatttcttacagaccgtactgtaggccacaccactgcagcaaaatgactaacagttccttattctgagtgattcctgctttcttatgaacatcatgcccacttcctctctgttcttcctgtctctagaacaaagactatcaagatatccaattgctgaactgtcctttcttcttgacagcacccattctaaaacaagttcctgcttctctgatgccactttaaaatcactcagccttaagtccaaatttcatttcaagcccctcccaggtcactcttttggaaacatcctcagacatatgctgtcttttgctgcatcaagctaattaaacttgactttgtatgagttcacgttttcttctagtagccttggcttatgggcttccacaatgctgagcacatactctagcacactatatggataagaaatgttagttattggcagtagtacagaaatcttcttattctcaacttcttgcatgtagcacacctcaaaacatgtttgttcaatgaagagccatccttaagtatctgggaagccaggcagcatggctagaatgaagagatgtagtttttccttcaaggtccaaagtattattgaaaagtgtctaaggtaactgcaacagcaatgagtggaatgaatggacaagcaaagcaaagattttttagcccactaaagtccaagtaatggccaggaattgaccattgtctggacctgttaaaccaagatagccagatctctagtaaaaagagaaggttgaaatagctacactttaaagttcttatttccaaatttctacaaacagtaatctgacaaataagggaattagtagaagaataaatgtcctagtcacatacatggttattaggctagatctggaacccaagacaggggattttttgtgcaggtgtattagctatctattattgcataacaaattaccctaaagcttaatgactcaaaaaaacggtaatcatttattttctctggcaatttctcctagtcagtaattcatgagcggcctggctgggagattcaggcttaacgtctccatgagttgcagccgaggactggtggatccacttcctaggtggctcagtcatgactggctagttgattcctctttatatgttcctccctgcagagctgtttgagtgtctgcaggaaatgaaggctagctttctccacagggagcaatccaagagacaaaaactgaagtaacaatatgttttatgatccagccctagaaggcatacatcatttctatgggtgtagtctattgataacacatgccaaccctgtttcagtgccaactctgctcctctgccagatgtgttgttttggaccagcacctaaattctgagtcagtttcctcatttataatagaaaaataaatacttcctttcaggaccgttttttatgattaacaaatataggattatgaagcgctgcttagcataatgcattgcctcacaacgggcactatttagaagtgtcttcattttccttagcgtcctcaggaagtctgtccttattcttctaaagtttaaactctgaacatcccttttattttacccctggagaggcgagtcagtcccttcccacccctacctactccaactcacatccaaagtaggacaacggtggaagcagaactatagtttccggggagcgactcgagtgcccggagttcattgtaaaacgcaccggaagtgggtccggcggctttctttccgtcgcagagagcatcggccggcgaccgttccggcggccattgcgaaaacttccccacggctactgcgtccacgtggcggtggcgtggggactccctgaaagcagagcggcagggcgcccggaagtcgtgagtcgagtcttcccgggctaatccatgccgggttggaggctgctgacgcaggtcggcgcc

SEQ ID NO: 30571 - DNA, 2300 bp, Homo sapien
taaaaatcagtgtccataaataaaatattattggaacacagcctctcatattcattttaaatattgtctatggctgttttcacactacagtggcagtgttaggtagttgtgacagagaccattatggtctacaaagcctaaaatacttattaatgtcccttgacaaaaaatagtttcctgacctctgctgtagaacattacgactctaaagtttctcaatgtggtagtatgactatcaggttgttttatttcttaaggcatttatcaggtaggggagattcatccactgaactctaagatcagatcagacaggagttaggggaaggtagaggataaaggtaggagacacagaagtgtgattcactcgagggcccacctgctcatgaatcagaagtaatctctttttggatgtgccacctgccctggtcttccaggtgcactctagagagggtgacttatgattctggtatgtcctatactccttccctccatccccaaaccaccaacattgcctctttctgccgcttctctctgcacctccctaccacctccatcacttcatcctactgaaagccttctctaaactctcaagccaacttccttgtgaacatatacaactcagaaaatacagacatagaaggaaacatacaacttgaatgaatctgaaaaccaaactgggaattcagctaggactaggggtgagtggttagttaatggacatggaacagaattagcctttacattagactgtatgaaaagcattcagaacatgtggctatcttcatcacagtgtgaagttcacctacctccagcttacatttttcatttaaaacattttttcaggctcacagaaaaaaaatgaaattctttagtactaccaaactatttgcaacattaagtatatgattctcaaaatcagatgttttcaaaatgtcactcttctatccaatctttctcctttgaagtatggtaacgtggaatggcttaatctcactcttactacctataaatgttaggcatcttgcaggattatattgaaagttcttttctgtttagcctgagctgcatctgactaatctgcttctctttcctcttaccagtaaaggccatcatgatgcctctcatgttgactaaaaataatgatgacctccaatgggtcatccttctccaggccccagagcactttccaaggcttccctgtgctgctgagtacagcacctttcctccaattcccatctctgctgagtcatcttccagctttccagatggaaaggggccaggcaggctgcaggccagaagtcaggacttaaagcaggaagccatgggagcactgcaaccttctgcaagtgtgcctggagaagagctgccacctttgtggcacatggccttcagagggagagactgcaaccctgaccctcttatagcaggactttagactagtgccatccagtggaaatataacacaagttatgtatacagttttaaattcttcagtaactgtattttaaaaagtaaaaagaaacagagaaatccattttaattatatattttatttaaaccaacatagccaacatattgtcattttagcatgtactccatataaaaaaattattaatgaaataatttgcattctattttgtataataagtcttcaaaatccacatgtattttatacttacagcatgtcaatttggatgctaagttatcataaatacttgatctttgtttagattttatagttacagcttaattttaataactacctcactgacagttacaaagaaagaaaaagtagattaatctactgaagttgttccaaacatacttaaaatgtttctaataactgaattggctatccaattttaatgttaaatttaaattcattacaattaaataaaatataaaattcagttcgtcacttgctctagccacatttcaagggctgagtagtctcatggggttagtcatcattgtattggatgtcatagctttagatttttaaatatcttcaagtaaagaagatcatataaattattgggtcccacccctcatttgagaaatgaagaagctcagacacagacgagttaagggatcgtcccagggtctcacagaatgaggctttgaagcctgtcctcctaactcttggcctgctgctctttctttgtaactgtcagtgaggtagttattataattaagctataattgccatgcctacctttaagctccattcatcagaaccctaagcctttaggactatcagcacattcaaaaaatgtctgtcatcactgttgctttggtca

SEQ ID NO: 30572 - DNA, 2300 bp, Homo sapien
tctatggtccatgtgttcacttattctagctgcccctttagagactgcttcaatgaacaacccctatcctcccattaactagttgtgttccctggtctggtcatttcaaccgcccacaccctggatttatttttgtagatatagtaaaactttcttgggcaggttgttgtaaaaattaaatgggatggtaagtagagtgcctaacagattgcctggaaatagtacatgctcagcacatcttaattccttttctctcacctgtaatataagaagtttatgttgaatggtccctaaggtatttatattatttttaattttataaatgtagaaggtggtagacacctttctaggcattggggttataattatgaacaagacgacaaaacagacatatcccttgccttcatagaaattaaattttagaggatacaattaacatgcaaggaaatgcacaatgacttttccttcttcttccttcatctttgcaagttcaatccaattcaaattttgagtttatctctgaggctacctcttaacaaaacctggaagtaatgtttttggacttaacattttcatatttagtagtcatacactggttttgcctgcttagcatccgtctcccctttcctggtaggaggaccctgaatatcccttggagaattgtccctgtgtctcactcgcaatgtgtgtagatcaggtggggctccatcctggctccaggagtgctatagaagacatcacatgctcctagacattgtggaagtcctggcccattagtgtaattccatatccaaaggtcacaacgattgacttatgcatagccatgtgacccaagtttttgcaatcaaagcaaatccaaggatttctgtggtagtttcagtgtacagagaagctccctgaggtcctttccagggtccatgtttagtgttatcctatttcagaaaggctttagaggtgactgaaagaagaaaaatgttatttgtgttctgtcagaaggttgtccctttgtttatcaaagatatttctgtctacttctatagaacaattaagagggggtcttcctccttaccctattggttctccttttctggactttgaaattgagaacttcatggttagtgaaaagattttggctaatatctcctccaaccttcaggttggagaggctttgttagatagccccttaatagggtgagaaggaagaccttccatctcccctccacgttagatgtaacacactctataccatcccaatgtcagaaagagaccgtcattcactttacttcattaattccaaagtccaatttgtgagtctgacaataccaatgtgcagagagaatttagttgtctagtttgtctatggtagcagacataatcagaaacaatgccctgtatttgaataagttcatttgtctgaatttgaataagtttgaaataggaaggccatactttctctctaaagtgctttaaaacatgtggaagtggtcaccccttacataagacagcatatttatatctatctttaagcataagtactccctaagtatttctttatcttatttgtgaggtagatgtattcagaaactcatcatgagatgaagaaaatactctttgtccattaatttactcatgcattacttactaaaaataatttccaggctcctgccatacgccagacagttttgtagacacgaaggatccagagattagcaacacctttaccatttttggtgacagttaagcacccatctaagaagttttctttggtgagtgccaaaaagtgtaactcccattccccccacacccgcgccgcgatacgaccgctccaccctagagtggagatggagaccaagcacttggagatctaaatcaagtgtccccaggagctcagttgagcgacaaagctgagcagaaagcccagactgcgggcgcggcaggaccacggagagcgccgccgccaaggcctgggcggggcctgagctcgggttcccggggcaatgctcgtctccgtcagcaacccccagggggcgctcgcgcggaggtttcggaaccagtctcttgccgggttgctgggtgcatgggattcgtcagaaggtggaaatctctctgtgagaagctgccatctccccgccacccgctcgtccccttctctttctgccaccctcctttccttcctccctcgctccactccactccctccctcttttctcagtaccctcctctttactctccgagttaactgagagccgacctgacatctccaacattttcaccctcttcccccacccccatcaccgaga

SEQ ID NO: 30573 - DNA, 2300 bp, Homo sapien
gatatgcagaatttatcaggctcagagaaacatgagtatgggacttcagtcaccttctccgctatgtctgggacaattgtttaaaggtattttgttcttgactagctgctacatccattttcttcctgtttttgtgatacaaagaacaatatatagccaatcattagcttatgttattttaatgtaaattcttggtaaacaacttaggaactgcctcttcttttactccttaaaacttcaactagtaactgctactaatcagggtgtatatttatggcaacttgaatctatgcccccatgtggccatcctcaagctttggactcctataaactctatacttaatttttctggtcctcattatttaaggctaacgggagaatcaaggggcactcctaggcattgggcttcagaaattgggtgaatggcaacaaaagtgtcagacacagatgatgaagcttcagagagacacaggtttatcttattcatttaagacatacttttatatctcttactatcctggttctcaaccttagcctcacactgaagttaccttagaattaaaaaaataggctgcgtgcagtagctcatgcctgtaatgttagcacttaggaaggctgaggtgtgaggatagcttcagcccagaagttcaagatcagcctgggcaacatggtggaagccccatctctacaaaaaataaacaaaggtagctgggtgtggtgactttcccctatctatagtcccagctactcaggaggctgaggtgggaggatggcttgaacccaagatggctgcagtgagccatgattgtgctgttcttggatctcacgcaagaatttgaggcatatccataaagtgaaaacaagtttattgagaaagtaaagaagcaaaagaatggctactccataggcacagcagccccaagggctgctggttgccgatttttatgtttattgattatatgctaaacgaggggcgaattattcatgagttttccagaaaaggggtgggcaattcctagaactgacaattcctcccctttttagaccatatagggtaacttcttgaaattgccatggcatttatagactgtcatggcactgctgggcatatcttttagcatgataatgcattatagttagtgcatataattaatgtacatgtctttgtgacctgtactttgtgccaaccttttatctgatcctgtgacttagaatgcctaatctcctgggaacgcagcccagtaggtctcagccttattttacccagccccttttcaagatggagttgctctggttcaaaggcctctgacaatgccactgcactccagcctggctgatagggcaagagcctgtctcaaaacaaaataacaacaataaaaccctgtgcctaattagttattagagaattttttggagattttaatttaattgctatggtatatgggctggatatcaagatttttaaaagccacaagtgattctaatatgccttaaaatttgagaagcactgactcattacctggctggttctgtttcaaatgctttacaggtgttaattcgtttaattctcataacaatcatgaaagttgatcataagaattgggtcattcttgtcactcacaactaaaacagagttgagaagccagggggaacaagcacgcagggtacaacattgctgaaagaatgtaattctctgcaagcccaaactgcttgttgtaacctgaaaccagttttatctcatcttctgagataacgtgctgcaaaggctagcactaattgtgcccacagccaccattcaccagttgaagctttctgactccctaaattctttcttatgccaatgaactttctcaaagaagaatacataacatttctccttttttataaaactgatatcggaatagggcagggaagtgctgggcggagaagggcgggtccctggcgagggctccacccccaggcctgtgcccacggacctaggtgaggacaggcatttgttttcaggtccaaatgttacatttcccaagaccaccctggcccaccatgcccccatccccccatcctgtgcctataaaaaccctgagaccctagtgggcagacacaccagcggctggacattgagaggatcacagcagtggaaaaagacacaagcacctagccgttgagaggaacgcactggcctaagaacatactgacagacgccggtaggccagcagggcggcaggccatcaacccgcggaaggacacggactttggccagggcggtataaggtaagccccgctgctgggcggcctggctc

SEQ ID NO: 30574 - DNA, 2300 bp, Homo sapien
aggtcgagaatgtgatggcaaagagaaagttgcaagttcccttgaatggttaatcctaatcacacatgcatttattatttgcacatttttttttttttttggaggggggacagagtctcactctattgcccaggctagagtgcagtggtgtgatctcagctcactgcaacctcagcctcccggattcaagtgattctcctgccccagcctcccaggtagctgggattacaggctcccaccaccacacctggctaatttttgtatttttagtagatatggggtttcaccacattgaccaggctggtctcgaactcctgatctcaagtgatctgcccacctcagcctcccaaagtggtgggattacaggcgtgagccaccatgcccagcctatttgcgcatgtttcctactgccggaagaaggaacagttctcccatataccacattccagggcatcctatgatcacataagaacacaatcctcctgccacaggtaagcgcaatgtaccaggaaacaggttgcgggtaaaccattgttctccctctgccattatgatagaaatatcatgacaggcagctctgcccccaaatcttgcaaaatctcaatgtgcacctcaagtttgtattgttttagcctatgatggaactgacaggttggggaaaatggaaagcaaagttccatcagtctggatcgccttttgtagtgtccccagtgagatcatagctggagaggcaaggatgtaactcactcaaaatttaaggcttatggccaaagttgatgactaataatatagaattgtaggtttgggctttttgctttcttaaaaaactctgtcaggtttggaaagggacctccaatctaattttgagataccacaggtaatgtccaattgtcttaaggtgtgactaaaatttttcttttgtttgttttttgttgttgtttgtttgttttgctgtgttttgagatggagtcttgctctgtcactcaggctggagtgcagtggcacaatctcggctcactgcaacctccacctcctgggttcaagtgactctcctgcctcgcctcccaggtagctgggactataggcatgtgccaccacgccaggctaattttttttttttgtatttttagtagagatggggtttcaccatgctggccaggctggtcttaactcctgacctcaagtgatctgcccacctcggcctcccaaagtgctgggattacagacatgagccaccacgcccagcctaaaatttttcaaaataaacttgctgttacttttcttctttaatttaaaaatacctctataggctacatgagagtttttgaaaaagtagccatgtttggcatggaaataggccccaaatatgtcaacacctgtatttccttccagatttcagtcctataactttggactcccaacagattaagaatcactggtctaaggtttctaaagtcagggtagatccctttcccaagtgacagccacaaatccaacgctgtatcataccctatctaaagaaaagataaaagtaaactggcttggcacagtggctcatgcctgtaatctcagcactttgggaggccaaggcaggcggatcatgcggttaggagttggagaccagcctaaccaacatggtgaaaccccgtctctactaaaaatacaaaaattcgccgggtgtggtggtgcacgcctgtaatcccagctactcaggaagactgaagcaggagaattgcttgaacctgggaggcggagtttgcagtgagctgagattgtgccactgtgctccagcctggatgacagagcaagactctgtctcaaaaaaaaaaaaacaaaaaacaaagataaaagtaaactgaaaacaaggatagaaatgtctgctaacatgctctgtgaccttgatcaacagctttccccgctcttggccttggtgtcctaacttaaatggggaaactgtgatctctctcagctcaaaatttacatgacattatttacataccaaacctgccctacgcttcctggaaactttactacttatgagtgtggctcctccttccctttcaatcccttaattaaatagcttcccctctacaggcttttgaagtggtagcagttcctcctaactcctgccagaaacagctctcctcaacatgagagctgcacccctcctcctggccagggcagcaagccttagccttggcttcttgtttctgctttttttctggctagaccgaagtgtactagccaaggagttgaagtttgtgactttggtaagtagacttttctcattgctttttcct

SEQ ID NO: 30575 - DNA, 2300 bp, Homo sapien
ttctgtagaaagagctgatgggatcagagggatgtttgctctcctattgcctaagccaacaagaaaccctatatttttacaatgaaaagacatacatttagagatggtacaaactggtatttatgatgtgtatactatagtggactagggtgcgtgtataggagagtaactttccagatgaaataatgaattagcatctcattacgaaatggccccaaatatctgcttttactggtcagctatcaaaagaatatgtgtaaataaaggtacatattagaaatagtacacagttatgctagaaatgtttgccatagagacaaaatgtgcacaagatctcctcttcaacaaatatttacctaaaaatcaaatttaaaaatcgaaggatttcatttcttttagatccaattgattgcagttgagcattcagaatttcctttgaccctgagaccatggacaattggtaatataactgtaaaaaatgcataaagttagtgctataagaggacttagaaatacttcagctaattaccctcccttttcagtggggagctgaatctcaagggtcaaagtttatgctggaactggaacctaggtcatctcctgactcctagtcctgtgctcttcttagcacacacataatgctgatttcaaggcctctttagcaactcctctgaaatttgcaattaaggcagaaagcaacactcacatgtgatcttcctattttcctaatgcattaattttacattaatacttttcctattttcccacagttctaaaggtcatctttgctgttgccttttgcctgatatctgctgtcctaatggtactactgtttatccacattcgccgtggactctgctggcagagagaatcctatgggaacatctgaacagacagctggataagccaggccaacctcctgtgacacagcatctctcagtggtgccgcatctaaaggacaggcttttgccatgtgggcattgccatcctcacaccctgccttttgaatctgcccagagcagggtctgaactcacagtgacccacaggctgctgctggatgaacactcaggctacctaggtcttctcataatggagtggtagtgcaggctgcttgttcagctagaaagaggctgttatgcataggatggttgtattctctgccacagttgtccggagagaaataagaagccaaactccaatcagccttttacctgcaaagagtgaagggtgagaaggtggacaaagacatagattagaaaaatactggatattgggggaagttagactagaagtattattatacagggtgattcttacgaaagaagacccaatcataaattataaataaactttttatttagctattaagtaggtttaatacacatacatacacacatgcacatgcaagcacacacacacacaactgaaaagaaatttctgcccagtgtttgatagcggaaagatttctgtttgtgtgtctgtatattaacacacatacatacacatatccatatttaaaatgcctacagaagaggtatttaattctcgaactgtaatatcacccactttatgtatgactcaggtcatctgtttacaatttctatagtggggattaactggaaaatacacatagccactatcagatacctccactatcagatctggatatttttaaagtttccatttttattgcatttaaaattgtaagatcttactttcgtaagggctagtcatagctcaactgagggttgacagcccactgtctcagccctgcactggctttgggctcatgacttagaacaagttttttttatatctttttttttccagacacattgtctcactccgtcacccaggcttgagtatagtggcatgatcatagctcactgcaacctctaactcctggactcaagcaatcctcccacctcaatctcccaagtagctaggacaacaggtgcacaccatcacacccagctaatttttttattttttgtagagacaggatctcgctatgttgctcaggatggtcttgaactcctagcttcaagcaatcctcctaccttggccttccaaaacactgagattacaggcatgagccatcacacctggcctagttcttttatatcttttaccttggtctcctaacctaaaaatgaagaatctgaattagatgaacatagaagtcacagctagctctcatatactgtgaatcatttttcattttatgctctagatgagtcattgaccaagcaagcactgtcaaggatggtagtattgtggcaagctgaaaatttatgct

SEQ ID NO: 30576 - DNA, 2300 bp, Homo sapien
catacaagaagaaaagagcaagaaacaaagacaaaataactactcatagaagagagtgcaagttggctgaatacaaggaaaatggcttataaaaatgcaatggaaaaagatgtcttgtgaggcaattttgcactacagaggatggggacaattcatgatgcctaaggctcctctcaacacgagaattgattttattggtctcaaatattgaacagagaggcagtgtggaggttgaacagttcactggccttgatgttacaggcaggccctgtgtcttaatcttggctcaacctttaggagttaggtcacctttagcaagtctcctggactctctgggtctgctgcttctctaaaatcgaaataatataccccacatttacttttgggattactggaaggctttgtaaccacataaacacgtttctgtttccatgggataagccaataaggccccttaacacagccctcctgtttctttttcctcctcctcccttcctactctatttcgggttctgtcttcccacacccagctattcctagtaccttcccttacatgcaccttatcttactgctgcattacagaaaagtctaaggataaacacaaatagtctttttccgccctaaggtagggcaaagggttaatagaatcaagaggtaaagtctgtaaaaaccatttttccacattttttcatcctgcaatcgctgtctataaaatgagccaacttgctgaaggggacgccaagaaatcacaatttcaggactgccatgaagaatgagtattcaactccttatcagagacctttaacccttatacaataatgtatccatgcaggtcaccctacactgcctctactctgaagtctgcagcagaatcactattttttttttaatcactaatttttaaactgtggtctttacggctcagatctgggagtggacattgacctttcttatttaaaccattgcccacagataacacataatttctagccgaatcctttagtcccaatatcccctcttttcactgccctgacttccctctcaggtgaggttcaggaagatggttatctagagggcacaggttctgggttcaaattacttgggtgcaaacatgaaatccactactctgaggctgggcctcaacttatctgcaaaacgaggatgattcgtatctcagagagttgaagattaagcagctttaagtaaacttctaaacacttgatccggacacaataaatggggctaccagaactatctttccagcattcccacctgcaaatgccttaggcgtctctgagaatttggtctctgagaccttccagagcatccataacttaaaccctgctctgctgtcgttcaggacgtctcaatagtaaatgaacctgctggctcccaatccagccaaaccaggagataggctgaggcttcagactgcctcgcagatgctccatggcacttgacggcaagagctaaaaagaggtgatttaaaacaagatttcctcggacttaaagcttaagtaccgggttgcgaccctactctccgcaggacataagcggaggggcgcggccctaaggcacacgccggaggggcgtggtcatgggcacccgccggaggggcgtggtcatgggcacccgcgcgcgcccaggggcgtgtccttttcagcacccaccgaggcgccagccccctgacgcgctgcgtggaatccaaatcccacggccggtgtcgttactctgcgcatgtgtagctgctgggggctggccggaggaaagcagaatttcagggaaagaacgatcgggacggggaggacggggagggcggggcagaagacggaagagttgaaatcagctgactgggtctcgtgacagcctgggcggtggcgacgcaggcgtattagagcgcgctcgctcaaagcctgagcgaagatggcggcctccagagtgaaactctgagaggcagagggaggaggcggagggggcggggaggcagcgccgcggcggcaccaggaacccgcggcagcggagctgcagggccccggcgggggaaaggggaagtggtgagggtgaggaggccggagggcgcctcatcccactctggaagctgagccggcggcgggaggagctagggctggagcctctccagcctcccgcgaaggtaaagccgactccgggcactgggctctggggctctgccttactcccttcccacgccgtggggactttgtggggctcagggcagggaaaacggggtggtcttggctgctgcagcctgcagctgctaaggaagcagattacccttcccc

SEQ ID NO: 30577 - DNA, 2300 bp, Homo sapien
gtgcaaggcaaagtgcttggtcaacaaggaaaaccaaagatatgtagtctagaaatttaaaatcatttaatttgggaaaagacattttcttgcatatttaaaatgaccctcccattttcaatttttttttttttttttttttttttgagacagagtctcactgtgtcactcaggctggagtgctatggcgtgatcttggctcactgcaacctccatctcccgggttcaagcaattctcctgccgcagcctcacaagtagctgggattacaggtgtgcgccaccacgcccagctaatttttttctttttttctttttttgtatttttagtagagatggggtttcgccgtcttggccaggctggtctcgaactcctgacctcaagtgatccgcctgccttgacctcccaaagtgctgggattataggcatgagccaccacacctggcctataactagtgtttttatagtatttccagtagtatagtatgaccaatagctgtttcttgccttacaaagctttcagtctaaggtcaacaagactgaaatgttaagcaatggttatgtttttttcctgtcctgaattcaatggaaaagaacaccttaaaaaaaaaaagtatggatgttctaatcagaggaaggatcttaacactctgtttgtgagatgctttatgtacgttatcttgctttgtcctgacagtagccgtaggaagaaggtcctcttattcccaataacacttacatgcagaaagtaaagcaacttctttgtgacttggggttaagaaaagatttcccagatgtaataccaaaaacaatctagaaaagaagaaaaaaaggttgttagttagacttcattaaaatttagaactttgacaccatttagaaaaagaaaagacagatcgcagggagaaaatctttgcaaagcatatagctaataaaggttttctatccagaatatatacagaactcttacaactcaatactgaaaaaaaccaagcgacccaatagtaaatgggcaaaagattgaaatagacacctcactggaaaaatatgaatgttaatacatgaaaagatcatgaatctttaggaaatgaaaatgcaaactactacatattcactaacatgactaacatcaaaaagactgccagtggcaggtgttggcgaggatatggagaaaagaactctcatacattgctggtaagaaggtaaaatgataaaaccagtttgaaaaacagtttgataatttcttaaaagattaaacacatacttatatggtctagcagttccacttttaggtatctatccaagagagatgaaaagatgcccacagagagacttgcacatgaatgttcgtaatatcattactcatagccaaaaacagaagcaatccatatctagatcagccagtgaataaacagacaaaatgttgcctgttcatacaatggaatactactcagcaataaaaaaggactgacctaatacatgcaacaacttggatgaatctcaaaagcctatgtatgataagtaaaataagcaagacacctaagactacatattctataattctgtttttatgaagtttctttaaaaagcaaaactatagagatagatcagtggtttcctggggctggggagtgttcttttgcaaatgggcacaaggaaattttttggagtgatgaaaatatatcagaactgatgatgattatacagttgtataaatttattaaaaattatcaaactgtacgttttaattggatgacttgtgatttgtcaattagaaccgagtaaagctgttaaaaataattttaaagggagagaaagagaaattaaaattagtgtttaagtaacttgtacaaggtcatgtagcagcacggtgaagagctagtattagagctcttcctaaagccccactgtttgtgtttcccattgtaactgtagtgtgtccctgagcagattacctgctaaagggcctatgcttcatgctagatcaaaattccccttaatcatcaatgctaaaacctttttttacttttaatcttacttagagattccttattagcaagtttgctggatggagtaagagcctctggtaatagagatgtttgtgtaaaaatgacaccaacccataaaggtcagcgatgggggttactcagcatgcctgttgatgaggaagtagagagccttcacctcaggttcttagctacgcctccaagtaagtattgatttaaatgtaattacatttccactcatctacttaatttaagaattaggaattcgtatcttctttttgaacctcttaatctc

SEQ ID NO: 30578 - DNA, 2300 bp, Homo sapien
ttgcttttttattttattttattttatttattttttgaggtgaaggtcttgttctgttgcccagactggagtgcggtgatgcaatcacagctcactgcagcctcagcctcccaggctcaagtaatcttcccacctcagttgctgagtagctgggaccacaggcacatgctaccaaacccggctaatttatttatttgttttgtagagacggggtctccctttgttgcccaggctgttctcatgcccctgagcttaagcgatcctcctgcctcagcctcccaaagtgctgggattacaaacatgacccaccacacctggcctccattttagtagtgaaaaactcatttttctgtggtaggcccaaagttcccttttctttacaaattcccaaatgataaaatgagctttagcagggctcttcataaacactggaaaacatttgttattttatacagtactatagtacttattagatacatgtatgtatatatgatgtttatatttttattattttagtatcattgatatgtatcattcaaataattataattattcaaatagatgccttctgtttcctactaatgtaaattctttgtttatgtgtctgtatctctaaggctatattgtaaaaatacctaaaatatttaaccaaactgactttgagatgtatcctttactaattttgtggcttataccttgtgtaaaaatgtatacccttcttaagagtaacagctaaatgtgttggaataaaattcttttttattttttgatactttttccccctcactttaaagcatccttccatggcaataataaaaggagctgggttggttatgaaggcaataatagaggtgagagaacaattttgaaattttaaccttacttgaatgttgataggctgttttaattgaagttgacaatattgcctttcagtctttttgggaaataaacatttctctgggtaagaaaagtaattttaaatctttattataaattagttttaaacttgttacagaaataatcctcaataataaaagttttaatttcatagtgaagttgtagagcaaataaatctgttactgcattatttgtttattttacttacttaaaagttagcattctatctgttgctcttttttggaaggataatgttgacagtgttgaagtcttgagatactgagcttgtatagaaatctattgatggagttagttcataccaaaatgataccaagtaagaaaggcaacaaaaagttcttgataaagcatatttgtaattgagctctagagattggagcatgatcttgtcgaagatactgcttctttaagatagttgctttatgcttctatattttttaaaaggttgtagctatgaatgtctgttgcatactatgatgattacaatgacatcagtctaaatggcttttgaattcttgtattttgttgtcatagaagcaatttgaatacaattgaagaaagtctccttttaccaaaaaattcatttattgtgcataagtatagcacacaattaatcacagaattagtatgcccttaagtagctgtaaatatatataggcattgaactgaatggaacatcaaagtttatttgcatttttagtgtgcatatacagccaaaggctaattttctccctttagctaatgggttctttgctcaatgttagcttccaaagtgcccatcttttacagagcttgcgatagccaagcctctcctttttgttggcagctatacacagagggagtgaacctagttttaatattaagtttagcaaagcatagtttatgaggtaaatttgtctggaaacatctcaaccttattccaaaggtttaaaaattacctgtgctactactcacctatttttttttgggtgattagaagatgcattttaaaaacttctattacatactgaatgtttttttcatttaaatatgtaaaattagttttttaaagtttggatagcttgtcctggattgccaccttagggatcatcttaccctttttccaaaggaaggtgataaagaaattgctacaaaaatgcaggagcttgccctaagtgaaggtgccttacctcgacacttgcatactgcgatgtttacaataagctcagatcaaaggatgcttacaaataggtaggtgatttaattcaatttgctgcaatttaacttcctgtctagagaattgattcagatgttacataaaactaaatgtgtttgtattacacaaataatacattttcttttgatccacctagttcttttcctttccttacagaaggattttgccc

SEQ ID NO: 30579 - DNA, 2300 bp, Homo sapien
ttgcctcaatgaaatcattaagtttcatggctttaaatatttttattttattttattttttatttttctgagacacgaccttgctttattgcataggctagactgcagtggtgccatctttgctcactgcagcctctgcctcattggctcaagcaatccttccaccttcgcctccccagtaggtgggaccagaggcttgcaccaccatgcctagctaatttttgtattttttatggagacgaggtttcaccatgttgcccagtctggctttttatttgctgatagcttccagatttttatctcttgcttcgacttttagccctagacttcatacttctatctcataattggatatctgataagtatctagaacttttctccaaaattgtgctcttgttcttcccgagcctacttctcttacagtctttatgatcttagataatgactactccttattttctagtgaaaacccttgacattaccttttatatcaagttttttagcaaattccatacagtgcaccttcaaaatttatttagaccttcttgcttttagattgcaacaatgtcactgcttctactcttgcctccctggaatctgttatcaacattggagggttaccttgttaaatagcaagcacatcatttctgtgctcaaacccttggtgctcttgtggtttcccatctcagttaaaatctgagtccttaaaatgacttaaaaccagcatctgtgtaacccccaatgctaagcattgtttcttttatctcatatcctactcctccctctctcacactctgttccagccaaataggcttcttagaaaacaccaaattcacattcttgcctcaaggtcgtcttctttggtgtttcctctgcttagaataagggttttccacagatagcctcataacctgttttctcatcttcagatcttttgaatgtcgttatctgggtgggccttccctggataccttgtttaaaaatgcagccccttttatacatacacacatatttacatacacattctctctgcctatccccatttcctgctttattttactctgtagtacttactgtcacccaactatcaaatatatttcacttttttacaggcttcacctgtgagcctagaaacctttgtttgttcaactgctgcgtctccagtgcctggaatagtacatggcacacagtgtatgcttaatagaaattgaatgaattgaatgcttagactttatatagaaaatgaaatgaagatatatatttggttttatataatttatatttttagaaatctattattttagacttcggaaaaagaattctgatctgggaattcctttttataattgcctgaaatctttccttgagacacacagcctgagtgcaagcatagtggtggtgccccaactcctgatctttgactttgccctcatttatcacctcaatgtagtaacatggggtgatttgacatagaaggaattctttacgaaaatgtaaaaggtagttgatgtgttggttttaagtctggcacatcaccagggatagagctgtgggatagagggaagacctgaagtagtgtatgtgtgttgagcaaatcatgtgtgatgcaggaccatctactccttgcttttttacggcaaacccagtagggaataaagcagattttattcctccttttttaattgacaccagatagtgctgtgacaatttttatcagcaggtcttacatttataaaattggtatgtaattctcagcatttagctaaaatagtcatgttaacaatattgaattaacaggtattttaagaaataagttttgaacagaaagaactataagaaacaattattagaaattgccaaaatctattgtaaactaaaatagtgtaatttgcttttgtttatgaaggttaaatatgagtgcctggcagaggaaattaaaataggagactattacctgagattactattggaggaagatgagaatgaagaaagtggatcaattaagagatcgtgagctactctgtatatcctgtcgcatttgttttcactgttggtttcatggctatttctattgtgaacttttttttttaaaatctaggtatgaatttttcaatgagctttatcatcgcttcttgctcaccccaaaagtaaacatgaagtgtttatgtttacaagcccttgctattgtttatggcagatgtcacgaagaaataggaccttttacagataccagatatatcattggaatgttagagagggtaaggatatcatttaaggaaattactatttgatagtgtcac

SEQ ID NO: 30580 - DNA, 2300 bp, Homo sapien
aaataatttgggaatatggatttatgtgagttgccatttgtgagttttatttagctataaaagatctagtctttagaaaactaaggttacaaaaactaaatcggtttctatatctgatagataattcatttttctttctagatttttgaaatacacacataccaaacaggctttcaagtcagaagaggtaagccaggttaatcctctgaatacttaaccctgggtaagctgttttggcactataaagtttcctgagctgtgtattatgtttactagattataagtacttgagggtaggtattgttttattctgttcttacattgtttgtggtaccttgcacatataaagtctaagctaatatttttaaaggaaaataaatgttgctgactcattagacttaatattgaaattgcagctatgaactatagcctgacacctccatgaatataagttgttctctttgtataaagtttagattagtgatttttgtaaataattcattatgtacctgagtcttacatcgtcagctaagattcaggaagacttcagcctttttgttcagatcccaaagtggcagaagtgctaggtttcttttttgaagctgctccatgtttcatatgctttcattttactgtggggttaagctgggaattaaaaaaaaaaaaacttatttaggtagttttgacaatctaaacttaatgcctacattttacaaagagatatttattgttaaaatgaaactgaagggtgttttgaaatatgttcagcttttcatggagcatggatttttttttggatcatatcaagcagaataagaaaccaaaaccagaccactgttgagaagactaaccaaggaatgttgcaccaccttgacaatagacactaaattatatgttttatagagcagccaatgaagccctagaaagtaacccatttgtctaatattaaagatgcccatggcagcataatttccacagctttttacaaatagaaaatgagaatataaacaagttaaaaaagtctctaatgatagtaccttcatgtagtattagacatttgggcattctttttcttcctttatttctgtgccattatgcatattgtaattttttccaaatttattagaaatgatttgtatcatttcagctaacagtattttgaataattatagcaaaacagtgtttatagcacaagtctggatgtatgaattaccaaataatagtattgaagaatacaactagcaattctttacccaaaagtttaacagatagtgaatttgttactcttattagcagaaagcctgaaaatattcatcttctaatttgtctttgcaccacatgataaaacaatgtttgggttttttccctcgtctctttgttttatcctagagaagtaaaatgtctttaaatttgcctagaaggaaataagaaaagcatttatttgtataaatcctagctagcccttgggattttatttccattgagtaaagaaatgagtttaaaatttagtatgatcattatcctaactccatttggcctgccagaggatatggacttcgcaaagcagttaattataattactttaagtagaaattctccatctaaatcctagctacatttcatgaggacaggctcttaatgatcttctgaacttatttttgaaaacagaagcaagtacaggtgggacctacagccaacaatataatgcaggataattgatgtaaatcttcttgggatattccttctgttatccattactgttacacatggtcaaaggccagtcgtcctaaataatattggcagcttgtgacacttaaagctaagactgctgcagggccagaggctgttggttctgccttagagctcatgccaagccagtttgtaccagataccttccagttcacattttgctgtgtttccatctacattcccaaagcataaaagcaatttgttccaattgtgttcttttcttaaagtgttctctaaccataaatcatttattagaaaattgaaagttaactttagtgtttttgactaccttttgttttgttttgttttgaagacaaaaggacaagatatttttcagagaagtatacttgggcacattctacctgaagcaatggtttgttacttagaaaattatgaacctgaaaagttttctgagatttttctaggagaatttgatactccagaagcaatctggagcagtgaaatgaggtaaataaccagttgactgattgatttgtattttataattaagtctttgctgctcgccatctgctttgacttctgttaaaaga

SEQ ID NO: 30581 - DNA, 2300 bp, Homo sapien
ttttcacaaggagtgctttgtatattcataccagtttgtttgtattatagttaagtggcagagttctaacctagtcttatttaaaagccaaatcatgtcagagtctcccagaatataattaggttgaggggggtaaccctaaggtctagaggtagagtgaaattactaccttacactttagatttttgagctatatttggattgtttatttgataaaggtcttagcctgagggttaggggtggggatgggaatgaaaacaaagtaaacctaaaaagctctaacaccttacattttgccttttaagacttattgttccttagaggtcctccacttacttcatgtcacagatgtttagaaccagttatcagagacttaaaattgacagtaaacaacagtgtatatcggttttctgaagttaaataatttcaaacatctcctggaagtaaaccattttattcttattctctaggttctgagagtgaatgcattgggcactttaagttgatattttctcttctccgagttcatggagctggtcaagtgcagcagttggctttagaggtaaaagcgttttgtactaaagcgtgttgcctttcctaccacttaccatgtgtaatttgagtctctatcagtcattgtctgaagttgaagtgtgcttttttgttgcatcattttgcctattaagacacatcaatattttttgaaatttgaattaacatgctcaatttgaagagtgaatattgcacaattgcacaatgtcgttctaagtggttctctttctgttatgcgttagggcttgggatagtgttgtacagtgtcaggtatgagttaagaatgggctttactggggaagcttagaagccacacatcagcaagaagatgatagagggtttctgattgctgtgttcctatggagagacatactgaggccatatctgttggctacatactgtgggtttgcatttcagaggagtgatccttgtccctcccccgcagttgaaactcccttcttacaaatctagtacaagagctaccttttctgtgagggttacagacagacacctgggtatgctgctgttataggagttgcctaaaaaggccaactgccagaacccatgggtcttaagagtccaagagaagttggagtccccttgttcaggatattgaagccactggtcccataggatgctgtttagatgtagccttttcttctgagagaagcaagaagtccctagtcacaagtagttctttgcccaggcaaccgagacttcccaggattatttctgagatcttgctctttgtgacacacagtttattgcaaagaacaccaaatgcaaccctgcagtaacaggtatatagatggtttatgaataatttgtgtaacatgttcttagataacattttggcttaaaacagatttttaatagaataaaaaaactttaaattggtcaaagagcttaacaagcaagttatttaaatcgaaaaacatgttttcctacttaattccttcaagcatcttgtaactttttaaataaacgtcattaaatgtaggatatgttgcactgagacgctgaccaatgatgtttagatgtatactctcaaagatgtgagtggtcatcctttctgaaagaaaaacatacctatttctttataatagaaacataaccccaatctattgtgcagggtactgaagacatttgcttttttcctctaaaagtaagagtcccagtagtgagaatcattattttcctaatcaccagcccctatccaaactctgtaattggaaaacactatagtatataccttagttctggagcatgtatgggtataggattgaaggcttcttagaaacctcaaggtattatttccaaagagattaataaaggcaatcttttaaaattaaactcttatctaaaaactaaatgtttcatcccccaaacatttgtctcacttgtacagtctatatgacctaatttgatttaggttcaaaattatttctgaaacttttactatcctgttgattaattttcaggttgtgaatatagtgacatctaaccaagactgtgtcaacaatattgctgaatcaatggttttgtccagtttattggctcttctacattcattgccatcaagtatgtatacagatggaattttggaaaccacagcaagattagcccatggaaaggagttgttgcatagttgatacaaaacctcaaacaaatgtcatctatgtttagttttaaagtgttatttacactagatttgtcttcctaataatgttttacatacgttactgtct

SEQ ID NO: 30582 - DNA, 2300 bp, Homo sapien
gctgaatcaatggttttgtccagtttattggctcttctacattcattgccatcaagtatgtatacagatggaattttggaaaccacagcaagattagcccatggaaaggagttgttgcatagttgatacaaaacctcaaacaaatgtcatctatgtttagttttaaagtgttatttacactagatttgtcttcctaataatgttttacatacgttactgtcttgcatttcctatgtcaaaagttgaaagttgggggtgagagaggtccaaaaccaaaggaaaataacctgggattttcagtttgttgagatctacacatgggtaattgagaattaactaatatttcatggtttactaaacataagtaatcttggatgatagaaaacatgcttaagatacagatggccttgtattcagcttagtgttcaaatctgtgtactttgtcttttgctgatttgatattaataagataaaataccaaggtggtttaaaaaatatatcaaccttatttcctgaacacagcctgccctaatctatataattacctagtctaatagtttatagttgtgctaaaaccaaccctgagattgcttttcaaaggcaggaatattgagtttgtaggcaattacaatataacttcaaactcagcaataaccagaatacattgcttagttggctttgccaatccctttgaagtcacattaatctagaattcatgtctgtccacctccttaagagaaggaaccgtgtcgttcatcttatataccagtggcttgcttatgtttggtgtttatgtttggtaaattgagttgaatttccatggaaatttttttttttcaatacatgatatgcttgaaacaggtctttaaaatggcagctttgtaaagtcatttgcagattgtttttatcatacctgcaaccttagttggtttttcttttttcttggttttcagtagctttgtgagacttcaaacaatgtaaaactaaactggttggtgaagtaaaggatgttatggaactcataatttttaaaagtgtaactttatacttatatagtccagtcaatattttagtcttacagggaaaatagctggcatccagatattttagcctactctctatcattaagacttcagactaaattatcttacactgtttgctaaggtacattgttactgttcttgttgttttcatctcagcctaatactttgcagcctctaccttatttgccaacactttattcctttggcaacctgtctgtcattcccatttgactctagaagagttaagtccagtaacctatacttgcatataatatggtagtgactgggtgagaggcacacaggctttgtccagaaggatgcaattatgtcttagaatggaacccggtcttacaactgctacttcctactttttccctcaagacagtagcaccaggtaaaaatcttagatgcctgattagagtgtcctctgggtgtcaggaaatcagatttttggatgtgcagtgcacaatgaggtaggaagacagggttttatagtggttatgaatatggactttggaggcagacctgcatacaaaactcaactataccacttattagctgtgagaccttgggccggttaaactgggcatcagcttcctcactcataacatggccatgaaaatacctgtctcactggttattatgaggattaaatatgacatcctgtgtagaacatctagttaagtgcctggcacagagctggtgccaagtaaatataagctaacctgatgatgcattccttgaaatgtcttttactctgcaggtcgtcagcttgttctggaaactctttatgctttgacatcgagtacaaaaataatcaaagaagcaatggcaaagggtaatgtatagagtgctttcttagctagtcatgtgcaatataatgaagcttattttgagctgcattttacagcctgataaactagaagaatgctttggaatgtttacagtttttaaaaactacattcagttgaaatatggttgaaaatgaattctgattagaaaagtcaaattctttataagcactaattatctttttccttcataggtgctttgatctatttactggatatgttctgcaattcaacacatccacaggttcgagcccaaacagcagaactttttgccaaaatgacagcagataaactgataggtccaaaggtaggcacaaaataagttcttgaaaggaaattaattattaaagcattgttactttgatactgatttcaagaagtttactgaaatctgagatggtgagga

SEQ ID NO: 30583 - DNA, 2300 bp, Homo sapien
cgttctgagcaaaactcttgctttatgaatcacagatcactgacttaatgagtctgggtaacttgtctgtctttagctccacagtgaaaaaattgaaataaatggcctttaaatcccgctctaacttttaggtgcttctttgacatgtaatttctctggtctttgtgagaatgagctactaggggcagatataccacagtgagcaggtcaagcattgttcttacactcagggagctcatgaccaagaagaaggacatacttaatcactttgtctaccttctcttgtcctctgtagagtttaattatatttcagcacaatactctcatcatatttagggaatataggaagaaataagcctgtgaaacctcttgttgagtttaccttgatggtattatttaatatataacaaatgcccttccatgggaaccccaggagaaattgcttttttcctccagaaacagttgggtgtctctgaagcaactgacatgattttattttgtgggtgttctgttatgtaattgaaatttagttcattggctgctaggaaattcagagctaaatttgtagtatatctctggcagttatggaggttttatgtttctttcgtgtgctgacttcatattagtcttcatttattcaagtatttaagcatctgttatgtgccaggggctgagaatacaagcaatgagtaagaaagattgggcctagagggtttccgtaagataagatttgagcccagaatttgacacggagaagagataaacgtgacgatctgaaggaaaaacactttcccaaccctcatttttccctttgccccatgcctcacatgaattttcattttgtctgtatgtatgtgctagatgtattttttaaaagctgctttttaaatcctttctggaaaaagacacagtgtaacataaaacatgcagcaaaataaatgcactagaaaatacttgtaagacagaggtagaatgagaaaaattagtttgtgtgggcaggggctataaaagagagttggaagggacaagcctggctaagggcattctgcatattgtaaggcaagacctatgaggtgtgctctgggaactttaccatactagtgatacggaggcagggggtgaaaatgaaacttttttggtcaccatggcagaacagagaaaatgaaacttgataggtaagtaggttcaggtcgtactgagtcttatttaaaggtacctttgcataaaccgaggattatctttttcactccagaacttttaggtaatggttatggcccacataagtcataacacaaattatgttgatattctatcttattagcaaaatacaaacaaaatattgaggtgtttccaataggtgtctttttcattctcaaacttcctcgtataggttcgaattacgttaatgaaatttctaccaagcgttttcatggatgctatgagagacaatcctgaagctgctgtacatatttttgaaggaactcatgaaaatcctgagttaatttggaatgataattccagagataaagtgtccacaacagttagggaaatgatgctagagtaagtaaaaacaaaggtaataatttatagcctttaaataaaatcactgggaagggcaaacatttcttactgtgcccatcacctctaaaacttatgctaaaggttaatgaaaatgtatttgtgactgaagtttggtatccatccctttttttccccaaggcactttaaaaatcagcaggacaaccctgaggcaaactggaaggtaaaatatacttttattttacatcttattttctgttgatttagttgttttcactttctactgagtcagtttaatgccgacctataactactttgtcatcaagactcttgggtattcccctggaaaataaggcttcaaacataaaaattggaatacttactttcgaagttagtaagggcaccctttctgaactttattaagaaaaaataaaactcataatttgattatattatggctgtttgtggactggttaacattataaacaattctttaatatggtgtgcatttctagcttcaagattattaagtgacttgactgtggttctttctctatttaaagttgcctgaagattttgctgtggtgtttggagaagcagagggtgaacttgctgttggaggagtcttcttgaggatctttattgcacaaccagcctgggttctaagaaagcctagagaatttcttattgccctgttagaaaaattaactgagctcctagagaagaacaatcctcatgtaagcttcagtcaaaagcaaaac

SEQ ID NO: 30584 - DNA, 2300 bp, Homo sapien
agcctgggttctaagaaagcctagagaatttcttattgccctgttagaaaaattaactgagctcctagagaagaacaatcctcatgtaagcttcagtcaaaagcaaaacatttcaaagacttggctaactagactgatggtgtttctcttacaaccttattcacaaagaccatgaattaggaattggccagctctttcaatatagcagccacatttaaattcacatatgcccctcgatcatttttttgccatgttcaaaagtgaagctctttagtatgtttatgaaccaaagttatagagatatctatattgagaggatgctatttctaacagttacagaagcctgaaaagaaggtttttactgtccatctctaatgaatatgtaattttaaggagaaacctgtgtgttcggtgttcctctgagagtgtgttctgtttgggcatgtgctgcactctactttgtgtatatggcagggataaccctagtcaaagaaattgacagaagagtagtaactatgtggttgaatcctgtatctgtggctgaggctgccaggaaagcaggagtgagtgaaaaggtaactttggtcttgggtttggcaagccaaataccgtgatagtatataagattttgtttttcaaagtcttttttgttttcagaaggtttaagattttgttgagattgaagacagttgacctacatgattgttgtttaaacaggctggctacagaataaggtgattaagagcctgagtggtgttatttgatggttccagccataccactgaccaggtctgtgaccttgggcagtacctcatgactctgcctcagttgctgcatttatagaatagtcatagcagctgcctctgaggcagaggttctgatgagttaatacatatatagaatgcttaacataatgtctggcacatttcaagtgcttagaaattagttactatcattagcttagtaaaacatatttttaaaacatgattagcttgctgagtatttaccagtgctactttccatagtcatattcctccaataggatttctactacatacatagtttgcttggaaaatgcagtcctcaaaagctaaaacttagggaaagcacatagcagtttcctcctatatcacctttctttttggacacattccaattttaatgttaatttaagatgcattttattatgtttctggatgtgtgcatctagtggtataagctgaaggtctttccaatccgttatccacaatagaaagtgctttgtgggagccagacatgttaaatagtaggatttttaatgaaactgggaaaaacatttcactagttctgcattcttctggattattgttctgacactaacatacctgcaacatggtctaaaaatttctagtaatatcatttgggacatgatctcttaaacctgcaatagaggctgggcgcggtggctcacgcctgtaataccagcactttgggaggccaaggcgggcggatcacctgaggtcaggagttcgagaccagcctcaacatggagaaaccccgtctctactaaaaaaaatacaaaattagccaggcgtggtggtgcatgcctgtaatcccagctacttgggaggctgaggcaggagaattgcttgaacctgggaggcagaggttgtggtgagccgagatcgcgccattgcactccagcctgggcaacaagagcgaaactccgtctcaaaaaaaacctgcaatagaaattgggtatacctaaccgagtaaaatcctgcttagattaaaatagcatattcttaaagtcctttagattcatgccttttatgaaagaaaatgggaagttcgttgttctcttaggattagtgaatctgttttcaagtatcagcacttagaacttttgaatccctagttttgaacaccaaatacattaccttggatatttagggctgtatgagtattttatagttgatttatttttgttttacacctgcagggagaaactctggaaaccttgacaatggcaacagtgtgtctcttcagcgcacaacctcagctggcagatcaggtcccgccattgggccatcttcccaaagttatccaggcaatgaatcataggaacaatgccattcctaagagtgccattcgggttatccatgccttgtctgaaaatgaggtattgatgaatacacttagtagtttataagctccagaatttatctatgctcccttcttgacggatataagttgtagtattatataaatcccctttctgccatgtgtctttttgcatacgaaccacatggtattttatt

SEQ ID NO: 30585 - DNA, 2300 bp, Homo sapien
tcagtgagctggtggtgattgggcaaagacttgaaagagaagaggaagtgagctttgcaattactaagacagagcacattccagcagacagaagagccagcacaaaagccctgataggattgtgactggtatgctctcaaacagcaagaagctgggtatggcagaacaagtaggcaaaggggtgagtagtgtgaaatgaggtcagagagacaatgagggatggaggcagaccttgtgggatcttgtagactactatgagagttcatgatgaagcaattgcaatagaagcaaaaattgacaaatgggacctaattaaactgaagagcttctgcacagcaaaagaaactatcaacagagtaaagagacaacttacagaatgggagaaaatctttgcaaactatgcatctgacaaaggtctaatatccagcatctataagaaatttaaatttacaattaaaaacaaccctattaaaaagtgggcaaaggatgtgaacagacagttctcaaaagaagacatacataccgccaacaatcatatgaaaaaaagctaaacatcactgatcattagagaaatgcaaatcaaaatcacaatgagataccatctcacaccagtcaaaatggctattattaaaaactcaaaaaattacagctgctggtgaggttgtgaagaaaaaggagcacttacaaactgttggtgggagtgtagaaaacagtgtggcaattcctcaaagacctaaagacagaaatatcattcgagccaacaattccattactgggtatatacccaaaggaatataaattattctattataaagacacatgcatgcatatgtccattgcagcactatgcacaatagcaaagacatggaatcaacctaaatatttgcccatcaatgatagactggacaaagaaaatgtggtacatatacagcatggaatactatgtagccataaaaaagaatgagatcatgttctttgcaggcacgtggatggagctggagaccattatccttagcaaactaacaaagggacagaaagctaaatactgcatgttctcacttataagtgggagctaagatgagaacacatggacacatggagggaaacacactggggcctatcaaagggtagagggtggtagagaaagaggatcaggaaaaataactaatgggtactaggctcaatacctgggtgataaaataatctgcacaacaaacccccatgatacatgtttacctgtgtaacaaacttgcatgtgtacccctgaacttaaaagtttttttttaaaaaagagaaaaatagaaaaaatggcatgggtctgaaataatttctgcaggtggagactgagcctggccttgcatgaaaaaatagataactgccatgcaaatttgaggaaagccaagttcaaatagaccatgagggccaaatcagcataaatttctcttctttctctaacttacttgtgtggaaatgtggaaaaaataaacagcctcccagactgaaggattttgaaggttcatattctagctttgggaaaaaaggtaacaagaaagcaagagagtttaaagccatgggaaaatactctgggacaaggatagagaaagtacagtgaagccaggaagactctagtagtttaaataaatattaaatgatgtggcataaaaatgttaaattctattgcaaatacctaatgattacttataatttaatctttgataatttagtcttcaaaaagatattttccttggttaaaatcatatttgctttcttccttaggcaaaataactttagagagtatttctctagatgctacctacaagtgctgcctagatgccctcaggtggattctccttctggttcagcagtcagtagctcagctgcaggcactttcttgtcccctttgactaagtggaaactatgaaaggtctatagtttttgaaaaaagatggattttctcaaatttgtaacctaaaccacttaagaagttgaatttaacttcacagatggttttacaggaaataaaatatcaagtgctcacaaggttaaatttcaggaaagccttcttggatacaagataaaggcggggtgtaaagtgaaaacaaaagtagctggagttaggtcatttgattttatactctgtactcaagactgctcctctctgccgactacaacaggttggtactttatttcttttcttattctgacttgaatatttttttaagcccaaagatcttgtatatttacttatatagatggagtcttgatgcataaaagtttaaatgcttacttgtaaaaaaaaa

SEQ ID NO: 30586 - DNA, 2300 bp, Homo sapien
atttctttcttgccctttcatattttaagatggctggaatagcacaggtaattaattgttttaaacgtgtgtttcgccattatttaccagtgtactgttgacaatgttttccagtcttccgggttttatattctttatccttagatcatttggcttatcataatgacaggtatcagacataggtaaaatataaatccagaatttacagaataggaatttggcaaggaaaaaatttgagtagcaaaatgtattatcagttttttgtataataaacttacaagatggatggaggaagaatgacataatgttaaaaaggattagtaaggattagtcatttcctgaatatccagtgtgagaaaaagctaaaatcttttgatgatctctgcctcagactatgaaaccatttattagttagggttgatgatgagggaagaattatctttatacttcccagaggctagcacagtatctagtatacagtaacctcttaaaatgtttttgagtaagtagatgagtaagatttttttattttcatcgtcatatttgtgtgattaattttgaaagataatagagcataaatttagggtttttttctaattacattgtaatctaaacaaatggcttcttctttatactaatccagttttcaggcactttgaatcttggagatttaagaaattgagatgcttcatcaatagcaaggggctagggtttagaagaaaaacaggtaaataagtttagaagtgaaaaataatgggaaaagaaggattaaggaaaattatgataatttattttctgtcctcagagttcatgctatccatgaacaactgaaatagttgtgttacatctcatcttgtaccctgagttaatcatgttaaaagaatgggtttctcaaaatgggtatgtctctgtgtttgacagtttccacaaataagataccaaataggctttaaatttgaaatggcttttcatttccaataaaagtttgacatggattatgattgacattaaaatgtacaacataggccaggcacggtggctcacgcctgtaatcccagcactttgggaggccgaggtgggtggatcacctgaggtcaggagttcgagaccagcctggccaacatggtgaaaccccgtatctactaaaaataaaaaattagccaggtgtggcggcatgtgggcctgtagtcccagctactcaggaggctgaggcaggagaattgcttgaacctgggaggtggaggttgcactgagctgagatcatgccactgcactccagcctgggcgacagagtgaggctccatctcaaaaaaataatgtacaacataaactatatatactgtacatgtagtagctttggagatggtcataaacattccaatctaattggaaatataaaattgaatatgatggaagaactattacagtgttttatttattacagtgttttattatataaggaattatataaagaagacacagtgatgtttgtttttagggaagaggaaggagtttattatgttgaaagtacagaaatggagaattatcaaagaaacactgattagcattcaactaacactgtttgaaagagacagttttacctgcattagggacccaaaaatgagataaaatgttcttagagatcgtctcattgtcttccttttgattttatagttttttaaatcttatttttgtttctttagattttcccccattatgaaggagggtagtgatctttagaggtgaaataacttgcagacttggtatctttggtaactgctgagatcatttgcaagtttgatttgattataaattagaattatgttaggatgagagtatgtgaactgtatgatatgagtatgactctttagaagggtgtaattacccctgcatgtacattaatatcgtcgatagtctgttttacgtcttcataccctgtgagtataatgtcacatataactgagaaactggaaagattgattggattgttgaaggacggttttcaatgaattttaattgttctatgtttatttatagggagtatatagcagatatcttctgggaaataattcatctgaggatagctttttatttgccaatattgtgcaacctctggcagaaactggactacaactctccaaacggtaaggaaaacagattccttggctaactcaaattagagcctttattgggtatgtgaaggttatacactttaggggagtagggattatttttattgcatacaccaggattgctgctgccaatcacaatagatttttggtaaatctcttctatgccta

SEQ ID NO: 30587 - DNA, 2300 bp, Homo sapien
tggcagagacacaacaaaaaaagagaattttagaccaatatccctaatgaacatcgatgcaaaaatcctcaataaaatactggcaaacggaatccagcagcacatcaaaaagcttatccaccatgaccaagtgggcttcatccctgggatgcaaggctggttcaacatacgcaaatcagtaaacataatccagcatagaaacagaaccaaagacaaaaaccacatgattatctcaagagatgcagaaaaggctttagacaaaattcaacaacccttcatgctaaaaactctcaataaattaggtatcgatgggacgtatctcaaaataataagagctatctatgacaaacccacagccaatatcatactgaatggacaaaaactggaagcattcactttgaaaactggcacaagatagggatgccctctctcaccactcctattcaacatagtgttggaagttctggccaggcaatcaggcaggagaaagaaataaagggtattcaattaggaaaagaggaagtcaaattgtccctgtttgcagatgacatgactgtatatctagaaaacgctgtcgtctcagcccaaaatctccttaagctgataagcaacttcagcaaagtctcaggatacaaaatcaatgtgcaaaaatcacaagcattcatatataccaataacagacagagagccaaatcatgagtgaactcccattcacaattgcttcaaagagaataaaatacctaggaatccaacttacaagggatgtgaaggatctcttcaaggagaactacaaaccactgctcaatgaaataaaagaggacacaaacaaatggaagaacattccatgctcatggataggaagaatcaatattgtgaaaatggccatactgcccaaggtaatttatagattcaatgccatccccatcaagctaccaatgactttcttcacagaattggaaaaaactgctttaaagttcatatggaaccaagaaagagcccgcattgccaagtcaattctaagccaaaagaacaaagctggaggcatcatgctacctgacttcaaactataatctttttctttaagcataaattggatcatacgctatatactattctacaaattgattttttggccatatgtacagccaaatgaacataagaaatgaacaaaagaatgtcctgtattcttaatatgaagatatatattccctttgggcggccaaggcgggcggatcatgaggtcaggaggtcgagaccatcctggcgaacatggtgaaaccctgtctctagtaaaaatacaaaaaaaattagccgggcgtggtggcgagcacctgtagtcccagctattcgggaggctgaggcaggagaatggtgtgaacccgggaggcggagcttgcagtgagcagagatcgcgccactgcactccagcctgggagacagagcgagactccgtctcaaaaaaaaaaaaaaatacatatatatatattcccttgatacatactgttacaaggtagaatgagggaagctttctgttttattggttccacattacatgattgttttatgttgctatataatggtggattttatatttataaaactaacagtatcttttataacaattatgctttgtatctacaacatgaaataacttttaaaagtaccatggatggagtagtacatttgttatacagttagattaattactaaagtaaatgtttaatgatgcataacatggattattaaaatataagtaattcactataattcctttttatcacaattacttccagttgagaagttttaactgcttttgcatctgctcattagcagagatattaaggctgtgtaaagtaaaatgagaaggactgatggccagcgatggaaccagaggacttagctctatataatcaaggctaattggctattttataaatgagatatgccactgtgggtaaagacctgaaattgacttttgatggaaaacatgattttgaatgtgttcaatgttatttatttctttattatacttgttttaagttttaatgtgttacagacctctttatttttaattacagtgtcgagttatagcagtgctggattgggagctgtcaaccattggtcatcctttgtcagacttagctcatttttccctgttctacttttggccaaggacagttccaatgataaatcaaggttcttatagtgaaaactcaggtataaaaacataatgttgtctaaattgctattaatataaaactgtctttattactttcataattaaaatataaatcttgcaa

SEQ ID NO: 30588 - DNA, 2300 bp, Homo sapien
aaatgtttctgctatccttagcccttcgctcttacacataaaatttaggagcactttttcaaattagagaaaaaaattaggattttgattgtcattgctttgaatcaatagatcaactggaagaaaaaagtttgcaatattgaatattcctattcaacaacatggcatctctcaatttttaaaattctttttaaggtcctaataaaagttttatcatttctctacaaaggtattgcacatcttttacttaggtaatttatatttttgatgctcctgtaagtttttgaaaattacattttaactgttgctaaagtagagaaatgcagttgatttctgtacactgaactttgatagtcttttactgtctatgtagattattggctctttaatccatgaatcacttaatttataaacatgtatttgttagctatcttctgttaaacttttggtattaaaaaaacacatattccttttttttttttttttttttgagtctcactctgtcacctaggctggagcatggtggtgcaatcttggctcactgcaacctccctctcctggttcaagcgattctcctgcctcagcatcccaagtagctgggactacaggcacgtgccaccacgcccggctaatttttgtatctttagtagagatgggggtttcaccatgttggccaggctggtcttgaactcctgacctcaagtgatccacgtgcctcggcctcccaaagtgctgggattacaagtgtgagtcactgcacctggccaaaacacacattttcaaaatataaagattgattcttttgagtttctgagacttccttcatggcctatgtgttttcaatttttataaactttttcatgtgtcctagaaatgaatgtgtgttctctgtgggatccagagttccatatatatttattaaaccaagcttatacaacatttctggaagcaatttttataccacaactaatttacaactaatttcattttttgaacacggttatggtttaacattcagcttggttcagaattaagtatctttcagttatgtacctcttcaacactcctacaatatgaacgttactatctcctttttgccaaagcaggactagatgttcaaagggtaacttgtccaaattccacagcaattgaaatagttgaaatttgaactttgatctgtttcagtttgttacaacacaaggcttctagcctagaaatctcagctattctttattccacctttcccttcatcttccaatatctattgggacatgggacctttaaattctacaccctaaaatgttccctgatccatctcatttattattattttcattttcaccaaaatcagtagtcaaagaatataaatgctagtgataaaataccactagcacactatgttgttgcaatttttacgccctttcacctatattacggtatttcatttcattaataagactaatcaaaataggtattacaacttaggaaactagttctcagagtgtttatgtaacatatttaaactcccagacagcaagtgacagatccagttttctgaatgataggactctttctgtagccctgtattagtaacaatgttatttttagaataaagttttaagaatgtattatctattgtaaaacatcagactaaagccagattcccggtggggaacgctactctcaggatcctctcactcagttccattacctcacttcaaaaaacctgaggcccaaagtggtgctgtgacctcctaagtggaaaagctagtactcgaattcggatcctccatctggtgtcattaactcagcctcccggaatacggccaatcaaacggaattacaccagcttctcagaaaaagatctaatggctgtatcacaaaagaaggcatctatttctcagaatttgtagccttaattgccttggtgaatcctcaagggacataaatccatcctttaacaaagattcctttggatagtagaatggtgaacgttattgcgcttccattaccgccctccaattgggaagcccccagcatcgaattcggagggccggcaatagcagctcatgcctgtagggtgcgtccactgactgcaggaaaagcaatcagggtgggagaaacttaggaaaccacccagggccaaaggaaggaaaactcaatgtacaaatttttttccgctggaggcaaaggctgacatccatacctgtactgggcaatggtcagcgtagcctcacgttcggccccaaagccagacaagtgctggtttaggtaggcctccagggacttgctgtcgaact

SEQ ID NO: 30589 - DNA, 2300 bp, Homo sapien
agtttctgagacttccttcatggcctatgtgttttcaatttttataaactttttcatgtgtcctagaaatgaatgtgtgttctctgtgggatccagagttccatatatatttattaaaccaagcttatacaacatttctggaagcaatttttataccacaactaatttacaactaatttcattttttgaacacggttatggtttaacattcagcttggttcagaattaagtatctttcagttatgtacctcttcaacactcctacaatatgaacgttactatctcctttttgccaaagcaggactagatgttcaaagggtaacttgtccaaattccacagcaattgaaatagttgaaatttgaactttgatctgtttcagtttgttacaacacaaggcttctagcctagaaatctcagctattctttattccacctttcccttcatcttccaatatctattgggacatgggacctttaaattctacaccctaaaatgttccctgatccatctcatttattattattttcattttcaccaaaatcagtagtcaaagaatataaatgctagtgataaaataccactagcacactatgttgttgcaatttttacgccctttcacctatattacggtatttcatttcattaataagactaatcaaaataggtattacaacttaggaaactagttctcagagtgtttatgtaacatatttaaactcccagacagcaagtgacagatccagttttctgaatgataggactctttctgtagccctgtattagtaacaatgttatttttagaataaagttttaagaatgtattatctattgtaaaacatcagactaaagccagattcccggtggggaacgctactctcaggatcctctcactcagttccattacctcacttcaaaaaacctgaggcccaaagtggtgctgtgacctcctaagtggaaaagctagtactcgaattcggatcctccatctggtgtcattaactcagcctcccggaatacggccaatcaaacggaattacaccagcttctcagaaaaagatctaatggctgtatcacaaaagaaggcatctatttctcagaatttgtagccttaattgccttggtgaatcctcaagggacataaatccatcctttaacaaagattcctttggatagtagaatggtgaacgttattgcgcttccattaccgccctccaattgggaagcccccagcatcgaattcggagggccggcaatagcagctcatgcctgtagggtgcgtccactgactgcaggaaaagcaatcagggtgggagaaacttaggaaaccacccagggccaaaggaaggaaaactcaatgtacaaatttttttccgctggaggcaaaggctgacatccatacctgtactgggcaatggtcagcgtagcctcacgttcggccccaaagccagacaagtgctggtttaggtaggcctccagggacttgctgtcgaacttgtgctggggcagcacttcggccaaatcggactcgccagtagcacctggcttcatgatcacccccgcaggccacagcaacgcggcatccacaggtctcgagtgccgaagtccttcaggattggggcaacgtcccctctagagcatgggccgaggccggggtggggtctggctccagccaaccgcacacagcctacgcgccgttgctgagcaacgcttgcccgctgaatcccgaggttttagctctagtcaagtgccaaaagagcccaatgtgtgttcgggtttcaattctccagtcagcgtcagagttggaggcctcaattttaaagaaggcaaagccatggtcatcgttgcgggtaaggaacaacgcagaagcctcttccacccccaaatttaatgcaacagcaggcggaagacctgcagggtcccgttcagaaaaagggccgtcagactgtcgagcctaagaataaaaagaccctgtttctcttagatacccggttagcaaggcaacatcgctggcctcctgccctggacacttatcaccccggtgctgctgcggccgggtttagccggcccagcgaggaaggaagccgaaagagccaggtttttgatgagggggagcgatgtctgcgacgcaccggaagcggctccgaggaaggcctgtgggagtctcggagacgtgtctgtctgtgaggcgctgggtgcacgtccccagggctctgggctaggaaggcagcggcgaggtgcctccccacgtacccctcgcgggcccagccgagcaacgtggggcgaaggcggcggcgaagg

SEQ ID NO: 30590 - DNA, 2300 bp, Homo sapien
caatggtgcaaatcagatagaaaatactacatatttagacttgagttctgaaagttttgttataattacaatgtcaagggatcatctcatattaaataatgtctgaaagacaacttaaattcatgacccatattcctctgcttttcattctggagggaaaatttcaaagtcttcatttgtaaaattttaaaatgttttaaaaatgtcaaatagtttccacttattctgattagagatgtcagttcatgcttatttaatctctaaaaattctggaccattaaccgttcatatttggcaacacagttaaaacagtgcaccctaagacttctactgcggctttatatatcacaaactaaaaccttttttaaaaatcaaaactgttatgctctttaaaggaaaaaagcaacaataaaatcttccttatctactttaacactatacaatttttagctacacgacttaattgtttttactggggagacggttcatgagaattttacattaagacaaatctaatgcaagacaggccttattatttactaccaaggcatgaacctgaggtggctctctaagcctcaattttctcacttatataatgggggtaaaatagtagcaatctcatagggttttggtgggaggagacaatgcatgtaaagtgcttacacagtgaaagctcaataactgcttgctactaaatgcacctagcaataaaatcttgtataaggcttgccatgtacaagcgctactctaagacctttatacatactgattttttcaatccccacaactatgacagagatagatattactattatcttcattgtacaggtgagaagctgaagcggaaagtttcacaacttgccaaaggttaggcagttacgaagagagtagttagatttgaattgcaatcagtctggcggtagagtccttacccttaaccattgcactatattccatctgctgaattgataagctttgttaggaaagaagaaaagagaggcctgggcagtcttggtaatgtcgaatggtttgagatgttaaggagcacccgaatatctcagaatagagctaaccccgctctcccccgccccgaccccatttaagatgcattgataagcctttaatgaaactcaaagtttaccttagcaggtttaatatttgatctcatcttctgaaagttcttactatcagtcttatacacagcgaggcggactaattaagaggcaagggtgataggaaactggacacacgtcctcagcaggcacaggagcagcaccatatggctgactcactggaggtttttaaaaaagagaaagaatatcttccgatcagtactaagatgtggccttgcccatttgggaacaggattcgcagaccaagaaaagggtggcgggcgtccccatgagcgggacgtgggaagcgcctcacttctgacctcacggagcctgacctcgtcccccgcgcctgcctccgaccggcgacgcaggttacctgtagggattcgaatccaccacctctgagctcatcttctcgatgcggacccggccgccccctccgtcgccgctcctcgggacctgcagactcctctcctgggcaagttcccgctccagctcctggacccgctgctgcaggcgctccacagactccgccatggctgggactccggccgccaacgctcccagcccgggccttcgccgccgccttcgccccacgttgctcggctgggcccgcgaggggtacgtggggaggcacctcgccgctgccttcctagcccagagccctggggacgtgcacccagcgcctcacagacagacacgtctccgagactcccacaggccttcctcggagccgcttccggtgcgtcgcagacatcgctccccctcatcaaaaacctggctctttcggcttccttcctcgctgggccggctaaacccggccgcagcagcaccggggtgataagtgtccagggcaggaggccagcgatgttgccttgctaaccgggtatctaagagaaacagggtctttttattcttaggctcgacagtctgacggccctttttctgaacgggaccctgcaggtcttccgcctgctgttgcattaaatttgggggtggaagaggcttctgcgttgttccttacccgcaacgatgaccatggctttgccttctttaaaattgaggcctccaactctgacgctgactggagaattgaaacccgaacacacattgggctcttttggcacttgactagagctaaaacctcgggattcagcgggcaagcgttgctcagcaacggcgcgt

SEQ ID NO: 30591 - DNA, 2300 bp, Homo sapien
gaacagaacaaaggatgaaagaaacttctaacatgaaagaaataaaaatagcaacttggatagactatgtaagataaacacatccccctaaattatcattagtatccttagatgagagaagatatggtacaaatgatacaggaacaaggtgcaaagtatttagatgatcaggaattcttgcaaatggagatggtaatagaaatgaaaatcttaatagaagtgttggaaaataaagttgaaagaaatcatccagagaatagagcagaaaactaaaatagtagataactggagaaagaagataaaggacaaatccagatggttcaacttccaaataataggagttccagatagtccaggaaaaacaaaccaaacaaggaagtaaccagattcttcaaggacatttcccagaactgaaaatgtgagttttcattttgaaagagtccactaaaaactcagcacaagggatgagaacagattcacattaaggcacactgtgaaattttacaagctaggagacactggagcaataccttaaaatgttgaaagacaattctaactttagacttctttaccaagttaaactatcgattaagagtatatgtgtagcttcccacaattatatgccctttgctttgtcatttttataaagaatataattttgataaggaacattttcagaaatgaaagttctcaaaatttacctttgccgtaccctttgcaaaactactggaagatgttcttctaaccacagcaagagagtaagtttaaaaataattgatgacagtgttttaaactgtcatgtgcatcagaattactggagggcttgttaaagcaaattgttggactccacattcaagatttctgattcagtgggtgattatagggtagggcctaagaaattgcatttctattaaattctcaggtggtcctgttgttgatccatagacactttagaactagtgagctatagcatacaggaaacagtggattaatacagaataaagaaattaagagactttgtagtataatgatgaaggaagagcctaggaagggagctgtatgtgcagtaagtctagagacaatcatgtcagattctaggagatacatctttaagaagatgaaattgatagaatacctcatgaatatgaatgtatctagaggaactttagataactagtggaaagttggcggttgaatttgtgaaaatacataggaaattaagcatcaggagaaacatacttattaacttcagggttgggagttagaggaaagggtaagttttaatatattgcatggcccagttgtgaagagttaacatctaaccaagatgactatctaacaatattgggaagttggtgggatggaagatgtctgcgtgcagtggggatgaatgctaagagcaaaatctgattcacgtaattgactaaaactgaaaagaaataacaatgttagcatgttgtttaggaatatgatggtaatggacttaaaagtgagggagaggaaaatgggggtggaggctgaatttcctaacaagcctggtggaactatttgactccttaaagtgaagatgaatgggaattaaccatagacttaaactgcagattaccagtaactagttaaagcacctcttagagtctttggcatacagtaggtgcttactaaaagtatacatcatctattgtgggcagaggcaacaagagaatggaattccagccatgaatttactctgatgatggagatctgagtgttaaaacattaaatatttacatattctaccaaagcatagaaaaatgttgaaatttaactttgacccttaacatttaagtagtagtcgcaatcttggctgcaaatcagaatacatagcttttaaaaaccaatcttgtttcatatgctacacttgggagagtttttttaaacggtgcctgggtaatttagtttcatctggtaaaaaccagcctgtaagcatcctcctctttgaaacgattagtaatgattatattttggtgtttattttctgtgatgatgtatgtctatttgtattactaatacctaaaagactgtaagctttaaaacatatttttctttgttttaagccgcttgatggcattgaaacgaatgggaattgtaagcgactatgaggtatgataaaccctttccaagtttttgtaagattaattcagtaaattaaaataacttctggtgacatatttgatgaagagctattaaccaacatatactattttatatttcacagaaaatccgtacctttgccgtagcaatagtaggtgttggtggagtag

SEQ ID NO: 30592 - DNA, 2300 bp, Homo sapien
aaagacggaatttaaagctacctcagttctttaaagggttggaaaaaggaataaaataaatttagttaacattttgtgttatgttcaaatgtgaagaaagccttcccctcaaatacacaataaaagttattttaatttttttaagttgctgataaaatctaaatgtagcatatttctttaatttaaaatgctgtgtgcatttttatggacctgatgtttatgtgtttacctatggggttgataaatatctgcaaattaattatattctattatttcttgaagcactttgagatatagtttactttctaaaatataatcattttcatgaaatagtttttaatgaattttagaatgtgttgccatgtggaaatatttgtatttgtaatcatcaagttaatttagtgtgatgcttaaaataatagttatctagattaaatgggaaaaaaggaagattttttaggaccctcatatattgtttcagaatcaaggattgcacctacttagtgattgcttttcatttttcatgtttgctgcagtacggatttgcccttttacgtagacgggctttacagttagaagagcttacattaggtaaggacacacctgataatgctcggaccctcaatgaactgggtgttctctactatcttcaaaataacctggagtgagtaccatggggttaataatgaaaataattaaccattttctctttgatgcaatgctgttttacatttttgtcaagtctaaagctagaaaaaaaatgataaaaaccacgcaaaatttcatgtatgatgttatataatgagcatacacatacctaaagaccatggcattttctctactgtgtttcttttcacactcttttttttttttttgagacggagtctcgctctgttgcccaggctggagtgcagtggtgtgatctcggctcactgcaacctccacctcccattcaagctattctcctgcctcagcctcctgagtaactgggactacaggcgcatgccaccacgcccgactaattttttgcatttttagtagagacagggtttcactgtgttagccaggatggtctcgatctcctgacctcgtgatctgcccgccttggcttcccaaagtgctaggattacaggcgtgagccaccacgcctggcccacattgtttcttaactgaaaagttattctgtagcttccctggtgtattttatatatttatgaaaagtgagtttgtgtagatattgtgcataagatctcacagaagcagcagcttgggactaatggtaaataatgtagacggtttctagttttgtcagtttatttgggcaaaaggattcaaaatgacatttatatttatatgttataaaaagtatttttggacttcatatatcagaaaaatataacaaatttgaaactttggatgtcagaaaagtataataaatctgtagcccacttacagaaacttatataaaaaataatgatttattcttttgttaaaaattatttagtactggctgggcatgatagctcatgcctgtaatcccagagctttaggaggctgaggcattaggatcacttgaagccaggaattcaagaccagcctgggcaacatagtgagaccctgtctctacaaaaaaaattaataaattagccagacatggtggtacacacctgtagacccagctacttgagaggctaaggtgggaggatcacttgagcctaggagttcaaggttacacacacgcacacatacaaaaaaacaaaataaagaaataaaaattatttagtactaactccaaagggaggaagagtgaatacaaaaatcttttattggacctaggtctaataatttttaaagtataaaagtttgttttggaaaatatctatcagtttttctttcagaagtggagaattgaggcaatcatccacacattttaggccctcaaactgtcaggaaaagggcaggaagagataggggtggggaagagggggaaagtaagattttgagctgaatctcttattttaactagaatctaagaataaagatgagtcagttctccacttaatttaggggtcaggattccaaactctagaaaatagatagtttaagccattttgggattgtgttcacagaacagctgaccagtttctgaagcgttccttagaaatgagggagcgagttctaggaccagatcaccctgactgtgctcagtctttgaataatctggcagctctatgcaatgaaaagaaacagtatgataaagcagaagaactttatgaaagagctttagatattcggagacg

SEQ ID NO: 30593 - DNA, 2300 bp, Homo sapien
ccacagccgaggagccaccactgcatgttgtgatgtcacggatggcagcaatagtgttatttctgtcggggtacttgttgatggctgggtagtaaagaccgcttaattccagggtggtttttgtatttctgttttgtttttcttggtaaactggtgcaggagaagaagctagaacgacactgtcgttctgctacaacctgcaatgccctttatgtcacccttttcggcaaaatgatcgcgcggtgagtggtgattattttacatgatcttctgcatgttttgtgtttgctgcagaccctttctcaccctgcaaaactgagaactgatcactacaccagtctgttgagccactcagattttatttgaatagtgatactaacatttgtgagaacatggcttacaggtgcctactgtccatgattgtcagaacttgatagatttgtctaattttcttcacactaatctgttccctattggaggttgcaaaagaaagccatcctcaccctcatttgtggcccctagctttgggaaagtgaaggaaacaactgagggttacaatattatttcaggtatctttgaatatcaggaggtagatatatggatatgaatttttaattgtctctgttctcaagtcctgataaactttttaattataaaaatagttctattttagatatccattagtaatctgcctttagataagcattagagtatcactacttttatttcctcagtatagctttaccctattctatctattctcaaccgttagaatgttttactacttttatttcttcttcagtatagcatcactctactttgtcttttctcaatctgaggtaaaaaaaaaaaagattaatacattttttgttattcattgcaatagatggcaattctagcacacatatttccagacaccgaatctagtacttcttgtctctttattccatgttctcatcttgagaaccaaatttgaaataaaaaaatcttctgaaactttacattgcccatgatatttcatctttgtttttgtttttgagacagtgtctcactctctgttgcccaggctggagagcagaggcttgatctcggctcactgtaacttctgcctcccagactcaagcgatcctcccacctcagcctcttgagtagctgggactacaagagcacaccaccatgcctggcttatttttgtatttttagtataagcggggttttgccatgattgccaggctggtcttgaactcctgggctcaagcaatccacctgcttagcctcccaaagtgctgggattacagcatgtgagccactgtacccagcctgcctgtgatatttccactgtccttttccactgttagttgtagcaacacatctggcctctgtgaacatcagtgatacaatgagtatgattcaagagtgtgagtaatttttcatacatttaataatgttcattgaaagtattttactgtttttatttttgaaagtacctattttaaagagactatggaccctttgttttttctctttgtacatctttatattatttttaaaaactggtaaatattgtgtaatcttttaaaacatacccccctatttaatgattttctttagccttgtgttttcaaaattctggctccacacaaatttaatttgcatggctaactaacaatacttatcatcgtttccctgcttcctgtatgtaggtggcatgcttctggataataagaaccgtgtctgactcatttttatgttccataatgcatagtaattgcttaacaaataatagatttcagcatgtttattgcactgaattaaattatatatagtaaaataaacccaatgactctagcagccccataaaactaccactttcctttatcatgttttattgaatttgttattggttgcagtacaaaaaatagagttcacgttgtttttaatcgatctcaaaattttcacagatgttggcaatctgtaagaaattaaatctcttctcgattccaacagtgctgggagagcaggcaatttagataaaatccttcatcagtgtttccagtgtcaagatactctttcattatatagacttgttctgcactctatccgggagtccatggcaaatgatgtggataaagagctaatgaagcaggtagaatgtaataaacttataaaaaggaatgttagtttgctttgtgtgtgtgtgaatggaaataaataacaattcttttaaaatttgtgcttaaatatgtttcaggcatatgcaggaatgctgatagccatagtgtgcttgtggaaatttgtgt

SEQ ID NO: 30594 - DNA, 2300 bp, Homo sapien
ctctgttcttccaattcttgaatcaaaatattacattcagaaaacaaagcatagtagttcatgaaataggcagataagtccttctttatcagtcttatcaacatccttaaatatctaaacaaattatcagaacttgaaatatacaatgaaatctatgtgcaagttaaaaaaatataatagttaaaaattaatgtaagaactaatattttaaagaatactatagtagctaatattaacagttgtatttttacagaactttttgaatttagactgtccgttaatgtcctggttccatcatttactaactagatttcttcaagttacttggccactctaaactttgactttcttggctgtaaaatgagaataactaatagtacctacctcataggtacttgttgcaaggattaaatcagataatgcacataaagtgcttagcacagtacctggcccatgataaatgttagtcgttattttatgagaagtattgctattgttattttataaataaagaaactgaggttcagattagggtttgcctaagagtacacagtgagtagattgcagatctgggagttgaacctcgttcttttctggctccagatcctatggtttttcttttatagccatgggtcttaacctgggaagcatggatcctataaatgggctttctgtgggaccatgaactaagttgttaggacttatgaggtagtaaatcaagactttcttttctccttcagaagtatcatttctatttgaattatttgagttcctggggaatatattctttagagatataatttttctgcttgttaattaaatataacaagtagaaaaattgattgaaaaactataccaagtaattcattatagttgctggagaattgtgttattctaaagcaagcctaaagctggctgcaaactacttactatacacttttttaaattcctcatcagctatcatttagaccactggtacactgaagaaaaagtcaagtctcaagataatttttgaaactccttaataagtactaagatattttggtttttgagtgtgtcctttttagctttgaaccagttttgagtttctggggaaaacttgggaaataggaattcttggactttacactgaactcacttagtttcaaaaagatctcaggcagcctaggctaacctgattgtcttgagcagattgggagactccaagtccccagacaaaacctgctgttatttggaccttttctcacccccagaaactgaggtgattcccaggacaggtgtttattcctctgaccaggagatctaggtggtctgctagtaccttcaaggtcttctgcagtattttctgtgatttgggggctacagtgagctccctgaaacattctgcaaacatttgagtgttgcaaaaccccacagggacctgaaatgttgtcctttacccattaatttacagcaatactacatgtagaagaaattggggcccattttttgtttgtttgtttgtttgtttgttttgagacggagtcttgctctgtcgcccaggctggagtgcggtggcactgtctcggctcactgcaagctccacctcccgggttcacgccattctcttgcctcagcctcctgagtagctgggactacaggcgcccgccaccacgctcggctaattttgtttttgtatttttagtagagacaggatttcaccgtgttagccaggatgttctcgatctcctgacctcatgatccacccgcctcagcctcccaaagtgctgggattacaggcgtgagccaccgcgcccagccatttgaggcccattcttagtttactagttcagtcatgtttttgccagccataaaagtaggcaattatgagggtgctgtcactaaaaatagatttcattttctcacacagcttttctccagtattttcaaagaataatcagaagttgactcttcagtagtctcagaggcatgtgcttccttacaatgtaaattcatttttttttctagtattaccaacgccttaatgatctagtggcagcaccagccccgattccacctcttctcgtgtctggaggaccaggttctgggaagtctcttcttttatcaaagtggtatgatgcagtgcaattaaattattgttgtcattgtttgaattactgaatctattcaacaaaatgtattgcatgcctgccttcctgcgcggcctacactaaacattaacaaagtaaaaaggaataaaacaataggttcatgccctgaaatgcatagaatttggatgttagagagaagacacagaatga

SEQ ID NO: 30595 - DNA, 2300 bp, Homo sapien
gagtttagaaaactaattgcctttgaatatattactctagaaggtatggcagtattaacatgtaagatcagattccattctatgatgcctgttatgtttttaaaacttttttagaatgatcaaatgtgttctggtaattttttcatgaacttgagaaattttattttcagatgactgggatattgctgtagctagtttattacaagttactcctctgttttcacattctctgtggagtaacactgtcagatgttacctcatttatacagatgaaacccagcctgagatggatcttttccttaaggtgaggatatttataaattctgtatcaaccaatttaaaatataagttaatattatattctgtttctgatactactgtatctcaaccaaatagtttcctactagattatatgtcttaaagaacaggaagcgtcttgggcttttcttaagagaaaatattgttcaatattatatgtaaagaaaggtggtgaattgagagtttatttatttatttttactttctggaattaactttcctaggacaggagctaagacagaaaaagaaggttttaactcgttttagttagttttaaatgtcaaactaaggtgttggaactttctggacttttttttgtttgtgtgtttgtttgcttgttttgagacagtgtcttgctctgttgcctgggctggagggcagtggcacagtcatagctcactgtagcctaaaactcgtgagctcaagcaatcttcccactcagtcctccagaacagctaggactacaggtacacaccaccacatacggctaatttaatttatttattttttttttttgcagagaaagtgactcattgtgttgcctaggcttgtttagtgaatttttcattgcatattctccacaatgtttaagactcttgttgattgtgtctactttagttactctctcttccagctctatccttgagtctgtctcaggtagtaaaattttctccttactgtggtttaaattttccaaggcagccgttggagttattctaaggcaagggtcactatagccagttggtgaaatctggcctgctgcctgttttaaatggcccagagataagattggttttcacattttaagtggtagaaaaaaatcaaaaggagaataatattttatgacatgtggaaattatatgaaatacaaatcttagtgtctatcaagttttattagaacattgctgcactcattcgtttacgtatcatccatggcagcactacaacaccaattcaatggcagagtaaattgtgatagaaaccaaataagccacaaagatccctgctaaagcagccaagttgtaaagctattattatttttgtagacatatttgctatctaaccctttatataaaaagcttgcctaccagtgttccaagggaattttatagaatctgtgtgtcacatgctatacctgctatattaacatcttccctgttgttgattaccaaattcatttagctttcctttgtgatattattcaattttagtaaaaagataaaatattttaaagcccaaagcttccatccagtaattgaaaatgttattcccaacgacattttgagggcattactgatttctttcataataatagtcatcattacttactaacttaattatagatttatgtgtttttaacttatatcgctctgctttagcgttctgatatatcatcgtggatgttttttactatacagatttatggatctatattttgcactctttatgacaataaaacagattgttcatagtaataataacaaaaagaaacaaataccaaagcaaaatagcctaatactgtctcctgttgttctagctttactatgaaataagtcattttctgagctagaaaaaggccaagttgctaagctattattatttgtatttgagagaaacttgcctttttaagattttctttaaaatgtgattatttttaaaattttatatgaaaagatatccagtataacctgttttaaagcgtgctttttattttaagtagtatgaatctcacttgatctttagttaaatacattaaacttttgtatgttttcatttgtttttaggactattcacctaaacttaagagaatgtgcgagacaatgggatattttttccatgctgtttattttccaatagatgttgaaaatcaatacctcactgtaagaaaatgggaaattgagaaaagttctttagttattttatttattcacttaacattaccaaggtaagctgaaaaaaaatgtaatttattataagcagta

SEQ ID NO: 30596 - DNA, 2300 bp, Homo sapien
gaatatactattttattctatgttgctttgggggtaaaaatgtaaggaatttaccttgaattgccttttaactttatctctgtcatgttcaaatgttgctgctctctccattgcttggtatttcgcttctaaagcactttctttttctcgaagtatcttctgatacgttttttgaagtgcctagaataatttaccttgttatttcctaacaaaaatagtcttgctcctcaattttacattcttatatatatacatatatatatatatatgttacgtatcttagaattttaagtctacttattattttaccaattatcaggaacttcatgttgccattttattcaaaacatgatggaaaaaaaccgcaaccatgcttgaactaccacaaataaagaccaacattaagctttcaatggaaattaactttttttgaaacactgcatcagctcttaaacttccttatgccttttccatctttgtgatagtaaaaattacattttgtaaggcttaacttgaaggataagtagttctaagagactgtgtgcctgttggcactatgtcttattcatctcaccatcccttgagcacttcacagtgcctggtacactgcaagtctccagtaaatgtctgacacaatgaatgaaataaatatggataagttttttcatgcctcgatatgtgagaaaggaaccagtatgtttcacagggaatcaggattggtgacatgagtgactgtgacacttgccaacccttattgcactccgccctgtttggtttggccttttctacccccacctcacagttgtttccaacgtgcggtgtctgttgggcagtggcttggatacattgaatcagatatttgaaatgcactagtccattttatacatgcaagtgcattaaggttgcccagtaggaaaactgataagacaacagataaactgctacacggacttcttcccagacaacgacaataattacacaacagctaatgagggagtttaaaaacaaaaacaacaacaacaacaacaacaaaacctgactagaagaatgtctagtcttgaagacaggaggctttttttcttttagaaaaatcagtctgaggtatttatttcaccccgactgtaacgactccgggaactcttaggctgcctataagtctctcccacagtaaagagtacacaaacgacacaacaacgaccagaggggccccaaactgagggcaaaaagttttagagattcgttcacagaaaagcaacctcttgctttatactatttttttttttttgatacggagtctcgctctgtcacccaagctggagtgcaatggtgcaatctcggctcactgcaacctccgcctcccgggttcaagcaattctcttgcctcagcctcctgagtagctgggattacaggcgcgtgccaccatgcccggctaatttttgtatttttagtagagacggggtttcaccatgttggccaggctgatctcgaactcctgacctcaggtgatccgtccgcctaggcctcgaaaagtgttgggattacaggcgtgagccaccacgcccggctgctttacatactattttattgaattataatggacctgctacatggagggcatgcaataattgcttttagcgtaaattaatcaaatggactagggaaatttgactacatctagagaaggttttcaaccatggtgagatcaggaggcttccagaaattttcatgtcaagaccattaaaatgcaagagcgatgaaactttacaaagaaaccgacacttgagccccactttggagacccacttaaaatttttatggtggggaggggggtgaaactcctaggaagagtttgctgagttgcttcaacagatgtcaccagccttctgagggggtgggcgcgggggcggcagtggagctggagattggcatttgcctcctcaggacactttccggctaatttcttctaggtgcctcaatgaataaaccagaaatagaaaagcggggaccaggcgcggtggctcactcctgtaatcccagaactttaggaggccgaggcgggaggatcattgagcccaggagttccaggttgcagtgagccgcgatcgtgccaccgcagcgagaccctgtctccaaaaaaagagacagaaaaaggggagggttaaggaatcatttcagactcgaagagaatatggcctctcaaattaaaatgggcagtttccgccgaactttcaaagccgcttggtttggagagggagcaggacggccgtgcttcccaagggtctcccggcgtcgcggccca

SEQ ID NO: 30597 - DNA, 2300 bp, Homo sapien
acagtgcctggtacactgcaagtctccagtaaatgtctgacacaatgaatgaaataaatatggataagttttttcatgcctcgatatgtgagaaaggaaccagtatgtttcacagggaatcaggattggtgacatgagtgactgtgacacttgccaacccttattgcactccgccctgtttggtttggccttttctacccccacctcacagttgtttccaacgtgcggtgtctgttgggcagtggcttggatacattgaatcagatatttgaaatgcactagtccattttatacatgcaagtgcattaaggttgcccagtaggaaaactgataagacaacagataaactgctacacggacttcttcccagacaacgacaataattacacaacagctaatgagggagtttaaaaacaaaaacaacaacaacaacaacaacaaaacctgactagaagaatgtctagtcttgaagacaggaggctttttttcttttagaaaaatcagtctgaggtatttatttcaccccgactgtaacgactccgggaactcttaggctgcctataagtctctcccacagtaaagagtacacaaacgacacaacaacgaccagaggggccccaaactgagggcaaaaagttttagagattcgttcacagaaaagcaacctcttgctttatactatttttttttttttgatacggagtctcgctctgtcacccaagctggagtgcaatggtgcaatctcggctcactgcaacctccgcctcccgggttcaagcaattctcttgcctcagcctcctgagtagctgggattacaggcgcgtgccaccatgcccggctaatttttgtatttttagtagagacggggtttcaccatgttggccaggctgatctcgaactcctgacctcaggtgatccgtccgcctaggcctcgaaaagtgttgggattacaggcgtgagccaccacgcccggctgctttacatactattttattgaattataatggacctgctacatggagggcatgcaataattgcttttagcgtaaattaatcaaatggactagggaaatttgactacatctagagaaggttttcaaccatggtgagatcaggaggcttccagaaattttcatgtcaagaccattaaaatgcaagagcgatgaaactttacaaagaaaccgacacttgagccccactttggagacccacttaaaatttttatggtggggaggggggtgaaactcctaggaagagtttgctgagttgcttcaacagatgtcaccagccttctgagggggtgggcgcgggggcggcagtggagctggagattggcatttgcctcctcaggacactttccggctaatttcttctaggtgcctcaatgaataaaccagaaatagaaaagcggggaccaggcgcggtggctcactcctgtaatcccagaactttaggaggccgaggcgggaggatcattgagcccaggagttccaggttgcagtgagccgcgatcgtgccaccgcagcgagaccctgtctccaaaaaaagagacagaaaaaggggagggttaaggaatcatttcagactcgaagagaatatggcctctcaaattaaaatgggcagtttccgccgaactttcaaagccgcttggtttggagagggagcaggacggccgtgcttcccaagggtctcccggcgtcgcggcccagcccggcgttacctgcagttcggcccgcagccgcttgttctccgtgtccagcttggcctcgcggcggcccatggacaacaactcctggttcttgctgacgcgaaagatctcgtactccttcctgagccgctcgtactcggccgccgcgtactccagctctggcaccgacgagccagtggacttgaagctggcccccagcagcccgcccgcgcccaccccgcggggcagcgacccgggcccggcccctgctgccgcccccgcgcctcggcggaacgagttgcgcagcaggcgggccttgggcttcacctccaccgggatctcgcaggcctcgccgccgcccgccccgtacgtgtcctcgatcacttccccgcccgcggggctcacgagcgacgaggcggtccccatggcgtccgttgccgctactacctagtgagtaccagcaggactgggcagcggaacggaacgggacggggtggggcagaggaacggaacgggacggggcggggcagaggaacggaacgggacggggcgggccagcgggatggagcggggccggagagcaggactgggcggagcagcgggacggggcgg

SEQ ID NO: 30598 - DNA, 2300 bp, Homo sapien
ggccccatacttggcttaatgctctgctgtagccatcttgaaaatatttataatttttgaataaggggcattacatattcatttttcactgggtcccacaaattgtgtagctgtcttagctgtcttttctatgggaggactattaaaaaaaaatgtggccatctttagtaagttataagccacctgccaaatattttattctcactatatttctgtattaaaagttattctttcaaaatgcagactgaagtacgtgggttaaattcagcatgaagaaaaacaggttatgaggttagaaataatgtcttttttttttttttaaagacgtagtctcgctctgtcgcccaggctggagtgcagtggcgccatctcggctgcaagcttcgcctcccaggttcacgccattctgctgcctcagcctcccgagtagctgggactacaggcgcctgccaccacgcctggctaatttttttgtatttttagtagagacggggtttcaccgtgttagccaggaagaaataatgtcattttttaggattaagaaatttggtcactttggcattgaccaatagtaatctaagatcagtacgcaagtagggtggagaaatgtggattagaggcatgtcactggatagaaatgacgtggggaaaggagagatgcatgcttcagagcactcagttccagactgtagaatctgaatgtactccccaagctgtaggaagttagcatagtgagtttggttatttgttggagagaatgggtgatggctattttatcttcttactcaagcatagttatggaagtgttcagctgaggcccattccaaaggaggtactaagatgcaaaaatgttcaaagggtttagtcagaaacctagtggatgatccttaaacccctgatccacatggagaattcaaaaatttgaagttagaaatcagaacggatttgaaaaggtagaaagttcttaaggtactgtgatggtggaaatatttccctttatctcaggagaccacctgaagaaattagtatatacactctggattttgaagaatgcaaaggcctagtatgactacttcctgaagaaaatctaaagggtaagagaagagatgactagccactttgatggagggaatgaaggagagactggtgtgcggtctccaatgtcccatgccgcaatgagttaaaaaacttaaccttgtctaaggattgtccctggtggtttcagactgtaaaatctaaaagctctttctttgctggcattattccttgctggtcattctatctacatgcatactgagagagagatatcgcgggaagcacatagcaggcactccataaatttttcagatttcccaactgcttccagaaaggagtttccggtcaggcacggcggcagcgaaagaaatagctgcagcgtttgtagagcagctgggacccaggcctgtgctccctgtgaggcacgcccgccagggagcctcgagccgggcggagacaacggagagaagccctatgtcggagcaccactccaccagcgttcggagcacccctccaccagcgtccggtccactgctggtcctgcacagtcgccactccccccatccttcctgctagccccgcccttcttgctagcccgcctggccctgtgtgctttctcgacccacccccgtttgccctgccccgcccacatgccccgccccacttgcccggcccctcttgttgtcccgcctagccctgctgccccgccccgtccccctcgcccatccccccagttccgctgccccgtcccgttccgctgccccgcccctccagttgccccacccccttccgctctccctccccgccccgttccgctgcctcgcctcgtccggctctccggccccgccccgccccgttccgctgccccgccccgtcctgctcccccgccccgtcctgcacccccgccccgcccagttctgctgccccgcccctcctgtttccccgccccatcccgctcccccgcctcgccccgttccgctgctccgccccgtcccgctgctccgcccagtcctgctctccggccccgctccatcccgctggcccgccccgtcccgttccgttcctctgccccgccccgtcccgttccgttcctctgccccaccccgtcccgttccgttccgctgcccagtcctgctggtactcactaggtagtagcggcaacggacgccatggggaccgcctcgtcgctcgtgagccccgcgggcggggaagtgatcgaggacacgtacggggcgggcggcggcgaggcctgcgagatcccggtg

SEQ ID NO: 30599 - DNA, 2300 bp, Homo sapien
gaggtggtggtgcctctccccatgatgagtacatgacagatatttctgagcttttttggccaaatttaaccacaccagccaacagcatcaaaaacaggctttttgaggcctgtattagtcagggttctccaaagaaacagaggcagtaggagatatcagtgtttatttttatctatatccaatatatagagaggtttattataaggaattgactcatgcagctatggaggctaagaagtcccatgatccgccatctgtaagctggagacctaggaaagctgattgtgtaatttagtcccagttcaaaggcctgagaaccaggggaggaaatggtataaatcccagcttgagggctggagaatatgagaggagatgaacagggggcaaattcctccttcctctgccttttgttctattcaggcccttaatggattagatgatgcccacccacattgggggagggcaatctactttgctgagtccatggattcaaatcctaatttcatccagaaacaccctcacaggtatacccagaagcaatgttccatttgggtatcctatggcctgtcaagttgacacataaaagtaactatctcaaggttattctctttcactgaagctgtaacatggcccaagttagagacagatggccattgatggccctcctaagaccagaagaagctacatttagatcccacagccacatttacagaaaagggagattatataggtggatccattcgtcttcaaaagaagattgctaatttctcccattacttaatttaccaagcaaaatgaaggaaaaaccccaagttgacctgtagacatatctaaagtcttaggtgagtattttcctggaagaggtgcaggacttcacccatgagctcaaagagccacctggttcttcagcaatatcaggagggcacgttgaccctagcatttcagataccttcccaggaccaaaggaggcccatatgagtgtccaagtttactgccaggtgcaattgttaggattcagtaattctcaaatattttgcccaccacctacagtcagcaatacatttaacctagtaacctcatacatatacccattcttttgtatatatttaactgaatcaaacttttcatgcaacattaccttctcttactatgtgtaaggcactctgatattttctgttctattatttaaaaatttttagttcaatgcactgattttacaaagtactagtagatagtaacatgcagtttaaaaaggacatattttattgataaaatggattcctataggttagcccactaaaagttggggaatttttcttattggtttatagatgtagcttccccttctttaaaatttataaagtgacaatactcttctgtgaaatctgaaaatgtttatcctgtatataactaagtggcattcagcagccttgtatttggctggcttggacccaaccccgcccacccagctttgcagaaggagaacccaggagatgagagatgaggaagaggaagggggtgtcaataaggtcatggcaaaacagaagctaggagtagaatctggcccccaggactggaaacaggtaccaagcatgcctttcagaaggttctagaaaggaggaagagataaaaaggggacaagaagaagaaatatcagaaagagcctggcaccttttccccactccttcttttactctccaaccctagcaacttggtcttagagggtcacacgtttctgtgctatcacagcctctcctggctctcctgggaggttttcttcttggttccctgaatccccaccaagaagacataatttatagacaagaggaggctctctgactcctggacccatgctccttcatgagcatgtactgtgagccctccagcttctcggagattcatgttttaaaggcagcatgaggggctgcagacagccacacagggataccatggctgggtcataaaggtgattctaagccaccagggaaaaattttaaatacatttagcccttgagacaatgagaagaaacaggaaccaaacttttcaatattttcacaaaagtgtgttaaaattaaagtcttgggaggagccaagatggccgaataggaacagctccggtctacagctcccagcgtgagcgacgcagaagacgggtgatttccgcatttccatctgaggtaccgggttcatctcactagggagtgccagacagtgggcgcaggccagtgtgtgtgcgcaccgtgcgcgagccgaagcagggcgaggcattgcctcacctgggaagcgcaaggggtcaggg

SEQ ID NO: 30600 - DNA, 2300 bp, Homo sapien
gcacatcctgcacatgtaccccggaacttaaaaaataaaaaataaatgctcaaatggaaatctgttttagttaagaagggcataaaacaagtaaagctattaccagagagtttatcagtttggcatggttaacaaaaggcaatacgttcttttagaaatatttagttaatcaattgaaattaaacctagttgtgaacctagcttttcaatttattccattgactagtctttggagtatttattacctatgaattatttttggcctttaaaaatcagttctcaaaaattatgtggaaactttcttctgttttcagagtgtgtatgtcattagtgatttgtgttgcagagtttagttttccctgttaaaaaatgcgtctatcgatctagcagcttatgcaggtgttctcaagcatggatggatatcaaattgccagtagaactttttaaacctatagctgcccaagccccacttctcatcccaatcagaatctccaggcacagggccccacaacctacttccataaatacttaccatccagctaggcttgagaaccactggtttaatgacagcaaacaaactttttttgaggctttcaaaacatttttcttgcttagacatttctttactcctgctgtagccagaaccattgctgtgacaggtttaacatgttcccagaaactctgaattttgtgcgatgccatctctgatagggacaatgtgatgaacaatgtctgagattgctaggtgggcttcacttctggggatgagaagccagagaagttcaggacacactgacaaaggtgaagttttctctaagcgacagtttgatcaccttgatagtgagagagaaatgctgaagcagggttataccacctggtttcaagagatgagagatgaaggttttggagaattcagcacttaagaatcttgaaccacggcggtacactactgggtaataagagcttggctacgctgaacgacaaaggttctagctggccagtccgaaaacactgagtccttaggtcaaatttgagaaatgacagggccagtgggagtcctaacttctagactctggaattactgacagaagaatatttggacagtttttaagaccctcaaggcatattattttacaacctctttagcttatgcctgaatttgtgctgtgactgttagcttcccggatgttttctccacatgcttctttctgaactagcctgtatagttctacaacaaattgttacgttttgagaagcagggaccacttataccacttctctggccaagtgtctggcaccgcgccactcagacacacacgcccaaccctttaggattaacgtagacacagtgttctcttccatggccattccgtctccacttctggttccacactccagtcaccaagttggcatgattgctgctccatagaccaagggtgggtaatgtggggattaaacacaccttccctcagctggtgcccaaactgtaagcatcaccgggacaccccatgtagccacaggaacgcttctcatcagtggaagaaggacaagaaaggtcgtgcaagtttcaaattacgtggagctggggctacagccattactttcggacaggtgcaattcaaagcgtgatcctccgaccaagagcttcgtcatcgccacctgggagcttattagaaatgcaggatctcaggtctccaccccagaccttctggatcagaatccgcattttaacaagagagtcaagtgattcttatttatattagaatttgagaagtcaattgatctggtaattgatcaactgagtgccacttagcccccgaaaacagagaccctttgtgcccgcctcgcacccgctctgctaggtagcaaccgaacccccagagacatcggagcgggcgctgccgagggcaatttggtgattggctggtctcaccacgtgaccggcgctgagccttccgtgcgaccggattggctgtcgcggacgctgacggacaaggccggggcgggccagagcctggtcggaggggcgcgcgcgggggcccgaggggcgaaggcgcgagtgcgcgagagcgcgtgcgcgagcggtggggctttctcctgagccgtcggagggagccggagcgcttctcccgaggtaagcggcgctccggggcgtccccccagtccttcccatgctgggtcccggcaagcgggttaggctgggctgggcggggctcggggaggtgtggggtcagcttgccccgggagcccagcttcagggaggatgcagccccggttgccttggtttcccttttcctatc

SEQ ID NO: 30601 - DNA, 2300 bp, Homo sapien
gttgcaggtgcctgtagtcccagctactcgggaggctgaggcaggagaatggcctgaacctgggaggcagagcttgcggtgagctgagatcacgccactgtactccagcctgggcaacagagcgagactccatctcaaaaaaaaaaaaaaaaaaattggtcaacattttaagatgctataaggtggaaataaaagttttccttcctattgtctcaatcctaaatatcattccttaaaggtaaccactgttaagtctctgcaaattctaccagaaatgacctaatgttctatttgtatacaagcacacatacacgtatacataaatacctatatacatgtaacacacatctatgcttacatgtgtatgtacggatacatatatggattccattgtggatatgttagcatataccttagacatctgttcacatcagtatgtataaatccatttcatttttaatggctatattgtattccattgcattggtttgccataatttagcttaccttctgtttatcaacatttacgtttttccagttttatcttgttgcaaacaatactgcaataaatatttttgtatatatctttttgcatttttgtaagtatatttgtaggatacattcaaggcaagggaattactggtaaaagagggtgtccgtttttagcatcactaaatattggcaaattgtcctccaaaatggctgccctaatttatacttccatcaacagtgtagaagaatgtcgtgtttctccacacccttgtcaacactaaatatgacaaaaatttcagtttgtaaatacaataagtgaaaatagtatcttattttgacattctgttgctgctgtatttgaggttcatttaagcaaatgcttactgagcactcactgtgtgtcatcactgaaataggaaatggcaataaaaaaatgtccttgttcttgaggagccatggaagtgaataagaagcctctttttagaagaaattcaaaggttgcaaaactagaaaagtgggtcttttgcaccctaccagcaggaaatgttgtctataaaagatagtgtccacccatgtcaactttcagttctgttgtcggcctaaattggcaactctctgcttctgcaatagtggccttgctttcattttggaagaaagttggctgcaggtaggagtagaaatgcctatctagtagctttggtttttctccaggacctgacttgattatctcactggttgcttttaggagaaagcacccactgttggcttctgttctgaaagggcaccaggcaagcatggaatcctatcagcagagcaagccaagagctcaataaactgtttattcattgttcaagcttctccacctatatggattattagaagaagtatttcatcttagggtacccagattagattatagatacttcaagtattctttagaattcactgaggggaaaaaaatatggaaagcagcatcagtcatttgggaccgtgttgtttcctgataccaaaataaccgaaatgaagaaactacaatctgtaagttaaaacagctggtttccagcctgttaaataaaaaccaaaaggtgtgacgtacatggcaaaatgggataaacctggttttctgagtggaggcagctattgataattttacttttcttatagctgaagatgaaggagatttgaggttctctgagaattaaaattcggctggagttagcctagggtgagaccctcagagctgtctgttcatgccattgcctcaagcctgtggacgttttttcaccctggggcaagaagaggctccagtttgcccaactgctgtgtgtgttccaggccagtgtccagtgaggctgacttggcagctgccctttccacagccagccagccagcccctgagtgtgttttaaaagataagcgacaaaaagccaaccccttttagaggggctggaacaggctagtagttgctaggcaagttaaagtaattcagcgtccttgccaaacgtctgccaggcaaatagggaactttcagagaaggggagtgagatggtggtgtgtgttggttgccataggaatgtttccctgattggaacaagaccacagagtggggagagcaagacggcagcatctacggttctttctgctcaggaatgggaacccagagtgggcagtagagcggaggcaagccatgcagaggcaggagcagatgagaccctagatgccacgagaagctaaacatgtggggaaaataaagagcagattaactcaggaaaattatatggggagctcttatgctactctgaagatct

SEQ ID NO: 30602 - DNA, 2300 bp, Homo sapien
agagaagcaagcattagaagcaaaatgaaagaatcagtccaggtttattaaagtacgaagtgaaacagatgacaacacttaattatgtaagacttctgacttagtggtggtaatgtattaaggccaataaggtctccttggtaactgggagaaatgttagtggacttgctaccctatatttaaaaagctacccatcaggacagtctgagactgaaggataaaccaagggaaaaatgaaaggattattgcatatgggcctgcaaatactaaaacaaaagcaattattttcaaatcattctctcaatcttacatttcacttttctatatcttgtcagtgaattttaagccacttggaggcagagatcagtgaattgttgcctacataacaattctaagaataaactttttctcttggataacgttcttcaggccatgaggtatgctcacctggttccctctccaactctctctctgtctgaatgaagagttccttttgcttcatgcaaagttttggggatgaccactgagtcagagtggatacagtctgaagaggatgaagaatagcagtatgaggcagtggtgatgccaaacagctctgaatgctgactggttctagggaatgcacctctctgccctctgagctgcagggacagggagatgagctggcagcagctgcctcagagataaggatgtgagacacaaacacctaaggaattcctttggacttccatcacccccctccatccaactttatcaaaagcgaggtggtgtgggcagctggctcctttcagcctgggcccaccacatggtatgctttcctgccttcacaacatgcccttcttgtagcttgatggaaactatggtgaggatcttagtctgttagggctgctataataaaataccaaacaacagcaatttacttctcatagttttggaagctgagaagcccaagatcaaggtgccagcagactcagtttctggtgagggcccgctggctggttcatagaccataccttctcaccatgtcttcaaacggaggaaggggtgagaaagctccttaaggtctcttttataagggcattaatcccattcacgagggatccaccctcatgacctaatcacctcccaaaggccccacctccaaataccatcacattgggcttcaggtttcaacatatgaatttggggggatcataaacatacagtctacagcaggttataaatggtattttcactatgggactcaggagcatctgaatcctgtcctacccatctccctttaaaggagatacataaagcaacccctcctttagcaaaaattttctgggcctctggcttcttccaaacagggatagctcagtgttatacactaagtaagttgttgcatgaaaaataaaaaagaaaagcccctgcacctgtctttctcaacagacaactggctgaagtttacaactaggcagtatctactccacttagtttagatacactacttaactaccagagagtttcatcccttttcatttgctcctttactcagtaacagctctcaaagatggggaaggaagagaggcatatctaagtttttaatattagtctaatttgccaacttaagctttcaaataccactgaataaatgacaagtagattcactgaatttagagggagaaacacaatacttctttaggttttgtttcagggggatcaagttttaagaggcagtgaaatgaagtcaggttcaactgttccaaatttctagacacgagcaaagcttaagccatgcaacaatgtattgcttttctaaggattattaataatgcatttgtaactactcagagactggcaataaactttcagagagtgaataagaatgtaatctgtccacagcaacatagacaaattactttgataaattctttacgagggtgcctcatctcctgcaattcttggattggttacaagtctatagttaatccttcaataactcccacaagcacctcattactcataatactgtgacatcctgagttgtaaaagaggtgctgttatataacacaggcactgtatagcagccttaggttatgaatattaagagacaatctcaaatgagataatatcaataaagacctcctgtcgtctctacccaagaaataaactaaaggaaggcagtgtccttgcaggcattttgacatcagggatggtaagtacaggcactgtttccctttcagtttcatgattgtcatccctctcaccaagccatgactttagaactatgttcacgggtaagactgactcagtaattt

SEQ ID NO: 30603 - DNA, 2300 bp, Homo sapien
actttatatccatctgtattttttaatctgatttaacagtaagttgagttttatgtatgtgatgagctaataggattagcagtttatcatttgataaaataaatctttttgaacatgtttgcagtttctccaaaacagactcatctttcatcaggtctttggagacagtggtgtcaaagtacatccccccctctttctccctgtctccagggctgagtggatttatatagtaaatatctttggtccggagaagtctgaagttaacctggccattgagtgttaccattctgtagagaataacaatgcctaaacatgacacatttgtgcacaacttaatcagtagcctgaacttttcattcagccttggacaatacatcttggaattcacaataatgcagatcctcagaaccaagtcagtgtcatccgtataggaggctgttactgtaacacaggctcgcatgccccttctgggtgcatcaggggtggtgttcacagcattaatgctacatctgaataaacaaggacactactggcctttacttaatccaattggttctttcatctgttcatcaaatagccaacactgatatttataaaatacctcccaggccatctcagagagacaaagtggaagacaataaagaaaggaagggttggagtgtcctggtcagtaggaaggaagtgcacacagggtcctctagtaggcgaccaggttttttacctctacctgcgtgacctcaggtaggtactctgctctctgggtggtgggcaacagggaggctcctaagtaagtcagtggcccagagtttggaagaggttgtctgcccccagctctgctactttctggacatagaaccttgggcaagtcattgcagctctcggggtcctcctcacataagaggacagtggccaactgtaggacatgtcattttagagctgtgaggtacacagcccatatggcagtacctgtcaaccctggacctccttcctcctgaggttgagttgagaattccacgaaataaaccataggattcatgcacacaccaggctggatctgctactcactagagattgactcccttctccttctctcacctgaggtacattcctacattacagcatctggaaaagtatccagctctggggtttggtgacctggtttctccagggtaaaacttatgtacagaggtttttaggtccatgttgtcatcctgtaactgggggaacctttctgatcctagagaagtgattgaggtgtgacccttggtggcttagtggatgccaaggtcaataattaaaacccaggggtgtcatcatatcctaacttggggcacccttggagaggcttaccagaaaacaccctcgttgttgtttttatttctcagttttccaacagatggagaagcagaggtgtagggaatggccggaacatgtgtgggatctgaatttgcccaaggtccttatctggtgcatcagagagttaaaggcccaagccaatgttcagacagtgaggtccagagggaggaagcatcctggccaacagcaagcagctgatgaacagcagagcattagaggacagagatgaggaggaaaggagagaggtgagggaaggacctgaagctgctgccaggactgagagaggaaaccataggcaagtcttttctcttgggtccctggagctgcctcctgccatttttcatcctctattgcctgtgtggacatgtgttcacattcacatgtgccagcacacatagggatgtagaaagccctgaaatagctagattgagtcctagcttgtaatctgaggtctggggcaagtgatcagtacacttgtcatctgaggtccttgagcctcagtttactcatctgtaaaatggggttgcttgatgcctgccttgcccacttaggtagtaaaatgcacaaacccaaatggtctacctccacagcctgcactgatccagcctcccccaccaccagcagaataatctgggaggttgggcacatgaccctgcatcaaagaatgcatgagtgcctctctgcacacagccctgggcagtgcccatttctctttcagctcagtgaatgatggaaactcatggaagacagcagacaaagcagccccagggataggggagattccagagaggcccgtgaccaggccacagggatgctggggctgtaaaccaaaagccactggactctgtaaacccactgggcaccacagaggcagaaggggtgatgagtgagaggcgagtggtagtggacttgcccaccagtgccagctccagcatgcccctcca

SEQ ID NO: 30604 - DNA, 2300 bp, Homo sapien
gagatggcaggggtgagtagaggggagatggcagggtgagtagaggggtgagcagaggggacagggcaggagtgagtagtggggagaggacagggatgagtagaggggagagggcaggtgtgagtagatggaagagggcaggggtgaatagagcagacgtggtaggagtgagtagaggggtaagcggggggggggtggcagggtgagtagaggggagagaataggggtgagtagaggggaaatggcaggggtaagtagaggggatagggcagtggtgagtagagcagagatggcagggtgagtagaggagtgagtagaggggagtgagacagcggtgagtagaggggtgagtagagacgagatggcaggtataagtagaggggagaggacagggctgagtagagaggagaggggagagggcaggggtgagtagaggggtgagtagaagggagagggcaggggcaggtagaggggtgagtagaggggagagagcaggggtgagtagaggagagagggcaggggtgagtagaggggagagggcaggggtgagtataggggtaagtagaggggagagggtaggggtgagtagagacggcaggggtaagtagaggggagaggacgggtgagtagaggggtttgtggaggggagagagcaggggtgagtagaggggtgagtaggggagagagggcaggggtgagtaaggtgagaggacggggtgagtaggggggacaggacaggggtgagtactgggttttgtggaggggagagggcaggggtgagtagagggatgagtaggggagagagggcaggggtgagtagaggggaaagggcaggggtgagtaaggtgagaggacggggtgagtagaggggagaggatggggggagtagaggggtttgtggaggggagagggcaggggtgagtagaggggtgagtaggggagagagggcaggggtgagtagacgggagcggacagggatgagtagggcgtgagtacaggggccaggcaggcgtgggcagttacattcagcaggggactttgtcttctgcataatttttcccagagcctgctgaaatgcgggggctttctaacttccacactgtagtgttatttagttagcgcttatttagatggttattcgttggtcctgcaataaacatgtaactaaaaaggacaagttgttttccagtggtggtcagtttggtggtggagatttccactcctgtgccctgcattcactccctcctgaggactgctgaaatcacttctcgtttctgctgaataatgcacttgtgacagccagctctactagctcgtttacaaccagatcaatgagtctttatgtgcttttccccagccagacgacaataaactaggttttatttgcctaaattgagtcctcaaattcggtggatcagcataaaccctctgggagagcgctggggaccctgagtaacattctgcttggttcagccattctttcactaattcccccgtaaaaagccaccacatttgtcctcagcacttgtgccagctgcctggattagttttaatttagctcttctggagagtgtagccctttagaacatctttcctattgctcttctgtacgcttgtttaatttggctgggtttgttttgagaggagctgtggagatgggtcttctctcccaccgggacacgtcagtagaaaggttctcttgcttccgtggagttctgaaggcttcccctgccccaagacctgataggaattactgcttcccccaccccaaaagccactgacaggacttttatttattactgcatattttatttaaggtaaaacctccaaacagtgtcaaagagtatataccccaaagtaagcctgctcctgccctgtctccagccccagccctctcaccagaagcctccactgtccgcagcccctatgtgtgcttccagagagggtctgccctccactttctaagaaacagaaatagtagcagagcacagacgtggttactcagatacattctggcgccagctccacgtcagtatctaaccagcatcctggttctcttctcacagcggcagaggattctgctgcgttgtttctctgtgtcagacattgcagccgcttcctgtctcactgctggtctggaatttcagagaacccctgagctggagttctgaattgaaacctggagcctgtctggttccacattcacctttcaccaccggccgtttcttgaacacccgctgtgtgtcgaggtatgcctccctgtgccaggctctggaagtggagagggagggagacagagc

SEQ ID NO: 30605 - DNA, 2300 bp, Homo sapien
aaattctggggcatctgttagctagaacagaggttgacaactttttctgtgactagctagatagtaaatgttttaggcttagcaggccatatggtctctgttgcaactattgaactccacttgtgtagtgcaaatgcagccatagatgatatgtaaatgaatgtgatggtcatgttccaataaaactttatttgtaaaaacaggcaatgggtcagatttggcttgtgggccagagtttgctgccccctgtggtataatatcatacagtcataaagcagtatgttctgaatactacttgtgtaaaaagacaggaaaaaaaatatatatatttctttgtatatgggtaaaatgtttctgaaatgacatacaagaaaaggataacattgattgacccccatagaaaaaaacggtagctaggacatgggttggatagcacttttcactttatatcttttgtatgttttgaattttgaactaagtgaatgtattatctattatacatgttgaaataaaataaaagtcaatttaaaaagacataaaagcaaacagggcccttttgtgaagctctctgtgagattcagagatatgaagatgcttcgggatccccgttcagtgtttgccttgagcacactggctacagccatggcttatttcactgaagagccctcagggagtccagccagctcattggcacacaggagcctctagattacagatgctgtcaggcgtcctgcttttgctgttcccctggaaaggaactttcccaggtggttaacatggcaatagcacaagaggtcatcttgtagtctagagtcagagtggcagtgcctgttttaattcagcttcatatatcttagaaaatattgactcttgttggtaaaagcaagaatagaaaaagtctagacagagtagcttgtataaaatgtctgtgtttacagggaaaattattgtttgtaagtgtagatgacatggagagatgctattcaaggtttctattctcctcgtgggtaaatctagacctatgctgtcctctaatagagcagtcactagtcatctgtagctgctgaaataaaaattaaacataattaaaagttagttcctcagctttatttatttatttatttttgagacagagtctcactctgttgtccaggctggagtgcagtggtgcgatcagagctcactgcaacctcgacctcctaggctcaggtgatcctcccatgtcagcttcccaagtagtttccatgggactgcaggcacatgtcaccacacctggctaatttttgtatttttgtggagacagggttttgccatgttgtttaggctggtcttgaactcctgggctcaagcgatctgcccaccttgacctcccaaagtgctgggactataggcatgagccactgcacctgtataaccccttgaggccagtagctaccataccggattgctgcatggattatagaatatgcccatcattgcgatatttcagttagatggcccggctttagatgatcttgaatgtttcttttggccttaagactatcaacaaccagaaacctcacaattcatttcaatctattcacttgtcttcattcttaatagtttgcacaatctgtcatcctgacatgtgacatgaaggcatgatggttacagctcagataaagttcctgaccgcagatgcctcaaactgacctgaggcaagtgcagacctgctgttagagaagatagcatgggagcaatccatttgttcctgaccctggggactcttaagacagactgagttctctcacatccgggcaaccaccaacttgtgctggtgattgattaagcctttgggtattgtatacatcaaccagttgcagcaggcaagggatggagaaatgaggcctctgggaatgaaagtgtggagtcagctttgggcaaatggaaattgaatggaaggagcatctcaggaagaaggctaagaaggcaaaacagagcttgcattgcaggaggcagacttcagaccaggcttagggtgagggaacaaagacgtctcagtgccccggctgagaaattggacaagaaagacgggacccgtgctcccctacaggaggtgggctgagggcagagctgtttgcctggcagaggaggtgagatggtgggggtttggggaggggcagagttttagttctctgctcaacactgaggggcctggtaggcagaattctaagatggcctccatgatctctgctctctggtgttatgtccaatgattaaattatgttagatgacaaggatgaagagattttgacatgtaa

SEQ ID NO: 30606 - DNA, 2300 bp, Homo sapien
aattagctgggtgtggtggcgggtgcctgtaatcccagctactcaggaggctaaggcaggagaatcgcttgatcctgggaggcagaggttgcagcgagctgacatgccattgcactccagcctggtgacaagagcaagactttgcctcaaaaaataagtaagtaaataaataaataaataaatgaaagagagggagggaggaaggaagaaagaggggggaggaagaaaagaaggaaagaaaagaggaagggagaaaaaagaaggaaagaaaaaaaagaaagaaaataaatttgattagcgatggtaagggagggtgatggtgatgggcagtactgaacctggcctgcatcacaggaagatatatgttgtcatagaaggaagtcaccttgggagctgttcatgtttggggaatagtatatgtataagctcaagctacttgctggccaaggctaggtccttgatttcttttgacattcagaagttagactttttttttttttttgagacggagtttcactgttgttgcccaggctggattgcaatgaggcgatctcggcttactgcaacctccgcacccccgggttcaagcaattctccagcctcaacctgtagctgggattacaggcgttagccactacgcccggctaattttcgtgtttttagtagagacggggtttcattattttggtgaggctggtctcgaactcctgacctcaggtgatgcgcctgcctcggcctcctgaagtgctgggattacaggcgtgagccaccgcgcccagccagaagttaattctttaatagcagtgtaagtagggggtaggaaaagagaaactttaatggggtaactgtaaaggaaaagacgaagaagtctctccatttactggctggattctatctaccccatatggctaccaacatttgtctgagtcatttcctcaatggttgtgacagctccctcttctgcttttagaaggaggaagtagaaagtttaagagcttactttagaccaccttttgcatatagaattcatttcattttcaaggccccaagggtatttaaatgggctttaaacccatttaaacctggctttcgcctgggcattttggtctccacccctatgataagacagtcccctccttttatcagggatagaagctaaggataaactgtatcatcatctagactcaagtcagggcgttaagcaatgtgctgagcagctaataatgttgactctcttccctccatccccctatcttgtaagaaatagtatacccactttacagattagggacttgacgataggatttattgaacttgaccttggtaaacataatccagagggtggagttcagacaaaatccctttctacctaccaaccagcctatgaaagatcttttagtaaatgggacctaaacttcaggctcactgctcctctcactttcacaatcaaccggtaaagaagaaaagtaatggttgccactccagagggggtggaagtacagaagcgatcagaggagaggaacaatctttaacacagttggcttaacgcagtgcctgtccgtttcgcgacagttcaaacgactactatggggccacggtttgttctgggccaggaaacacacgtgcatcctgcgcatgcgtccaaaaggaacccactgcccctcctgctggacctctttagccaagtcatcaaccagccctcaacatgcccgccctcaagactaaaccctcggccaatcgggaaaccggagtcgcccggcacgtcacttattttgcatatgccctcctctccccgcccccatgcttggactccgccccgtctgggtcagggattgtcacctaagagcttcgtcctggcacctgattggctctctttccagctccgcctccatctcctcccgccgcccgccccttggcgatcccacagcggcaggcagagcaaaatacgcaggcgcaggcgcttcctctctcttctagcggcccgccctccctcctccctctccctcccctccccactcccttcccctcctctccaggcctgcgcgcgcgcctcttcctccggcacgcgccgctgctagccgagcactctcgccagaacctctggctcgcgcgtgccttttcccctcaggttgtggggagagcggaatcctgctccgccgtcgcagcagcagcggcagccccggcagcctcgggcgacagcggcggcgcgcgagcccccgggcggaccgtaccaccgctcgccagcacgcagggggagccgcccgtctcgccgcgcacgcctcggcgaccccgcggggctg

SEQ ID NO: 30607 - DNA, 2300 bp, Homo sapien
tgcctcggcctcctgaagtgctgggattacaggcgtgagccaccgcgcccagccagaagttaattctttaatagcagtgtaagtagggggtaggaaaagagaaactttaatggggtaactgtaaaggaaaagacgaagaagtctctccatttactggctggattctatctaccccatatggctaccaacatttgtctgagtcatttcctcaatggttgtgacagctccctcttctgcttttagaaggaggaagtagaaagtttaagagcttactttagaccaccttttgcatatagaattcatttcattttcaaggccccaagggtatttaaatgggctttaaacccatttaaacctggctttcgcctgggcattttggtctccacccctatgataagacagtcccctccttttatcagggatagaagctaaggataaactgtatcatcatctagactcaagtcagggcgttaagcaatgtgctgagcagctaataatgttgactctcttccctccatccccctatcttgtaagaaatagtatacccactttacagattagggacttgacgataggatttattgaacttgaccttggtaaacataatccagagggtggagttcagacaaaatccctttctacctaccaaccagcctatgaaagatcttttagtaaatgggacctaaacttcaggctcactgctcctctcactttcacaatcaaccggtaaagaagaaaagtaatggttgccactccagagggggtggaagtacagaagcgatcagaggagaggaacaatctttaacacagttggcttaacgcagtgcctgtccgtttcgcgacagttcaaacgactactatggggccacggtttgttctgggccaggaaacacacgtgcatcctgcgcatgcgtccaaaaggaacccactgcccctcctgctggacctctttagccaagtcatcaaccagccctcaacatgcccgccctcaagactaaaccctcggccaatcgggaaaccggagtcgcccggcacgtcacttattttgcatatgccctcctctccccgcccccatgcttggactccgccccgtctgggtcagggattgtcacctaagagcttcgtcctggcacctgattggctctctttccagctccgcctccatctcctcccgccgcccgccccttggcgatcccacagcggcaggcagagcaaaatacgcaggcgcaggcgcttcctctctcttctagcggcccgccctccctcctccctctccctcccctccccactcccttcccctcctctccaggcctgcgcgcgcgcctcttcctccggcacgcgccgctgctagccgagcactctcgccagaacctctggctcgcgcgtgccttttcccctcaggttgtggggagagcggaatcctgctccgccgtcgcagcagcagcggcagccccggcagcctcgggcgacagcggcggcgcgcgagcccccgggcggaccgtaccaccgctcgccagcacgcagggggagccgcccgtctcgccgcgcacgcctcggcgaccccgcggggctgaggcgtcgccgcgcccggcagcgtgagcgcagagccggcctcgaccccgagctcggagccccgcgggccgcgcccgccgccggccccacccatccgggtcgaggaggccgaggccatggctgagacggaggagcggagcctggacaacttctttgccaagagggacaagaagaagaagaaggagcggagcaaccgggcggcgagtgccgcgggcgcagcgggcagcgccggcggaagcagtggagccgcgggtgcggcgggcggcggggcgggcgcggggacccggccgggtgacggcgggaccgccagcgcgggggctgcgggcccaggggccgccaccaaggctgtgacgaaggtgaggggccgggaggccggcactcggggcccgggccgcgcgccggcgccccatgtgcccgcccccgcctgccggggaagcgtccgggaggggccgcggaggccgggcggacgggcgcgggccgccacgtgacgcaggctctccacctcgggctgggctcgccagggccgggaccccttccgatatccgcggtggagccgcccttcccaccccgcgtcgctcggcgttagccaaggcccgggcggcgccaccctccgggggcactaggtctggggccgcagtgcccagcacagagcagcgtttatcgggtgacgtctaggctgagtaattccgtgtgctgacctcagcccagtagtttgagctgaattttcg

SEQ ID NO: 30608 - DNA, 2300 bp, Homo sapien
tttaggatttttagtggtaactaccctagggttgggtttaactccaaaagttttcatgagagagaaaattcctaaagcttttatcatttaaaatatttttgacagctgagtaaagacagaaagacaaggggcccttgtctttcacttgtgctttgtctttttcattccctatttaactttcctgttctttgaagcatgaattctcagcagggccaattttatcattctcaaggtggtaaaagttgcttcttatggaatgaaggaatcttataccttaacagtcatttgtggcccacgaaaagactagaatgcataaacagatgtatagtatatcgcagtattaaaatttcatggagtggggggcagttaggaaacagatgtctgaaaggtctccttagggcaataatgaaagtttaagagcactactttaaagaagtgtatactcattattttatttagaatgttataaagaataacatatcactccaaatcttgttatgcagaaatcacagataactactctatgttaaatttttatttttatattttttagagacagggtttcactctggcccaggctggagagcagtcatgcaatcatggctcattgcagcccctcaactgcttgggctcaagtgatcctcccaccccagccttccaagtagactaccggggcatgccacctgtttattttattgtagagatgagatcttaactatgttgcccaggctagtcttcaactcctgggttcaagcaatcctcccaccttagcttcccaaagtgctgggattgcaggtgtgagtcaccacacccggtcttatgtttttaaatcatctttagaatctttttgttttgtttgttttgtttgagacagagtctggctcctgacttcaagtgatctgcccgcctcggcctcccaaagtgctgggattacaggcgtgagccattgtgcctggctagaatctttttttctttttcttttttttttttaagacaaagtctcactctcttgcccaggctggagtgcagtggcacaatcttgggtcactgcaacctccgcctcccgggttcaagctattctcctgcctcagcctcccaagtagctgggattacaggcgtgcaccaccatgccccgctacatctttgtatttttagtagagacggggtttcaccattttggccaggctggttttgaactgctgacctcaggtgatctgcctgcctcgggcttcccgaagtgctaggattacaggcttgagccactgcacccagccctggctagaatcttaaaaaataaccacactggcatttcattaaaaaattctttacatatggcatcttaatcagtccaccaatcaggtaaagaagtaattcatatttactggtagggaaacaggactaaagtcctattctgagaggcagtccctgatgagaccagtcatccaagcccagcagattccttttctacttccagtaatttggcttgtggaactcatcatttacgtagattactaaagttgtacgtggaggaggagttagaatactaccctagaaaaatacaatgttttcacttttcttttttcttttttgagagccggagtctccttctgttgcccaggctggagtgcagtggctcaatatcggctcactgcaacctctgcctcctaggttcaagccattctcctgcctcagccccctgagtagctgggattacaggtgcctgccatcatgcccagctaagttttgtatttttagtagagacagggtttcatcatgttggcccagctggtcttgaactcctgaccccaggtgatccacccacctcggcctcccaaagtgctgggattacaggcgtgagccaccacgcccagcctgttttcactttcagacattttctgaaatgaattcccttctgtggtctgacccagagaccctggtattgttttttctataattgttaaatgattgggaatgcaagaatagcttattaaaatgctgagcatttaaatagtttatctaaaaattgttataaaatattagttacagaaaccccagaaccagcgatgactagtggtgtgtataggcctcctggggccaggttaaccacaacaaggaaaacaccacaaggaccaccagaaatctacagtgatacacagttcccatccctgcagtcaactgccaagcatgtagaaagccggaagtaagtactataattaattgcattttgtttgggacttctgttcctaggccagggagtgggatataggggatgtgcatacccacccaagggagagactact

SEQ ID NO: 30609 - DNA, 2300 bp, Homo sapien
aaattagcacttccggtcttttttttttttttttttaaattttaatcagcctacatcatgctttgagaaaactagcacttcctttaatgaaaggtctaggcaacaaatcacaacactatcaactgtacctgtaattttgcactaacagaaatcacatgtttctgttttgcattgtaattgcaagcatcttgaaatactgtttgtgttcatcagtactttagttatttatattatttgttaactgttgatttatcaagagaaactattaggccacatgttcatgtttcatagttcaggaacacaagtcaaagacaaacttctgtgtattaatgattcagtccaaagaaattctttatattccaaaatcactttgcactctgaaacataatagcactcttcatctcagattctttcatggaatcataacttctgtagaaatcagcatgtcctttctgttttggttcagccacagcaaacagagagctgcaaccccagggatataaggaatgctcccacaatatgaaatcacagacacttggccagaagaccacatatctgaggttttgtcaaagcactgaaagccatattagttattgtctgctactttaatataaagcacatctataattacacaacaaatttgtttttaatattttgataactttcaataaaatggcttccttttgtaatcctttatattttaattttaacattttctaaaaatcacccataaggtttgggaattatatctcaatacagctattatttagagtagtctaatgaccagactgccaaagggatccatggcttacaaaaaggttaattgtattagttcgttctcacgctgctatgaagcaacacctgagactgggtcatttataaaggaaagaggtttaattgactcacagttccacatggctacagaggcctcaggaagcttacagtcatgtaagaagcaaacacgtccttcttcacatggtggcaggagagagaagtgcagagcaaagtggggaaaaaccccttataaaaccatcagatctcctgagaactcactatcaggagaacagcatgagggaactgcccccaccatctgatcacctcccacgaggtccctcccccaacacttggagattatcattcggattacaattcaagatgagattttgggtggggacacagccaaaccattatcagaacccctgagttaaatagtctttcatgttgtattctaagttctctgatatctccaaatccttattagccatgataccctctcttttagagtaattccactggcttttgttagttgttattcccttcctaaatattttgtttccagtttgtaaacatttttaagagaagtgaaacgcaggcttcatctaacctaaggagctctgcttgaagctcttcccttgattaatcaaaagaaaaaaatactagaaaagactaaacatcaatcacactgctttgttttaatgttacctaatcattaatggtttttcattcctcacgtatttcttgatggcctactatgtgccagataccatggattcacgtttcagtgttctggccagagataattatactgtggcaaaagtaaagtttataagatttattgacaaaactaagtctacagataaaatcatgcattatctgtattattttgttattttccaaatgatttcaccactgattgttttttatttgtagggagcatttagtgggtggaaggttattttacatgtggatcagtctcgagaagcaggcttcaaacgccttcttcagtcaggaggagcaaaggtttgtatcaaattaatttactgacctttttacatgaataatcatctaaccaagattgctatgatgagttcttcattttctctactttttgaaatggtaatccttaagtacacattatacagctgaactactttggaatactggtagattgtgatactaccttgttttttcattaggtgctacctggtcattctgtacctttatttaaagaggccacacatcttttttctgacttgaataaactgaaaccagatgactcaggagttaatatagcagaagctgctgcccagaacgtgtactgcttgagaacagaatacattgctgattatctcatgcaggtttgtgagattctatccttgacctcctcattaccagagatacgtttatgtgcatagataagtaactgcacaacaaaaccttcagctcatgattagtagaagattagtctcctgttattctcttctattccagccctttcagttttattctatttgtgtttt

SEQ ID NO: 30610 - DNA, 2300 bp, Homo sapien
tcacgtggaatcattacaatcgcaccataaaatgcacttccctgtaattcagcatattgctgttccaccgtagactctggaaagtggttaccaatagccaaaaggcccttctgataaggcagcctttacagcaagcctcccatgtaatcatagtgcttataatttcaagtaattaaaaaatataactactgttaagtaaagtaaccatagtgtttgaaacattaccctgtttccctaacctgtataattaaggaaaatcacatttttaaatgtaccaattactttagtatttttaaaaaatttcttgacactgttgaatttctcctttgaagttttagttctgtagacatgtagtcaaaatatgtgttcctagctaaaacagataacttttctggaagaaaccttaaacctttttaaaaaaaaaaaatgtccctaggttcatttatttaatatttttaatgcatactgtgtgctagatggtgggcatataaaggtgagccacaacttttatggtctaacttatggatttaatgagtttggatttgttattgctgtttatttaaactgtcacttctattccttaggcagtctcgtcagacagtacctgatgtcaacacagagccttcccaaaatgaacagatcatttgggatgaccctacagcaagggaggagagagcaaggcttgccagcaatttgcagtggcctagttgtcccacacaatactctgagcttcaggttgacattcaaaacttggaggattctccttttcaaaagcctttacatgattcagaaattgctaaacagggtaacaagaaagaaatctttgcatttgtttgtattaagtacatgttgacctcttaaaaataaacagatgagcatgttgtagttctctgatctgaatgtgcaaacaaaaaaaacttcgtagatatttctggttttggtttaaacttgagccagaaaaataatttgtaaattgaggtacttcatcagtaaattgaaaaacattttcataaatttggaaatttagaattgggcgtttttttctagacatggtgtctaccattgttcttttattctagctaaccctttttgtgtttgtggagttaatgcttggtttttcttcctatcatcttattttcatttaagtcttttgaattctgcctagcacatacctacatttgttctttggattgtatgagtttctttctgaattctcctattttttttcttccttgagctttaccttaaaaacaaaattttcctatctctcatcttttttcttccttttcttctttttcacattgcatgatgacctcccattagatatatagatttatctctgcttctgcttttctccaagtgtagaattgctctcatgttacaaatttgggttacacttaacaatgaaaacttggtatttaaggaaaatgttgggagaagcccacagataacacacttgctctgtttaatgctaataaattgcattttttctttattgttattattgtcacatgcagatgggatgcatttatttataagttctggggataggatacttttttgcctgtactttttacattccagagtttgtgcttgacttcatcttgactaagacagatgagaatatttcctagaatttgtttttagtcttatttggatcctgtcacactgcagcattttattgtcctcagctgtctgtgatcctggaaacatacgtgtgactgaagctcccaaacacccaatctctgaagaactggaaactcccataaaagacagccacctgatccctacgcctcaagcccccagtattgcctttccactcgccaacccccctgtggctccgcaccctagagaaaaggtttgttgatccttaatatggtgatacagcttttgcatactgctgttaggctgtattagaaatttgttgatgtcaatatcaaggcttcatcaaatgttgaaaactattttttgcattgtatcattatttgtatatttcataacttagaagactgagtaaaataccactataaaagaactgtgtatctgatcatttttaatgttaattttttctaaagtaaaactttcattccagattataacgatagaggagactcatgaagaattaaaaaaacagtacatatttcagttatcatctctgaatcctcaagaacgtattgactattgtcatctgattgagaaactaggtaccagtattttacttaaatccaaaatgtcccatataataaccatatttggaagtcaaatgtagtcaatattaatatcatttgtaaagtctagaa

SEQ ID NO: 30611 - DNA, 2300 bp, Homo sapien
tagagacagaccctctctgcttatctggagacacaagatgggagaacttgccccctagtggtgaactcttactctaaagacaggtcactcctctggtatcaagttccggctgggtaaaagctaaagggtgcattttcttcatcttcattagcagcatctatgaatctccttctcttgtgaggtctctacttggcccagaaatgccaggaatgggctccctccccggtgtggaacttcacacagagatgggcagacagcacgtgcccaggagcagtgtggtgtgtcaggaaaggcacgggcaagtgacacagtccctgaacttcactttccccatctccataacatgagacaatgatacccatctattatagggttgctgaaaagagtaaacgggaatagtgtgagcaggagtcccatgttaactgtaaagtgccctagaaatattaattgttattacagattcaggtcagatttgcaccttaacaattaactgtggtttcttttttttcccacctctagtgatttttgtttttttgcttttaaggctttcttcacccttcccccagcaataggcctttacctttgagccccagtgttaattgattctgactcatttctggtaaaaaaaaaaaaaaaaaaaaattaatgatatttattaaagcacagtaagacagattttattccggaccatcaggataggtatagcaaccatggcaatgggattctgaattaggagagagagagtgggctcaactctaaatacaccatgggcaagtgggaatttatagccaaggaacaaaaagcttggggtcactggataaaaaattactaagaaggaacttcaggagtaaaggggtttcttgctgaaaataggtcaaggtgatcagacatcaccttggatggtagaggatgaggaacctgatcagatattgagggtagagggttctaactggattttccaaggaaatgcacagataaacctacgagaaggttgaggagtctgactaaagtttggccaagcaaagaatctttgtcaccttccatcggtgtattcaaaaacttaagactcaagctgctcattactatctttaggctctaaaaagaaaagaaaaacaaaaacaatcaagggacatggcattatacttttacattagtaaatccaaagtcattttctcaatctcagcagtgaataataaaatgatcctcattagtatagtggctagattttataaaataagaaaaaatttttttaaaaaagaataaaatgaaaagaagcaacaacgaatcagttttccgctggttatcactaaggtttgcaggcccatcttatcccctctccctttgctctctgccatctgaatcttaggttcagtcccagaatctccccagtactgaggcagatgcagagaaagagaacggcgatgtccactgaaggggaggaggaggggagaccattgaagatcttgacaaagatccctttgcattagctgtgtaataagtcatcctttcttcccttgccatcttgtggctgtgttaggcggtgattctattcctgctgtgttggagggaaaccacccagtccgtagtcagaagacctggatgcagtattaattctaccacctactagccgtgtgcccttgaacccatcatttaacttcctccgtttttacatctacaaaatggaactaccactatttgcctcacggaattgttttggataataccttttcccgtgcatgcctggtataagacaggtgtaaaataaatatctattgaggaaatcctttctttccctggcttttttaacagtaaaggagtattcctggcctgtggtcctacctcttgaaccgacggcgctgggcctactcgcagcggagactaggcccgcccagcaaagccctaaacccaaagggtccggcccaagctttccctgaagccccaccgcccacagactgctcacctccacgtttgacatttccgctcttctgctgcagctgccgatggcgtcacttccaccggaaaaggcaagcgcggccgcgcggttggcgcgaaagtcggttcccgttctgggcaatttccgggttctccagcgtttgctttggggtaggggcggcgccgagtcgggggagggggctgtgcgccgggctggcgcccgaccccagccaccgccctgcggccagcgcgtcccccgactcgccgcccggagaccccgaggctccaacgaggtaagtgaggcgcggagtggggacacagctcctccccagccccaactggggttcgcgatgccttctgtggccttc

SEQ ID NO: 30612 - DNA, 2300 bp, Homo sapien
tgtgcattttcttcaattctttgttcaatgtgccaagaacctggacaactcacagtcaagactttccatccagtaacacatctgtattcgttttctaggactgctgtagcaaagtaccatgaactgggtggtttaagcaacataaatatcttgtctggtacctctggaggctagaattccaagatcatgatgttggcagggttgggtcctcctgagagctgtgaggagaatctgttccaggccactgtcctcgcttctggtggtttgctgctgatctttggtgttgcttgactcacagacacatcactccaatctctgcctttatgttcacatggcctgtgtgcatgtcttctgtgtccaaactcccccttttcatgaggacaccagtctttttggattaggggtccaccctatcccagtgtgaccgcatcttaactaattacattttcaaggtccctatttccaaataaggtcacattctgaggtaatgtggattaggacttcaatatatgaatttattgaacccacaacacttttcaatacctagacaatggaatcaaagaggctgttttactcatagggtctttctggttcatctttgtacctgcaggttaccctgactgggcccctagacctccttccatctctcaaccctctcaccttttcccagcaggctctgcatcaaagggaatgtggcccctttagtgggggacctgggccatcttggcatggtaatgcgtcagccccagactagttaccttaagtctctgagtctcagtttcttcatctgtagaatgagataatcatattactggcctctccaagttgttgtgaggattaaatgcaacagagcctggagagccttcagcaagtctttgatgagctatgagtgcacattacacatttgctgtcaccattcctattagcagagccaggcagttggagggccctgggccaggcacactgcccagccctgtgtctacctgcagtgagattgtgaaccagctgtttcactcctgaggcctctagtccttatctgtataaaatgtttttggaaaaaaattctccctcagtcctcttcaggccacatatttgatggttcggtgaggggcatgggtcatcctaactatggctcatggctctcctgcgttaggctcacctgggctttccctccccagagaacctggcaaacaaggctgacaaggaccagtatgagctgctttgcctgaacaacacccagaagctggtagttggatacaaggactgccatttggcctgggtcctttctcatactgtcatggcctgaagtgtgggtggcaaggaggacttgatctagaagcttctcaaccaggtccaggtatccccacctgccatcttcccctctggcttagtgctccctgcttggatttggagggaggttaacttccttgccttcttgtcattctggaagtcctggtatgttcagggtacagtgggagccatgccacatgtgatcctcttcactgacaagccgctcagtctatatgtgttatatacagcagaggaataaaacctcatctggaaccacgaacctggtggactgaagactctctgcagaagttcttcttgtcccatttaattatttttcattctaaacaggtcctcaggatgagttcacatgaccctcttcctccacaaagtcctcccctgtcatcccatggcatgtgatcctgccctcctgacaactctgccaacgctctctccttagcactgggggactcagagatgaacttggcaaagacttgtcttgagtcattcacagatgagtgtgggaggcacacgagtatggattcttacctgatggaattggactacctcatggacatggatggcgtcctttatggaggacaaagggactgatttgcaggatgtatctgggaaagttcctgggccctggggagtaactgtgtgcatcctaaggaggtggggggtgggggttgtcagggagggcagcaggtggcatttcatgtagagtcactgcaaaagcaaacaccagccagccatttgaaagagcacgtcggtaggtgctgctgtgagctatgtcaggagtggctttgggccagtcaaccggagtcataggcaaagagccctttggtttttggaggccagaaaggggaaggaaccgtttggtgtcccacagctggtccttcagtggcaggcttggcgtggggagaagaggagctcaggaagtctgattgcagcccatggtgctggatcaccagcctctttaggatggagaccgccacgggtgcttagggtga

SEQ ID NO: 30613 - DNA, 2300 bp, Homo sapien
ggactcagcctggccagtaggtagttgctccctgctgaggggctctggctaggctatgggcctgtggctggaggactggcctcagcggggcttagtctacgaatgtagatgggctccagaaaaggagaatcactgaccatcttctttccatgccctgcgttgagcttccctgagtttgtggcatgggctcaacctttcgtaactgcacttcctgctctctggcagaccctgcaagcttactacagggcctgtccatgcatcagctgtatgtgtgcatgctgctctgctgggtgccttccagttagccttgcccctgacttttcctgctcatctcacatccttacctcaaggtctccaaatgaatccagaccactgcctagagcctgctgcaggggcagtaggaatatggccctcatgctaacagtcttctttccctatggctcaagcacaaggggcccgtggacgggcaaggggggagtaagacagggcagcagtggtcactctccctcgctggtgaggctgatgtgttgggaaagccagacttgacttctgtcctcactgtaaacagaaagcttctgtagtggactctaaagtgggaggtatgtaacccctttgcatatgagataatcttttggagtgtgggagaacataatctaacttccagttatatttattgttattgcaaaagattaacaaattatcattcattcatattgaatgtgtgaattggccctatctcccacctgagtctgcagtcatgacagatggagcctttcaggtgtcctaagggaagatggggttcacctcacaatgctaaaggtgaaaaggggagtgccgaccctgccctttgttttggcatttttatttccatactttgtggtttgtatgtgcccagttaaacggatgtacagattagataatctggctttaactccaaccttcacgagatgcacacatgccttaaaaagattcttacaaagaaactagaattaggagacaattctgacaacacaaaaacaagtgaacaaaaatcaaatgactgacctgacgtgtccactaggcttgatatgagcttggtcaactaaaacatgagacagaatgaatgaccatctggtcaggttggataagaagtaacttttggcaaaatctctgaagtctggatttacacttcgtggaaggaatcttgacctttccccaagtatattatgccttgagataataatcctgtataaggccgcataagcaaaacgacatttgaaaatgagtttcatctttagctcatccttttacaaatttctattccttgtgcatgattgaagtgtacacattttttagttaaaatataagcatatagaaggcacaagttcaatatttttcatgataaggatgtgtaattaaactggttaggagactcatcgactagagggggacatggtggccccaggctgtaagaacaggccacaccgtccactgggccgcttgctttgtgctaagatgacactttgttctgagcctcacagtgtcttgaccatgttcctggaaccttcttgttggagggagttcatcttcccctatgactctgtccctagtctaaggtgtcccacaggaagcttgagggcgggaagttttccagcccaggagcctgagctcagcggggcaggaagagggagcagctcctccgtgggggacctttgagagcccaggagcaggatttcgagggacacctggtggggagcaaaaggtgctgagtctgtctttgaccttgagcccagcttgtttctcctgcatcctcccccaaaaggggctttgcctgtcattctgcagttctagtgtggggtctgggcgcagttcttttccctctccagcctcggagtcttcctctgtggactgcgcagataggactggtggcacggaccagctctgcagccctggagtcaggagcagagccccccggctcccagcccgccgtagccgctcctggcaccgagcgagccgcgatgacaatggctgcattgtgcttcatgtcccttcccatcaacatttctgtgctggactccttccactcgcgggtcgtctccagagctcagaaaatgaggtgatcagtgggacgagtaaggaaggggggttgggagaggggcgattgggcaacccggctgcacaaacacgggaggtcaaagattgcgcccagcccgcccaggccgggaatggaataaagggacgcggggcgccggaggctgcacagaagcgagtccgactgtgctcgctgctcagcgccgcacccggaagatgaggctcgccgt

SEQ ID NO: 30614 - DNA, 2300 bp, Homo sapien
actggcaagggcttctggaaaaatcattttgattaaagacatttaaaacaaaaaaggagtaaaactatgtgtttaagtgtctaaataaaagatggttgggctcactttaaggatttacataaaaagaaaataaattatagatctagtaagaaggcagctataatatttcaagggacctgttgatgtaaagatgagggcttacagaagcacaaagtcaaaaaggaacataacctgaagtaacagtgtaatgataagaaataaacccggaatgtctgcactgaaatcccagctccatgacttactggctatgtggcccagggaagtgacttaacctttctgtgcctcatatttctcacttgtaaaatggagctgagagagaaagagagatgagctgcccatgtgttggagtagacaattataccagagatgagcaaaaatggaaataataatcaagcttttgatcattcagtacatagtatcaccaagaagctaaacccagagaaagtgcccaatccctcagcaaaagggtcatgcagttttatggacccaggacaggaaggaagagcattgagtactgagtcagagtgaagacgaatgttttcaaggttcccatcttcccccagaaaaaaaatctccacagaagcacctgaggaagacctcaaaggaagtctcaaaataaagagggctctgagcaaaggtcatgggctaggaatgaaaacaggtgtaagaagagcgtggccagcccaagagagctgtgtccttgacagcagagtcccctccagagactgcattgcactggctgtgctctgagtctggggtggcgagggcggctttctcccacggagcctgccaggttaagccttcgtaattgcctacggtaaagtcacgtaggatttttggccaggagctgggcacctcaccggggaaaagagaaacacaatccatcactccctctatgcagaaggaataggaatgtggtggctaagtgcccttgcgagggagacagagtcaactgaagccagcagggctgtgcgtggtctagtcaagttctggccctgggtccgtggagtcctggtagccactctctacttgtgtgggttgaggtgggccttccttggaagtcaaggcttcatccaggactggcctgttctctttcaggcaaacgaagcggatgctgtgacactggatgcaggtttggtgtatgatgcttacctggctcccaataacctgaagcctgtggtggcagagttctatgggtcaaaagagggtaagttctccctgggaccccaggaaggagttgtcatccttattctatatgctgagtgctgtgttttacaggcaggttttggatatcagatataatgaacattcatctttggagagtgagtagagaatgaggggccctgtcagctgccacagccacacatcaaggcctctgggggctttgggctggctgaggactggtgctcctaaaactgagccctgggccaggggcatatgcttatcagagaaacacagcaggctgtgtgcagcttgacctgaaggctactgcggtctactgatatgtctagggtccctggaggcctctggagccataggtaccactcacacaggaggggtcactctggagcacacactcagaggccagcagccctgcaagtcttctgagatcaacctgactgtctctgggcctgtgccaggggacatgaaatactttgatgggcctctgttaccacagctccagtttcctggtggctgaggttggtaggtgtaggcagacacgctgcagggccaggggaggcaaagcattcaggacacatgtgcgtgtggccttcttgcccctgtttgcctggaggggtaatattataaatattccttctatggtcttctctctcccctgcaaccctaggaaggttttcctgattccccactccttatcgcccagtccagtaaaagcatggcctctccgctcccctccctcctcaagagtccggtggtgatgagccatgtttccctgcaccaggctgagggccttccattcacactgtgcctttgcagatccacagactttctattatgctgttgctgtggtgaagaaggatagtggcttccagatgaaccagcttcgaggcaagaagtcctgccacacgggtctaggcaggtccgctgggtggaacatccccataggcttactttactgtgacttacctgagccacgtaaacctcttgagaaaggtaagctggcaggagtctgggtgccctcgagcagctgcctctgctccagatgcccacacaggctg

SEQ ID NO: 30615 - DNA, 2300 bp, Homo sapien
gtggaagtattatgtacactgtcagacttcaaagctctgattctcagtctgtctgctcagtgaagagagacatgttcacctgagtgcgcagaatgatcaggattatggggcccccaatggccctaaatcctccccaacacacactcccacagctgcaagccttgtgctcctttcccctaaatacttcagtgcctatttcctaagaataagacaatctcttgcatacccacagtatgattaccaagatcaggatcttttacattatgtggatttaatactcgtcacgtccacagtccacatttaactgttgtcagttatcccagtaatgccttttatagctatttactgtacttctgggttgtgtccattgagaaggcctagaggcaatggcataccagcaggagtaagcaccaagatattggcttgtaagtactcttctttactaaaaggaaccagaactccttggaaaaatagctgacttcagggctggggcaggaaaaatagatgctgagcctagaacaacacactgaagtgctcaaacagtgatgggacactcaaagcatacaagaaccaatttgaaggatctcctgttgccaagtctgggaattttgagcattaaaataaataatgatagcagtaagggataatagcccattgaaagaaataagaatgcatgaggcaatactgattaaacaaatgaagaagggaaaactaatcaatgtggaaggaatgatagagttagaaaactatcacttggcaaccaatatattgataactgattcaagcaagaatcaatgggtgttaagccgggcgcagtggctcacgcctgtaatcccagaactttgggaggccgaggcgggtggatcatgaggtcaggagatcgagaccatcctggccaacaaggtgaaaccccgtctctactaaaaatacaaaaaattagccgggcgcggtggtgggcgcctgtagtcccagctactcgggaggctgaggcaggagaatggcgtgaacctgggaagcggagcttgcagtgagccgagattgcgccactgcagtccgcagtccggcctgggcgacagagcgagactccgtctcaaaaaaaaaaaaaaaaaaaaaaagaatcaatgggtgttaacttgtgggtgaacgttggacagccataatattaataaaaacaaacaaaacaaagcaaaacaaacattggccagactgagcactccacacctgacccctcagtatcactaagtgctagcagagcccactggaattcaagctgtgaatacttccctgccttctctcatgttcattccccaactcctcacttttcctgggcaactcatccagaatgaaccggctcagcaccagcccctccaggaagccttcccagatggcataccctgtcctacaagaagactcctctgttcatattgccattatgattgaattcaccacactctgtaatacactttggctacagaaactctttgagctctttttcttcatcttatattcccagaacctagtgtagcacatagtacacagcagttgctaagaatttgtttgcagaaatattgggttgactaattttcctttcttccctcgtattattgctttttcctttaagagagtgttaccctaagcttggctctttgccacccttgatttcttttggtacttttctgagtagagctcccttctttaagctttgactctcttactctttgcaatgactcaaaaattcttccctcctgcatagaattaagataggaggcctgacatccaatctcaattccattccagtctatttcccaaggtgtcacttttatgtagagagtacattggcattgcaattgtatttttttacgtgtgtatatggatgtcctcatatattgtagttgtatatatacaatccatatacaactcaactgtcctcatctttctgtcaacgttccctcctcttctcccagcctctatccttatagagaatcctgctatactccctgcccatcaggcctagattaagtctgtcagtcaatatcttatttcttcaaaacgtgtcttttttcaaactaaattttgaaataattgtgtgtatttaaggtagacaacatgatttttaagagccaaagtaattttgatgtattgtaagtttgggaactactggtctaatacccctgacttaatatcacattcctgataaatattactaaatgtaagtcacatcatgtctgattcatcatacttatattttgcaccttcttaccttcttctgttattaatttgttgctttttcaacttatatt

SEQ ID NO: 30616 - DNA, 2300 bp, Homo sapien
tgctctgttgcccaggctggagtgcagtggcatgtgatcacagctcacggtaacctggaattcctgggctcaagcgctcctgcctcagtctcccaagtagctgagactgcaggcatatgccaccatgcctggctaattattttttaattaaagaaaatgttttaggccgaggtgggtggatcacgaggttaggagatcgagaccatcctggctaacatggtgaaaccccgtctctactaaaaatacaaaaaattagccgggcatggtggcaggcgcctgtagtcccagctactcgggaggctgaggcaggagaatggcgtgaacccgggaggcggagcttgcagtgagccgagatcgcaccactgcactccagcctgggcaacagagcgagactctgtctcaaaaaaaaaaaaaaaaaaaaagaaaaaagaaaatgttttttgcagagacagagtctcactatgttgcccaggctggtcttgaattcttggcctcaagcaatcctcctgccttggcctcccaaagcgctgggattaatagctgtgagtcaccgggtcctcccccagttcctctctttttccttgtccctgtgcatggtgaggttttgtgtggccctgagtggtatcaagctaaataacaagcagagagggacgctctaaaagaaaataatatttattctggaataggcattgcaatgggactacgcatgccatagtcaactatgtgcatattcaggggggtgtaaaggaagacaaagatttttaaagaaaaaatgagtcagattccataattgttttaagataattatccttggctacaaggatcaaatggcaaggatggcatcagtactaggttggacagggagttgctgggtagccgtcctaacagatgtatttttttgtgtgtaaggttgcgatggcctttgtgcaagtctgtggtttttgcagtcttttgtgacagtttttgtcatcaggcatgggtgcctgagaaccctccctccatggcctttcaccagctccatttttctgattaaaaaaaaaaatacaagtgactccattttgatgctgacaactttttcaatggcaatgtggaactgtaataaacttttttcaatctttcagtgacactgacatcttcatgtctctactcagccatacaattaaattaaataatgtgtacattttaaaacaatgacagctgtttaatgacagagactgtgaactgggaccctctaggctggccacttttggtgttttatttgggccacaagtttttgaatgctttcaattacctacagaaaatttcaaaagtggaaaatttcctataaaaatctgcctttattgcttctcttgaaaactggaagaaccggccacccaggtcccataacacctacctggctgaatagggtcggccctactttcagcagaaatacctcctgcagttttcaacagccccagctctcctgggcgttgattttcctagttgcttcctttaatgcagacatttgagtttgcagccctagattgacagtgtaggggcactgaattacttagggttcccacatacatcgtttcttacactcattttcttctgcacagcacctttttttcctttaaccactcgcagatgctaactcattcttcaggactcaattccaatgtccagaagcttttctctgaactcatgatggactccgcgtcccattatgtattcccacatcgctccgtacatccatctgtcacatcccttgtcacattaaattcagattaaatgtttgtaggatgcttgagttcttcacaagtctcacgtcacttagcgacggtcgggaactcctcagtggtagtttcgggagccattcattcattttattcatttcatcattctttcaacagtcataacgtaggtgacgacgactgactcatctcttaaaagatgtgtgtgtccctcgacaaataacctgtctgcccctatcgttctgtaggaggacggagtcccagagaactacaactcccatcaagcacttgggggatcgccgcggctgagggagagactatggcttaggaaccaccattcgcgtgaggctctgctccccgcgcctgcgcagagtgcagggccacgtcgcttttgctgtaccggggaccacgcgtctcatccatggcttccgcggactcgcgccgggtggcagatggcggcggtgccgggggcaccttccagccctacctagacaccttgcggcaggagctgcagcagacggacccaacgctgttgtcagtagtggtggcggttcttgcggtgctgct

SEQ ID NO: 30617 - DNA, 2300 bp, Homo sapien
aaaaattcaaaaggttagaaaagatatttggtgaaaagtaatttttcctttcctttccccactacctagttttctcctcagaagcagtgacttacttttttttgtatgtagtcttccggatgttctgtgcatatacaaacatgtctgtatatcctttattgttgtttttttttaaatgctgttctgcccattatttttctcatacggctgatacaacttgggcttttcttattgtcctacatttgtatacatagtaccatctggttggtttatgagctgcatagtactccactctgttgctataccataaaattaaattcttacttaatctggaccgtgttaatagacatttagttttgttattataacctttgcttttacaaacagtgctgcaatggatatcttacagagtatatatgagtgtatttcaaatataaggaatcatggggcctggcttggtggctcacgcctgtaatcccagcactttgggagaccaaggtaggccgatcacttgaggtcaggagttcaagaccagcctggccaacatgatgaaatcctgtctctactaaaaatacaaaaattagccgggtgtggtggtgggcgcctgtaacccagctactcgggaggctgaggcatgagaatcattttaacccgggaggtggaggtggcagtgagccaagattgcgccactgcactccagcctgggcaatagagcgagactaagtctcaaaaaaaaaaaaaaaatataaggaatcatgggaaagacattttacatacctctgtaacttcagaatgtagacagtgactaccaaaccgattgtaatgcataagtttgtttgtttgtttttgagacaggagtctcactctgttgcccaggctggagtgcagtggcatgatcttggctcactgcaacctctgcctcccgagttgaagcgattctcctgcctcagcctcctgagtagctgggattacaggcgcccaccaccatgcctggctaatttttgtatttttagtagagatggggtttcaccatgttggccaggctggtcttgaactcctgacctcaagtgatccgcccacctcagcttcccaaattgctgggattacaggcgtgagccactgcacccagccatgtaataagtttcggtgagtgagtggagtgagggctcgttggaggatgtggatggatagatggatgaattagaattgtggtttgagaccttttcttcttctctttgtcttctttcccctttctcatgcctccagaattaaagattgtaaagaaaaataaagggacatgtttttaaatatcttagcgatatctttgttttttttttcaatgatgacactctttgtggcccagacctttttaaactcccaaggattcagattttgaaattccaggtttgcaagatcatctagtacctgcactagatttttaacttaggatactccaggatatgctttaaatctgtaccttctaatatgtagccactggccacatgtgactgttgagcacctaaactaggactagtccaaattgaggcatgctgtaagtgtgaagtacacaccagatcttgaagacttagtatggaaaaaaagaacgtaaagtatcattaataatttctttttttattacattttaaaagataatattttggatatattagattaaataacttaaaattaattttaccaatttctttttacttttttattatggttactggaatatttaaaattacatatgtggcttctgttattctatatttctactatatttctattctatcaatatttctactgaatatatagagcatttttcccttccctcttcactctttctcctacccccttacgttttcgatctaatctctttagatagtaatatacctagtaatgtatcttccaaattgcttagggtgtgtggtatagtgctgcttttgaaatggagcagttaagtcccaacctgggatctccagactcttaacagtacttaaaaaaaaaagagagggactaataaaaaacatatttgtctataaagaaatgcacaggctatgtgaaaggtaaggtcataataaacccagctggaattgtgttaaatctgtgcaggatactgattgcctgcttctgaactgtgggtatggttggctgtggataatgtagaacatgtaagaaatgatggtctgctgcatgtaccaggccacatctaagagtcttattgttgagcacagccacgtttacactgaatataaactttattcaccattccaggccttgaccttatattcaggaatggc

SEQ ID NO: 30618 - DNA, 2300 bp, Homo sapien
ggagtctctaaggctctcatttccacagcatgatgactgcattctgagagcaatgccagtatctgctccagcgacgtgagcccggtagtcggagccgggtttttgtcatttgaactggaagaattatgacagagtcccccaaagtaagctggaccatagtcagcccagctggacctggtaagcatatgggatgacttggaggcttagaggtgcccagaggggccctgccccagccctccctcccctactgccataccaccttacatgtgcgggaccagatgatcagaggaggtacaggacctgcctaggcttacccaaaagatggtgccttttctggcacacctcagctgttttgtcttgccaccgatgatctcatcaggtcaggatgagagggtacagggagacagcactagatgttaggagaaggtgcaggttggaggagtgttgcatggctgggtaccttggccagtagctcactggcccttctttggagggatcacttatagagacgggaagggctgtgacttgggagtctcctctcctttcagagctttcttcaaccccaagctggatatggtctcctaagagagcaggagccccagagaagtgggtgggtgtctggagggttaccctgagcctggtgccagccacaacggggcagatattctaggtgatgacttacaatccctggggttccaaactaaaggtaattatgagaataggacagttattttgatttgagttctagatgttcattcaaacattcaacaactatttcttaaactctgagctatgtccttgggatgcagtggtggagcttcaactactgcttttatggaacttgtggtcaggtttctaacaagaaataggaaagagattcgaggtgagcacaccagggagacagataggcttgcccaagcaagccccataagtcaaaaagggggtaacaagtgtccacgagaaatctggaggtgaaggttgtgtctcactcctctttctctttctataacacatgcgtgcacacaccatcgtgttcaccgacatgcagattattatctcaaataaatgctcactgaacagccataaatgaacaagaccacgctgtggcagaacagtaagggacagctttgtaaaacctcaattaaccagcatgccttaggctcgggctgtcttgggagtgtttctagcacttggcgtctgctctttgctctcactcactcacaacttggtctgtgtgcctcgatggaccaggcaagtagaggccaaggagaggtcgcccacatgtcctcagatagctcattgtccagatacacctaattgccagggtggggagtggcattgtcagcctggcgaccccgggatcaagaaacgcagggcactgtcctggagatagtggcactggcattcagagcgtcaccgttccttctctcccatggggcaggttaggatttggcataaaatgatccaaatgagcagctggtttgaggtaggcgcgcctgatattggcagctcctctctcgctggccaggtctgcgggggcacccacagactccacaagaggccgcccaaataaagggtctaggcctcgagagggaagggcgggctagaagccacggggggcaagagtcgagccccatctgcgccaagtacgccaggtttccctaggtctgaccgccctgacgggcctcgccacaccctggctctcccccaccttcgttcctttccgccctgtcggtcggacgactgcgctgtgcatcggtgtctcgcgaggtggaggaagggactggcatctaggtttaaaagaccagaaacaaatgtcccctgacaatttctgtcattttctggattcaaaagaggggtagagtggggaagacagacgcagcggggcagcgagacacggtcccccccggggggctctcaggggtacggcgaggaggttctctcctgcccgggtgcgggctcgggtgggcgggcgcacgccccccagccccgcagccccgcgggccccgcatgacatcagaggctggggagcgcacagagcgcaggcgccggcggaggaggcaggcgggagggggccgactggcgcggctctggagagcgctcctccgccccgcgcgccgtccctgcgccccgctccgcccgcgcctctctcccagcgccgcgcctcgggcgtaaagagcgcgcccctcgcaccgcagccagtgccgaccgcagcagcccagccccagccttcctccgcctccgcctctctctcctcctcctcctccgccgccggacacgcagccgcaggccgggaccgg

SEQ ID NO: 30619 - DNA, 2300 bp, Homo sapien
tgcaaattcccaacaccctccacccagccccagcgtctacttctgtgggtctaatggggacccaggaatggctcttttaacggccccctcatgagattgatgtgggtagttcccaaatcctgtgaggtgggctgtcagtgcaatagagcctggggtatgcccatttgtgcttaggccactgagaaatttacaggctcgataggcctttggtatgttcaaaggtgagtgaaggataacaaggtgaagagatgcctgtgaatctgattttttggatggctgcaactaagagtcaatgggcatgaaaaacaatccaagagctcacatttatatgaggcccttatcagtactgagagagacattctcacttcacaagcttggatgtgcaaaaagaaaaaaatcacttatttctttaaatcagttattgatttcaaaccccccatcctactgtctggctggaaattcaatatcaaccatgcttgggtctggctcctagagccatctgaaggtccttggatgcctacgcattcaagggtgccattgtgggtctttggtccctttcccatttgaggctgtttaatggccctgcttctcacctgagcctggaaaccctacaaagccgagaccccagggttaggcccacctccctgtgcacactcgcggctatgccctctcccggccccagtcctaggaagcccactcctctgcaccactccctctccctacagaatcccgctcctcaagggctgaacaaaaaagccggaaaaggaagagtgtgcaggaaccttttttattcaatccttcttttacccttcttggaaaaagcgcaaatacagtgataactaaataccgtatctctatcaattatcctttggcccaaagccctttggggtgatcctccatgatggatgccccatgtaaaggtgaggaatctgatcccgaggaagcaaccattgtggccaatttcacatagataatagctggccaggtctagactcaaaccaggctgtccacttctctctggtccagcccaattgccccagctgagtcattctgaagagtcagcatggactaaaatggtggggaggcccctcttttcccactgatgttcactggcccatgggagggaagtgggggaatctcttgagggccattaaggtgggtaacaaaggcaaaagaaccaggtaacagttcatttacttaccttctattcaactagcaacaacatcacaactattcattaaacagggccaatttatccctatagcaccatgagttaaagagagttgtggagaaaagagacaaagagggaagggttttgagaagaaaaggccctgagaatcctgcacacagaccttcaagggaacagctccatctggtgactgcttagcagattcttgctcaagaaacaaagccatattgtgattttattcaaccactctcaaagatggagagatacagttaagctggaggctgaagccagtcagtatcaaattgatactaaaatattatattgcagcaaatccagaagaaatacatcctatctttcgcaaccacaggaagtaaatacctggaagaaaggtccatctcctgccagtagcaccagacaccagattcattataacctttcatcagagattaaatatggaaacagatcctggaaaagcccttggcaaatcataaatgagaggaagtttttctccatggcataccctggccattcctccactctccagccacatcatgtctccagccctgctacaacttgacagcaataataataactaaaatgtgcacagatctttacagtttaccaagccattaacccatttaaaacacttctttaatcagtaaatcagtggggaaaggcttggctatgctgtggtaacaaacctctcgaatcttagtcacttgacacaacaaaagatggtatctcgctcacagaacctgtggtgatctgggtgactctcaggtcagtggctcagtagtgcccctctgcctgctcagggcctggaggattggcctgagagcccccccaaccagtgtctcagtaactcagactgtttggaacctgaggtacctccatttcattataagctgccatgatggatggggcaggggaagaaagtcctggaagatcccgcactgctaagcaatgctttgtcccaaagtaacgctcttcactctgctcccagcctagctgccgcaagagcggaacagaatattctgtgtgctcaggagaagaaaagagcagatatggttgagcactaaaaccctctactgtgggtagtgaacctaggtgg

SEQ ID NO: 30620 - DNA, 2300 bp, Homo sapien
tttcctgtcttccacatctttcctggaattaggagaggaggctggagatggagcagccatcttgtgacaatgagccagccacagggatgggaaccacaggctaaggaatcttgaagggcctaggtcatgacccctggactacctactagcagacttctaattattgagagacaaataaatctcatttaagtcattttggttggctctccattacatttagctgaactccacccagtaaaggtcaatgaaggaagataagcatctgtgagcatttctgaataggcttttcctttggagatgatgctggcgctgacgggaggcagagggccaggttaatggaacaggactaggtgagggctggagaggctgatcctcccaggggttctaccagaggatcacagtgaggcctcagggtttgagaaagaagctccaggcatggtagccctaaggtgtctgtgaccttggcctgggggttttctggtccctgtttggttcaacttgcaaaatggggctgttggactagacaacttatcagaaggcatagtgcttcaagtctgggcttaggagtcagacaaggctgaattcagggtccagctccaccacttgctagctgtgtggctttcagacagctttcttagccgactgctctagcatccttgtttgtggagtccagactccatcagtacctatacctgtagggctaacgttggggcttcatgaaatcatgcatgtgggtgctcagcagagggcctggtatgcccagcacacaccaagtgctccatgctggtacctgtccttgtgtgccatgttctcccagtggacagatgggacctggaattcatgcctcctctggggctggggctggggctgctacagtgctgtggaaagcctgtcaggatgtacctcgctctgtggctgagtgaagaggccagaggctgcccactgttcaacatctttggaatgctgccgtgtccagggaacttgggtcgcaggtggatagaagcccccaagcccaggccaggccagaccaggcccagaaaggtatcaggtcttgggtagaataagaagcctatgtggtctatctatcctgtggcctttgtcttagccaaagcctcctggatattgacggcatcttttcctgggtttggggtgggcttggagaggttccctctgcacgggactacagaagtgagggagctggaaaaatgcctccagagctggattcctcactgcagctgcttttggaagaaccttcttatccttcccttgagaagcctcactgtctcttctcggcgcttggaatcctgttagtagaaaatcttggggaaaaaataaacccactattcattccagcactgagaaggaggtcagtggggtgcgtcctgtttgtccacaccccccccaccccctctacccctccccccagcaccccaggccagacccagccatgctgacacttgacagcccctgcagtttaccttggctcaggtccagagacttcgggcccagcccccaccttttcaccttgttacccagccccctctccagcgcaaagagcagtttaaatataaatcagtcctcaacacaaacagagctgcagcgagtctcagagccatcaccggaactgagggcccaggttttctgcgagtgcaaacaagcagagactggctccgtaaatctccccaagaacgtcgggaggggtgctggggctcccctccacccccggctcacgttggcccctccagcgcccgcctcgggcaccctcatatcccagccttcctgccccccagccctgccaacctctttctccatcccctccactcacccaccttcgcttcgcccaccctctcttcgccagtccccaggaacctccacccccttgcaacctcctgcccccgcacagccctcacctcccctccccgggcccgccacctccttccctccctctccgcctcccggcaggcgggatcttctcggggcagtcaagcctcgcgggtcgctgcggcgtcacacctgtctgagggggcggcggcggcggcggcggcggggcgggggctcgtagcgcctttgacacccgaggaaaagagggaggagggagagcgcgtttcatcatcggcggcggccacttataaaaacttctaggcgcgcactcgctggctcagtctccgctccgcgaatctcctccggccactgccgccgcggtcgcctctcacccgcccggccgctccagcccgaggcgccccgaccccgcgccactccgcgcccggccagccgcccgcagccatggggctcctgcccaa

SEQ ID NO: 30621 - DNA, 2300 bp, Homo sapien
tccaagccagtgctgtctctctgaattactctggtaaccttctaacttgttccctgcttctgctcttgctcccctacacggcattcttcacacatcatgcagtcattttttgttaagtgaccgtgtgaaattgctttgcttgaaaccttgcaatgatcccccatctcacttaggataaaccccaaatgcctcaagttttgttcagtagagttatgatgtgagtactcgtgatcaaatctttcatgaatctccagtcacaccagttctacttctgtttgcatcttccactctgcctgcttatgtcatttgtatcttgctgtgtgttttttctcagtttgcttctgcgtgtgtgtgtgtgtgtgtgtgtgtgtgtgtgtgtgtggctgtggctgtgtcattgggttattttccctgttgctgaggctttctttttgtctctcttatttatatatttatttatttgttaattatttttgagacggagtcttgctttgtcacccaggctggagtgcagtggtgtgattttggctcactgcaacctctgcctcccgggttcaagtgattctcctgcctcagcctctcgagtagctgggactacaggtgcgcaccaccatacacggctaatttttgtatttttttttcagtagagatggggtttcactatgttggtcaggctggtctcaaactcctgacctcaagggatcacccacctcagcctcccaaagcgctgggattacaggtgtgagccacggcacccagcttgcctctctttttaaaataatataaagctgagtatcattttatttaatgaatagagcctttaaaaacagaaaagcaaaacaatttctgttgtactctcaaaaaagaataaatgtttttataaacttgtggacccttctgtcactcagtcttctgtgagtcagtggtccctggcaacaaaatgatgtctgattcctctaacccaaacattgttgttgaagaaatatgaagaatatatagatctgcactgtctagtatggtaactgctagccacatgtggctttttaactttaattacagtgaagtaaaattaaaacatcagttcctcagttttactaactacatttcagtagctttagttgtacttatatttgaatgcttaatagccacaggtgaccagtggctactgtattggacagtactctagagaacattttcgtcactgcagaaagttctgttggacagcactgctgtagtatattttatgcactggtatgttttatgtataccacttgtgagtgactgttatactcattagccaaaaattctatttaaaatcttttttctttcttttttttaatctttgtaaaggtacccttatccaagttattgcttaagccaaaacttttcattcttctttttctttctactttggtacaatccattagtaaggtctgttgacttttgtattaatcagaaaccaccaacccttttattaattttatttattgaagaaattataccatttgtcccatagactttcccacattctgcatcttcctgaaatcattgaacattttttttttctgtaaactggcaggtagattttgcacttgattagatttagaaccaactcttttggtaagaatagtccatagatggtctgtcgcccacgctggagtacagtggagcgatctcggctcactgcaacctctgcctcccaggtgcaagcgattctcatgcctcagcctcctgagtagctaggattacaggtgcctgccaccatgcccagctaattttcgtacttttagtagaggcggggtttcaccatattggccagggtggtctcaaactcctgacctcaaggtgatccacctgccttggcctcccgaagtgctgggattacaggcgtgagccatcacacctggcctaaaatattttttttaaactacaacaaaaacatcaaaaaaattatgtgaacttccaccaatatgctactggtaactgatcttacaaagaatgggcacatgaaaagaacagaatacttatttatgtatattgggtcacaaagcagtcatatttgtttaaaaagctaaatgtgctttttgtttttatttcagatgatcctgtacatgcagctccaaccacttctacgcgtgtgttttatattagtgtaggggtttgttgtgcagtaatatttctcgtagcaataatattagctgttttgcaccttcatagtatgaaaaggattgaactggatgacaggtattgtacatattttgggaaagaaaaaaaatgaaagcagttatttgtatatatgt

SEQ ID NO: 30622 - DNA, 2300 bp, Homo sapien
taaatcctgtaaaagccctgggagtcgggcattatcccgggatttttatgaatgagagaaccaaggcttggagagtttaattttcccaagaccacaggattaacaagtaccagaacccagccaggcctgagtgggagctctctgctgtttacatcataggccgcctgaagaagtcactgacaagacctagtaattaaagaacctcgagaagctaggagtttcattctttgaggactgtgagcttttttaaaagtgcaaagaatatgccatcctttaaaaaaatgcttcccatctgaattgagattcctgttcacacaacatgttttgagcctccagcccttcctggcagaaccctggtagcagtggctgtcccaacagaagtatttttgctgacttttgtggcttaaaagccttctctgatggagcacttttcctcccctcttcctcttctcagcctcctccggcaggatgaagggtgtaagattttgtgctgaggcgctgaagcttgacaaattgaggccagcctatctctaaatggaatccgtgtatcttgctagggagggagaaaatcaagttccagcacttccctccttatcagcctctccttttccctacccttccctgaggataaaaataaccgcttcccagggcctcactgcgatggagcaactgtgccccgaagccaggcctagctgtcagagcagctgctccccgaggcacggccccgcgagagccttggggtcaggacgggggcctgtccgcagggacgaggtgtcccaggacagggcaggggcccttggagcctcaccaagagagggggcactggtgcaagtttgaccgcgatggtgggcggctcacaaaaatacatcaggaggcccggaagtccatgcactggctggctccaccgcctttaagtacacgaggtctatctgcagttcttaacctctttgagggcacaaggactccctagaacaaatgatgacataccacctctctgtgtgcaatcaagcatacacacaacacacagaaacatggacgtggacacaaatacgcacggagacacatacacttttgcacacagtttcatattattggaaggctgtcgaagcctggtatggaccacagattaacaaccccaaaggcaggttgattatagtgatgcagaacgattataaaaaaaataacaatttggcagggcgcggtggcttacacctgtaatcccagcactttgggaggccgaggtcagttgatcacgtgaggtcaggagttcgagaccaacccggccaacatggtgaaaccccgtctctactaaaaatacaaaaaaattagtcgggcatggttgcgggcgcctgtaatcccagctactcgggaggctgaggcaggagaatggcttgaacctaggaggcagaggttgcagtgagccgagatcgtgccagtgcactccagcttgggtgacggagcaagacttcgtctcaaaataaataaataaaaatataaaaataaataaaattttgtaacgtaaaaatagggttagtaaagcgtgctaagatctttctggaaaacaaatatatgtagtataaattctaataatagatacggaaacgataaagttgatcaccgatggtaagataaaggatgatttctatttatttgagttttcccactaaacaggaaagcatgctgctttttcgcaaccagaacggccgcatccaggcgtttccggggacctggggcgcccactgagctgcaggcgcggccggtggctccagcctggcccgtccgtcgggaaaggagggttacagacaatagacaagcaaacattagacgcagtgaccgcgtggggcggggaccggctcttgcggagagggtgacccgagcccttcgcccgccgaggcactttaaaaccccagcgcgttgcccaggccggcccgcccagagcgaaaggtgcgtgcgcgctcccggggaggcggcggcgcgcacgggcgcgtcccgcgggcagcccccaactccggacgatgcagcgaggaggcggcggcggcggcgcgctccggaggtctgaagccactgctggctgccacgggccggcggtgcgatgagctgggcagccgcccccggctcggggctgtgagcggctcggggccgggggtgggcggcggtgcggcgggcggccgacgctcctcttcggcggcggcggcggcggccatgcgtgggcggcgcggctggggcggccgggccggagttgcctcccgggggcccgcggctgagggccccgccgccgccgccgctgctgcttctgcttg

SEQ ID NO: 30623 - DNA, 2300 bp, Homo sapien
gaggttggacaaggctgcaggaagcttctggaagcagagggctgggtcctccggccccttcctcccccagggctgaggaaacccaagcagctcttccttgctccctagtagctattgcaaagggaggtgtctgattgacctcccttttatctggggtcagtcaacactaggaaagtgtggccattatcaccaatgccatctgcttttcctcctaggcaagccacgcagccccccagcactgcccttctggcccttctaggccagcagtgccccctggggatctggccttgaggcctgaggctggcctgttagctccacccccttgggaatatttcttctctccctgcgccccagattctccagctataagatgagacagagtccttccccacagagtcatgctaaggctgaaatgagatgcaggccctgggcaaactgaacgcacaggtggactaggggagggtcctccctgcctgagtcccaacctggctgcccctcctcaatggatgttaacaccccactcaatggatgttaagccagcgaagtatgaacacatccgtttcaatattattggacttcctcgtattttcctccatgccacagaatgataccatcctgggctcagccttcaaacatccaaaatgaatcaagagctaacctgagttgcctctgtgtcctccctgccctgccccagggacctgagtaaatgaatcctcccttccacatgccaaggtctcaagccttcacccttctgttccagaacttgcactgtcctatatgataggtacttagctgcatgtggcccaaagattgaaattaatgaaaataaattaaatttaaaattcagttctcccatcttactagccacatttccagtcctcagtggcacgtgtgtctagtagccactgcattggagggtgccgtatagaacaattccactctggcagaaaattccactgaatcagaatgctgttctagagacagtgcctttaggttcattagcgggagcccatagccctgccccccacctgctctccagcaaggtaggcagctgacctgctcctcagggggcagcctgggactctcaaggggcaggtgcctgggaggtggatttaaggctagaacatcagatggagggctctgtggtctggcttgggcttctcctggccctatggagagggcctctgagcagtttctttgggcaattaacaaaatgatttaaaagtcaggatagcttgacccttacacactaatctttgggccatagtcattttcactgtactgcagactttgcatttccttctgagcctggttgcttacatctcagtgttcttttcagaccatggaaggaaatgtagccctcaacggacctctcggcctgggtctgcagaaggagccccagagctctgggtggcctataagtacaaacgcctcaccatgtagccagaggcagcctgggcctttgtagtgtggccaactggggtttccatttggcagcaccattcacctcctatgtttctcccctataagttggggatcccaaatcctccctggaggggctggaggattcgtggaataagatgtgtaagggcctggtgtgccgacagccgatggtggttctgttcccccttctttcattctcccactggaaggaggaccatgtcacagcctacctgagtctctattttctcatctgtacatgggcatcacagttcctacctcaacagtctcgagccgtcacaaggttcaagggatattgtggatgtgttttagacatggtgcccctggcacaagtggatggtgtttggggctgtcccatggcagtatgtcccagtagaaaggcagggtagcccagttgttactgcaagggtcctggaattgggctctgtcatttactcctgacttaacatgagccttggtttcttcttccatgaaacagggttaatagtggtaccttattcctgttatttttgagagaatgagaagcaactgtgctcatccagtggtcagcactgagcccaggaggcaatggggccagccaacgtggtcactgtcactgatcaagcctctttctccctacaggctacgaacagcagcaggagcaagagaagctggagcgagagatggcactgctgcgcggcgccatcgaggaccagcggcggcgtgccgagctgctggagcaggctctgggcaatgcgcagggccgggcagctcgagccgaagaggagctgcgcaagaagcaggcctatgtggagaaagtggagcggctgcagcaggcgctcgggcagctgcaggcagcc

SEQ ID NO: 30624 - DNA, 2300 bp, Homo sapien
tctaaccttaactggagtcttctaaaaatgactctgggtgagtggggggtggggggtggcaggacttgaaataggaaggagaaaatgagtgctgctttggcagtcttgaaactggcgactcgtgtaatagacacaaggttgctgctggggcccagccaccaaagttgtcctggggcctggaaggttatatgctcagtcatgattgacatggcctccagccccaaaaataaccttccattgattagaagtgtcagggtgcattttttaagatgatgtatttaagcattagttgcttaggaggcccaggattgctcaggctgatccccaaggccccagccactgtgaggcgggtatgaaacaagcatcctgacattaatcccctctagccctgctgtctgactcttgagagcctcaggcagaaacatttggaaaaggccttccctactggtccctgcctaacactagagggttgaataattatctgcagtaattttaataatatattaattattgataataattaaccatcttcccagtatgcctaggagtggggtgaccccgggctgctctggtgggagccatgagggtctgtgctgtctctgagcaccgtctcttctgttccccaggatcctgcaggcccaggtgcctcctgtgttcctccaacagcagcagcagtaccagtacctgcagcaatctcaggagcacccccctcccccacatccagctgctctcggccatggccccctgagctccctcagtccacctgctgtggaggggccagtgagtgcccaggcctcctcagccacctcgggcagtgcccacctggcccagatggaggccgtgctgagggagaatgccaggctgcagagagacaatgagcggctgcagagggagctggagagctctgcggagaaggctggccgcattgagaaggtaggccctgctggggcttcagaagggcagaccagaaagagaccccgaggggctacctggggagtgggtagtccaaggagaggcagaggagcctgaaaactgtttggctggatttctccctatccctctgtcttccacctccctcactcctcatgcaccctcctgagctgactccagacagctggggaacagccgagaggccggcagagcaggcctggagcatgaacagttgctggccagtggtgattagaaagagcccattcaccagctccttgcacactcgcacccttgccctgcacacaccccctcccatggacacctcccacagagagccctttgtgtcccccacacaacagcaagtctgttccaggccagccctggccaaaaagaaaacttctcctcttggaaaaaaaatgggcgacttgttggaatcacaggccagctaagagcacgtgcggaacctgccagcagccaagtgggaggagcagccggggcccagctggccctctgggtggatggtgatgcctgggacaccaggcagaggcagctctgcctggtgcccgcttctttagtgaagggttaccagttttccgctgaggctcagttttagcagatggcctcaggcctcccttgactgtcctgtggtgtccaagttaggtcaaaccaccccatcatggctggagtctttcggtgcccacttctggccaactgtactcagtttcttggtggaagccagccaagagtagaatgtttccttctggacactgggcacagggaagctgtgtttagtcaccccgcaggcagctacttccaaagtacctggccctgggttcactcagcatctggtccttggggcagccgatgggaccgttgcttgctggtcccagcagtctattctacttccggaggctacaagcttctgaccatcccaccatagtcacctggaggttttgctcctgtttggtggcctctcatctgtcaccttttctgatggagagtagtgggtcagcctcgaatcactccctgggagctctcgccttcattcagctctgctgtctgactcttgcagctggaaagcgaaatccagcggctctctgaggcccatgagagcctgaccagagcctcctccaagcgtgaggccctggagaagaccatgcggaacaagatggacagtgaaatgaggaggctgcaagacttcaaccgggatcttagaggtgagagccagtcacacaggtggaggttggagaacctctgcagaggacttacttcttttgttctagagaaaaattgggaatctctattctctgtcaaaagtgcagatgaactcagagagccaggctgagacccctttggagctgccctgatag

SEQ ID NO: 30625 - DNA, 2300 bp, Homo sapien
aaactgaggcagttgtgacactgggaatcacaaggtcccaggaaggcccttggactccccgtgcctcttgccctttgctccttccctcaacatggagccctgggggtgatgttacaccagtgccagaggccaatagaatattgtcccctgaactcagtgaccacagtagtccagaggcagcccttactcccaaggaaaccaagagtttgggccacatttgttctctaaactgagggtaaactgaggctcctactagaagagatggaggatgggccaccattataggagcacctgccacccgcccagcactggcccagcactctgccaggccttacatagcgtcatcctcaacaaatcccagcgaggctggagaccctcatgatgcaacagagcaatgcccagtctgtggggctgaggcactcgcccaaggttaaacagctggagcagggatttgaacccctatttgtcagactctagagctcagactcttaccctgacatttgtctcattgctctaaccttaactggagtcttctaaaaatgactctgggtgagtggggggtggggggtggcaggacttgaaataggaaggagaaaatgagtgctgctttggcagtcttgaaactggcgactcgtgtaatagacacaaggttgctgctggggcccagccaccaaagttgtcctggggcctggaaggttatatgctcagtcatgattgacatggcctccagccccaaaaataaccttccattgattagaagtgtcagggtgcattttttaagatgatgtatttaagcattagttgcttaggaggcccaggattgctcaggctgatccccaaggccccagccactgtgaggcgggtatgaaacaagcatcctgacattaatcccctctagccctgctgtctgactcttgagagcctcaggcagaaacatttggaaaaggccttccctactggtccctgcctaacactagagggttgaataattatctgcagtaattttaataatatattaattattgataataattaaccatcttcccagtatgcctaggagtggggtgaccccgggctgctctggtgggagccatgagggtctgtgctgtctctgagcaccgtctcttctgttccccaggatcctgcaggcccaggtgcctcctgtgttcctccaacagcagcagcagtaccagtacctgcagcaatctcaggagcacccccctcccccacatccagctgctctcggccatggccccctgagctccctcagtccacctgctgtggaggggccagtgagtgcccaggcctcctcagccacctcgggcagtgcccacctggcccagatggaggccgtgctgagggagaatgccaggctgcagagagacaatgagcggctgcagagggagctggagagctctgcggagaaggctggccgcattgagaaggtaggccctgctggggcttcagaagggcagaccagaaagagaccccgaggggctacctggggagtgggtagtccaaggagaggcagaggagcctgaaaactgtttggctggatttctccctatccctctgtcttccacctccctcactcctcatgcaccctcctgagctgactccagacagctggggaacagccgagaggccggcagagcaggcctggagcatgaacagttgctggccagtggtgattagaaagagcccattcaccagctccttgcacactcgcacccttgccctgcacacaccccctcccatggacacctcccacagagagccctttgtgtcccccacacaacagcaagtctgttccaggccagccctggccaaaaagaaaacttctcctcttggaaaaaaaatgggcgacttgttggaatcacaggccagctaagagcacgtgcggaacctgccagcagccaagtgggaggagcagccggggcccagctggccctctgggtggatggtgatgcctgggacaccaggcagaggcagctctgcctggtgcccgcttctttagtgaagggttaccagttttccgctgaggctcagttttagcagatggcctcaggcctcccttgactgtcctgtggtgtccaagttaggtcaaaccaccccatcatggctggagtctttcggtgcccacttctggccaactgtactcagtttcttggtggaagccagccaagagtagaatgtttccttctggacactgggcacagggaagctgtgtttagtcaccccgcaggcagctacttccaaagtacctggccctgggttcactcagcatctggtccttgggg

SEQ ID NO: 30626 - DNA, 2300 bp, Homo sapien
gagagtttggagaaataagtgttcctagaaacaaggccctgcctcacgcttctcatcttgcccagcatcttttccagagaagcagacacagccatcactgctgcatctccccctatgggagtccaagaaaccccaccaagggaccccaaggatttcagactcttcctctggtggcccaaggtcaaagtctggttctcttcatgcctgctgtgttcctttagtaaacacccactttcccaccgtccggctttccttgctctcgagaaatgagtgacatgatggggttggtatggcggaaccagaggttggagcctcatagtttttctccagcctccacccctccagactcgcactttatcgcccctctcagggctcggtcaggaagagtttcggaagctgagtggtggtttcttcttttggaccagccttattgaaccctgtcaggaaaagatagtaatcacggcaaggaagtagactgtttgcaggagaacaaaaagcaggggagggagaggacgaggagaaaggaaagcaagtgtgaagggaaaggagttgctattctttctcagagctaagtcatccccaaagaatgccagttgtgtctgcctggcccagtgcaggggggagcaagttcttgaagcaaccttgagaatggccattttagcagtggaatggagagtttgagcactccagtggggaccctcttcccagctcttactggaagccccaccttaggtagtaggagaaatacatctgcccaatatctcctttcagatgatccagtgaagattatttgttaggaaacgggctagactcctagcctagggtcctgagaagagcaggggggccataggctgcatggcagcaagagtcaggggcaggctgggtgtgcattagtgctgagatgatgcacccagaaggggaattcggtttttgcggggcttctgggacttggaagattctttgtgaaactgaggcagttgtgacactgggaatcacaaggtcccaggaaggcccttggactccccgtgcctcttgccctttgctccttccctcaacatggagccctgggggtgatgttacaccagtgccagaggccaatagaatattgtcccctgaactcagtgaccacagtagtccagaggcagcccttactcccaaggaaaccaagagtttgggccacatttgttctctaaactgagggtaaactgaggctcctactagaagagatggaggatgggccaccattataggagcacctgccacccgcccagcactggcccagcactctgccaggccttacatagcgtcatcctcaacaaatcccagcgaggctggagaccctcatgatgcaacagagcaatgcccagtctgtggggctgaggcactcgcccaaggttaaacagctggagcagggatttgaacccctatttgtcagactctagagctcagactcttaccctgacatttgtctcattgctctaaccttaactggagtcttctaaaaatgactctgggtgagtggggggtggggggtggcaggacttgaaataggaaggagaaaatgagtgctgctttggcagtcttgaaactggcgactcgtgtaatagacacaaggttgctgctggggcccagccaccaaagttgtcctggggcctggaaggttatatgctcagtcatgattgacatggcctccagccccaaaaataaccttccattgattagaagtgtcagggtgcattttttaagatgatgtatttaagcattagttgcttaggaggcccaggattgctcaggctgatccccaaggccccagccactgtgaggcgggtatgaaacaagcatcctgacattaatcccctctagccctgctgtctgactcttgagagcctcaggcagaaacatttggaaaaggccttccctactggtccctgcctaacactagagggttgaataattatctgcagtaattttaataatatattaattattgataataattaaccatcttcccagtatgcctaggagtggggtgaccccgggctgctctggtgggagccatgagggtctgtgctgtctctgagcaccgtctcttctgttccccaggatcctgcaggcccaggtgcctcctgtgttcctccaacagcagcagcagtaccagtacctgcagcaatctcaggagcacccccctcccccacatccagctgctctcggccatggccccctgagctccctcagtccacctgctgtggaggggccagtgagtgcccaggcctcctcagccacctcgggcagtgcccacc

SEQ ID NO: 30627 - DNA, 2300 bp, Homo sapien
ggccggcccagtgtcccctgtgcacatctgcctctggcacatctgaacagtggtcaccttctccaccaactatcctgcagagctggggtggccgccagcttaggtaggctccaccgcaggccatgcctgacagatcttgccttctgttctttctgcagagagaaagggaaaggaaaaataaaagtacatgcacatttctcatttaggttttgggatccctctcccgcttctgtccctttggggacagaaattagcaatcatgggggcctgtgtggctctgcagcaggcttgtccactccaagatgtacctccttcaccctagctgccttgaactgacgcctttctgcaaccatctcaagaatatttgtcaaacattttgtcaggtatcctcccaaatgcctgaaagacaggactgtaccatgtggtctttcccctggttttacaacccgagtgcacatgtccacaaccactcccctgcctccaccaattatgctgtccataaggtaaggccactcagagacctctttcctttcacttctaaaattcctacctacagtggtatactgatcacagcttctcttcgtaaggggatccttggaaagacaaatatcccgtagcttggcacaaatgatccatttgctcaatcatctcagatccaatcactgtttgaaacacagtatttgacttccaagtaaaacacacacgtgcgcacacacacacacactttttgtgagttttattaaaaattaacaatgtccctggcaattaagcttgcagaatttccttgtccttgtttccctccagtgaatttgggacttgcaaactccatgctgatgggaggacccagccaggggtagaaatcagccctgactctctgggtggacaggggcctgactgcccccacctcaccccaactgacttgtagagagggcttgtgtgatggggaacggggacagcatgtgtcagagcgagctttctgaagaaggggtttccatctagcagtggaagtgtcctgggggcagaggagaggattccatgcaggagccacagaagtgggtacaggggaaagcccctggctggcaggggtgtagggggaggtaaagaagagactaaagcaaggacagggtaagtggagagaggagggctcccagtgtctgccctgtccatctagggagcctggattctgatagccagggaggggttttgagaatgagaaaccaagcagcccagtggttgattacctggttctcactgtgtgtgactctgggcacgctgcttaagctctctgagccctggtgtcctcatttacaacacagggatgataacagaactccgttggagggtgcttggcagggctgaatcggatgactgggcgaaaagccagcggtggcacaccttgcactctgcgtaaaggggcgcctattatcaccttggggaagaactggacagagcgcctggcggcgggtgattcagttgggtaggtgggtcaaattgaccggattttccaacccagattcacacttcctgtcgagacggtcgtaaaatagctggcgaaggtgtttgtaaacaaaagtgcattcaaaggttgccgctgggggtgaaaacagcgggggttaggggaaagaggctctgtggctggaagcattcacttagcccggggcactgtcccagcccagaggatatggatgtctttgcagtccctcctccctttcccacctcccccggtacacacacacgcacacacacacacacacacacacacagccggagtcccctcccgcagcaaccccaggacacgcgtggtacagcccttgctgtcgtcccgtcgatgggtttagggatgaagggtgagagcgggtcggcgactgggagtggaggcgataatgggcagagttggattaaattgtctccagcagctccgaaggcaaagcatggggcaggggcggacacaccgcggcctggagggcgctgggcgcggaggaacggagctcgggggccgggccggcgctcggccagcagcgccgcctccccggaggaaggcgggggccgggaggagggagcgggagaaggcggagggcggaggagggcggtgcgctgagaggttatttgtggttcgctttgatcccgagggggaacctgaaactctcacattcctggcatagcagccgcctccggcgcgggccgaccctggggctgcgcgctggggcgcgaacagccagagcgtcggcgccacggccgagaacacatcttcgccgccgagctgagctgggccgagccggaggttgtggtgtctgactgcg

SEQ ID NO: 30628 - DNA, 2300 bp, Homo sapien
tccaaaaggctggctagcttgtaggatacttctggatttccctgtttccaaggttgggccctgactcatcataggcatcatcctatgggtgctccctgctaccaagtgacaatccaaaaagcccggaagccactggcatcaaaggtactctcagtttctgagactatggagactcacacaataagcaattttggggtggtggagcggggtggaacccaccatctggaggtgcttttttcagagctcagcctgggtgatattttaaggaaggaagccatttcctttacaagctcaacttcagacatcgtcttgccttgaggatttgtgtcaggtctgtagttggtcccttcgcatagtccagtttagtgttatctcagtatgttcatgagctcctgtgcctaagaacgctgaggtttgggccaaggcaggtggaagtttttgtaaaaatggctcacagggccgggcgcggtggctcgcgcctgtaatccagcactttgggagaccgaggtgggcggatcacgaggtcaggagatcaacaccatcctggctaacagggtgaaacctcgtctctactaaaaatacaaaaaattagccgagcatggtggcaggcgcctgtagtcccagctactcgggaggctgaggcaggagaatggcgtgaacctgggaggcggagcttgcagtgagccgagatagcgccacgcgccactgcactccagcctgggcgacagagcaagattccgtctcggaaaaaaaaaaacaaaaaaaaccaaaaaggctcacagctgtcccccataggataactgcaagatatccctaacaccttggcaaaaattatacacagattggtgtgggaaagggtttacacccccatgacaaggatctcggcaaaagttaagcaaaatgcgccctgctacttctgtcaccggtgagccaggtgagggcttaattaatccagtactcaataattaaccgagtactacccagtggataactcaaagcaagacgaagttttggttatacttttgaagtccctgtcttacaagtgctccccactttcctgctgctactcctttgtccttgctgctctgtctcctgggatacccttctcactttcctcagctgatccaaacctgactttcggaggcccacgtagattttccacctttgtaaagttttctcaaatcactcgagcttcagtaggccttctatccttgaactcttgcttcttgtcctaacttaatctactaaacaagctaggtcagctttgtggtcaattgctcaggtattattgcctccaactgttacgtgtacattttgtacccatgattccttagtagatctttccacatttggtctcaatctttttcacctgtcccttctccaaacacctccaaccctgtcacattttccagccttgacagttaaaacccccttttccacatcactaatgccactcttcctttcaagataaacgcaggcgtcagctcttgaaggtcaacatcccatttccgggattaggcgcgaaggtgccttccctcataaggggctggaaggatgggaagcatcaagataatcaatgcccagggcacactgattatcttgtgtattaaagccaccgtcccaagtactcgtcacccagtacgaccactgtttcctgaacaaacttttcttactcacgtgacagtcccgatgcctgcaatgctctttgtttcttcctttttattccagtgaacccacagtcagtctaaaaatcttaggtcccaggtcgcttcctataggaggccgcctccaaaccccaggctgagtgcggtcccggtacccacccctccaggggtctcacagttccctaagcacagagcatggcaccaactggggagtctgtcaaacagcccagatgaatgtctttccaaacacgcggtgcctgcgtttccagggacagggacacgtcttatcaatttctatatattacagctttgtaaacataatatttataaaatcaaagcgggaaagccttgttccttgctagaaatgagcctcgcaggccaccaccatccgcaccgtacgacaggccgtccctcagctgcggcttcctgcctcaggcaggatgtaccaaacgtggaagcggagacggggaggtctgggggtgccacgcaagtccctttcctcccgacacgagtgcagtaaagaaaaacggttatgagcgtaaagtgacagcctcggccgatgggaatagggggaagtccgacactgagcaacgaacgcattcccgcgcctccaaaacctaggccgggggcgctgga

SEQ ID NO: 30629 - DNA, 2300 bp, Homo sapien
gttatctcagtatgttcatgagctcctgtgcctaagaacgctgaggtttgggccaaggcaggtggaagtttttgtaaaaatggctcacagggccgggcgcggtggctcgcgcctgtaatccagcactttgggagaccgaggtgggcggatcacgaggtcaggagatcaacaccatcctggctaacagggtgaaacctcgtctctactaaaaatacaaaaaattagccgagcatggtggcaggcgcctgtagtcccagctactcgggaggctgaggcaggagaatggcgtgaacctgggaggcggagcttgcagtgagccgagatagcgccacgcgccactgcactccagcctgggcgacagagcaagattccgtctcggaaaaaaaaaaacaaaaaaaaccaaaaaggctcacagctgtcccccataggataactgcaagatatccctaacaccttggcaaaaattatacacagattggtgtgggaaagggtttacacccccatgacaaggatctcggcaaaagttaagcaaaatgcgccctgctacttctgtcaccggtgagccaggtgagggcttaattaatccagtactcaataattaaccgagtactacccagtggataactcaaagcaagacgaagttttggttatacttttgaagtccctgtcttacaagtgctccccactttcctgctgctactcctttgtccttgctgctctgtctcctgggatacccttctcactttcctcagctgatccaaacctgactttcggaggcccacgtagattttccacctttgtaaagttttctcaaatcactcgagcttcagtaggccttctatccttgaactcttgcttcttgtcctaacttaatctactaaacaagctaggtcagctttgtggtcaattgctcaggtattattgcctccaactgttacgtgtacattttgtacccatgattccttagtagatctttccacatttggtctcaatctttttcacctgtcccttctccaaacacctccaaccctgtcacattttccagccttgacagttaaaacccccttttccacatcactaatgccactcttcctttcaagataaacgcaggcgtcagctcttgaaggtcaacatcccatttccgggattaggcgcgaaggtgccttccctcataaggggctggaaggatgggaagcatcaagataatcaatgcccagggcacactgattatcttgtgtattaaagccaccgtcccaagtactcgtcacccagtacgaccactgtttcctgaacaaacttttcttactcacgtgacagtcccgatgcctgcaatgctctttgtttcttcctttttattccagtgaacccacagtcagtctaaaaatcttaggtcccaggtcgcttcctataggaggccgcctccaaaccccaggctgagtgcggtcccggtacccacccctccaggggtctcacagttccctaagcacagagcatggcaccaactggggagtctgtcaaacagcccagatgaatgtctttccaaacacgcggtgcctgcgtttccagggacagggacacgtcttatcaatttctatatattacagctttgtaaacataatatttataaaatcaaagcgggaaagccttgttccttgctagaaatgagcctcgcaggccaccaccatccgcaccgtacgacaggccgtccctcagctgcggcttcctgcctcaggcaggatgtaccaaacgtggaagcggagacggggaggtctgggggtgccacgcaagtccctttcctcccgacacgagtgcagtaaagaaaaacggttatgagcgtaaagtgacagcctcggccgatgggaatagggggaagtccgacactgagcaacgaacgcattcccgcgcctccaaaacctaggccgggggcgctggaaacccttaccggcacccggccaccgcggcagacgcttgctcctgccacgccccccccccctcccccgcatcacgtgtctgcactcgctttcctcggattcccggatgtgggtgagttcatttgctcgcgtgcaggggaagtctggagaaggcattgtttcaattattaaaagtgtgggggcagtgggcggaacaaacgcgccgactacagaggctggacgtaagcttagcggtggcgcgcgtgcgcagcgccggcccgaggtaacggcgggaaggctcaggggcgtgcttgcggcaaccctgtaaccgccggtgcgcaagttggaggggcaaggggctgccgtgtcctggtctggaggcggcccagg

SEQ ID NO: 30630 - DNA, 2300 bp, Homo sapien
atccagcactttgggagaccgaggtgggcggatcacgaggtcaggagatcaacaccatcctggctaacagggtgaaacctcgtctctactaaaaatacaaaaaattagccgagcatggtggcaggcgcctgtagtcccagctactcgggaggctgaggcaggagaatggcgtgaacctgggaggcggagcttgcagtgagccgagatagcgccacgcgccactgcactccagcctgggcgacagagcaagattccgtctcggaaaaaaaaaaacaaaaaaaaccaaaaaggctcacagctgtcccccataggataactgcaagatatccctaacaccttggcaaaaattatacacagattggtgtgggaaagggtttacacccccatgacaaggatctcggcaaaagttaagcaaaatgcgccctgctacttctgtcaccggtgagccaggtgagggcttaattaatccagtactcaataattaaccgagtactacccagtggataactcaaagcaagacgaagttttggttatacttttgaagtccctgtcttacaagtgctccccactttcctgctgctactcctttgtccttgctgctctgtctcctgggatacccttctcactttcctcagctgatccaaacctgactttcggaggcccacgtagattttccacctttgtaaagttttctcaaatcactcgagcttcagtaggccttctatccttgaactcttgcttcttgtcctaacttaatctactaaacaagctaggtcagctttgtggtcaattgctcaggtattattgcctccaactgttacgtgtacattttgtacccatgattccttagtagatctttccacatttggtctcaatctttttcacctgtcccttctccaaacacctccaaccctgtcacattttccagccttgacagttaaaacccccttttccacatcactaatgccactcttcctttcaagataaacgcaggcgtcagctcttgaaggtcaacatcccatttccgggattaggcgcgaaggtgccttccctcataaggggctggaaggatgggaagcatcaagataatcaatgcccagggcacactgattatcttgtgtattaaagccaccgtcccaagtactcgtcacccagtacgaccactgtttcctgaacaaacttttcttactcacgtgacagtcccgatgcctgcaatgctctttgtttcttcctttttattccagtgaacccacagtcagtctaaaaatcttaggtcccaggtcgcttcctataggaggccgcctccaaaccccaggctgagtgcggtcccggtacccacccctccaggggtctcacagttccctaagcacagagcatggcaccaactggggagtctgtcaaacagcccagatgaatgtctttccaaacacgcggtgcctgcgtttccagggacagggacacgtcttatcaatttctatatattacagctttgtaaacataatatttataaaatcaaagcgggaaagccttgttccttgctagaaatgagcctcgcaggccaccaccatccgcaccgtacgacaggccgtccctcagctgcggcttcctgcctcaggcaggatgtaccaaacgtggaagcggagacggggaggtctgggggtgccacgcaagtccctttcctcccgacacgagtgcagtaaagaaaaacggttatgagcgtaaagtgacagcctcggccgatgggaatagggggaagtccgacactgagcaacgaacgcattcccgcgcctccaaaacctaggccgggggcgctggaaacccttaccggcacccggccaccgcggcagacgcttgctcctgccacgccccccccccctcccccgcatcacgtgtctgcactcgctttcctcggattcccggatgtgggtgagttcatttgctcgcgtgcaggggaagtctggagaaggcattgtttcaattattaaaagtgtgggggcagtgggcggaacaaacgcgccgactacagaggctggacgtaagcttagcggtggcgcgcgtgcgcagcgccggcccgaggtaacggcgggaaggctcaggggcgtgcttgcggcaaccctgtaaccgccggtgcgcaagttggaggggcaaggggctgccgtgtcctggtctggaggcggcccaggctgccttggtgattctggcttcgcggcctcatggcttgcggccggtttgcgcaacggcctgcgaaccaccaggcgcgtccccgccggcttgggtccgccccgaagcccagtccctcg

SEQ ID NO: 30631 - DNA, 2300 bp, Homo sapien
gtggtaggtaatgctcactagcctgtcactcacctcctgctctgtagcctggttcctaacaggccacggactggtactgctctgcggccccgggtttgggggcccctggtttagaggacacaaaggcaacagagatacatgttaaaggatactgtgcgatgcaatctgctaaatttagaactgtaaggaaaaataggggctaatcccatagctataactatgagggaacaaatatagattaaaagatgtcaaatgtgcatcacccaaacacaataggcagatccctgtgggattttggttcaaacaagctaattgtaaaaagacatttaagagacagttgaagaaatcgttatctgactggatattgacattagagaatttttattaatttgtgtatgtgtaatgacagtactgtggctctgtaaaactgaaaaacctagctcctgatgggggcggggaggcggactaaaataacataaagatcggagattcagttcctgaaaccttctgtcaatgttggctttagctgaatttcaagtcaagttgacattttttgaaagcaggaagcaatgacagagtggactactgatgctgtcaccatctgccagcacaacataaattagaacagaaaggactaagcaaaggtcttccaccattttaacgagaggaaatggcatcagtacaatcaacatacacaatttttacaaacaacttttagatttgcatctacatacattttaaaaggcagtgtgcctgtttataaatctctactctaatttagtttcagagctttttactaccctgatcactgataatgccacagtcaaaaagcaaactcaaaataaaaatcaatctaaaaatggtactgcatgccaaataagaaaatatatacactttatcattaagctacagctaacagaaatctaatcaacgatccttatgatttcctcgtatctaaaaaataaatgcaagcacttgaggaactgtataaatacagggcatctaccctacaatactgctttattaaaataataaattcttttaataagtttaaccagacataaggctcagggaaaactactctgtgcatatcagcgtacggtgctgaaactgtaaaagacgacctgtctctgacatcatactcatctttactctcctgatgtcgtaagggacgtaagaaaaaccacattataagcctaaatgtactgtcttcaagtatctccatgattaaagtgttcctaagaaaccgtccttatttctttctatccctcatttgtgtgcatggagccgttagttcagggttctccaatttcagtccacgatttatgccacatttccgtacctcttgtactaacataaccgtttaaaccaactcactattttaaaagctgccaaccttaacatgccacactaaatgagcgggtccccttgtgccgtgaatgaagtagtcccaacagcgctagctagacagcagccctggcagggaggccgcactggggtctctccgctgaaaaggaaggtgggtccgccggggaaggtgagtactgggcgcagctcgctcgcccacctggccactctccgaagcgcccccagccacctggactccgaggaagggctgaccacctggcggggccgaaccccacgccgggctgcgccacgccagactccgccagtgtgcagggcatagcgggccaggccgagggactgggcttcggggcggacccaagccggcggggacgcgcctggtggttcgcaggccgttgcgcaaaccggccgcaagccatgaggccgcgaagccagaatcaccaaggcagcctgggccgcctccagaccaggacacggcagccccttgcccctccaacttgcgcaccggcggttacagggttgccgcaagcacgcccctgagccttcccgccgttacctcgggccggcgctgcgcacgcgcgccaccgctaagcttacgtccagcctctgtagtcggcgcgtttgttccgcccactgcccccacacttttaataattgaaacaatgccttctccagacttcccctgcacgcgagcaaatgaactcacccacatccgggaatccgaggaaagcgagtgcagacacgtgatgcgggggagggggggggggcgtggcaggagcaagcgtctgccgcggtggccgggtgccggtaagggtttccagcgcccccggcctaggttttggaggcgcgggaatgcgttcgttgctcagtgtcggacttccccctattcccatcggccgaggctgtcactttacgctcataaccgtttttcttta

SEQ ID NO: 30632 - DNA, 2300 bp, Homo sapien
cggtttctaatggcactattttctggaaccaattttctactatcttaaggactgccactaagctatttcagaggtgagagggtgatccaccatacatcctatcatcatctagttccctgggttaacggggttactggccatcagtaattctcaacagggcagtaccacccttagggagcatttgcaaatgtacggagacatatttttttggttgtcaaaatgactgagcttaataaaactggcatttaggggacagggaccagggatactaaacatgcctaagagtgttccacacaggaaggattattgtacctcaaatgccagtaactctccaattgggaaacatgaccactagttataggcagtcctctatggacattgttcttgtcttatatatcattgtatctcaagcacctaataaagtgggggcttagtaaatgtggaaagtacatggcacttttcgtacaaagtaatctctgtatcagattattctcaattcccatttagatgtagtaaggcattcacttccttctctgctgactttgtttttattaagactgaataactccatgattattgtatatattgagaacttaaggggagctggtgagctaatagtaccaagagtagatgaaggaagagcacaaggctgtcattctcttcgtctgtccttgccattagttcttcactggacataagaattcccagggtgcttttaggctctcagaaatgctgatccagcagtatggcataggacctagggatctgcattgtatccagctcccctagcttattctgatttgagaaacattgttcaacatctttgtgtgatcacttacaagtttgtactctgggtgacctgtcacccacaaatgccagtatattattattacttaaaattataatttctgtgtttaatattcctttatatctcaatatttttttacatttgaagagcttagaatcagaagactgcagctactgcttcccttccacccttttcggcaataccttttccccccaaaccctatatccttcttgcttctcattgccacttcctgactattctcttttctttctacctcaaaaaccccatctttgattttcatgttaccagcctatactgccagccaatgaacataacaaccaaaatagtcatcgtctgacctctgggttatttccttggctcattgatttcagcacccagctcactgtcaattctctctgacattactcttatcataactttgaggatcttaggatctggagagatgatgcttataatactctgaccttacagtttcttggctttctttcctccatagatagtttgattatctttgtgtctcatctacttattcccactgccattccttagctcttgtcattaccaatatatgccacccctctagaatctcattttcaagcattcaattatcagactaccaatccctatcttttcagctaactctctctagtcctttgactctcagtaatcattaaccatcccttaaaatgattaaattctgccacctttttactgctccattatctacttggtgttctcacttatcggtccttagccagcttttaaattctgtcattacattttttactttccccttcatctcctgtgctcctctcttgcttcctcatatttgcttggcagaatcacagttctgcttaagtccacctttctgcccactctctacctgtcatgtatcgctgaacgtggctagagaaaaacctaatcatactgtctgttctcactttaaattcatggtcactaacctcaaatgggtcctaatgctacctggaatcatactgtatttcctctcatctcctactttccacaatgagtatttcagacttctgcttttctcctcaaactctcaacacctttccccacatcctcacctttgggttatatcttcctttctgtttatagacttccaactcttgtgtccacccacctatctgcatctgtgcccatgtaccctgccttccttcctggaggaactacgcatgccctcccccttttctacccaaggcattaccttagcagttcaccttctcttttctgcacccttaattttttttctctactggatattttttaccagcatccaaatttccctcctcttaaatatcctctcttgacccgtctcttcctcctctgccccattttatttcttccattttataactaaaaaattacttcagtcatctatacttgtctccagttcctcttgtctcattgttcttgtacccactcaataaggcttttgtcccctcacact

SEQ ID NO: 30633 - DNA, 2300 bp, Homo sapien
ggatgttcttccatttgtttgtatcctgttttatttccttgagcagtggtttgtagttctccttgaagaggtccttcacatcccttgtaagttggattcctaggtattttattctctttgaagcaattgtgaatgggagttcactcatgatttggctctctgtttgtctgttgctggtgtataagaatgcttgtgatttttgtacattgattttgtatcctgagactttgctgaagttgcttatcagcttaaggagattttgggctgagacaatggggttttctagatatacaatcatgtcgtctgcaaagaggaacaatttgacttcctcttttcctaactgaataccctttatttccttctcctgcctaattgccctggccagaacttccaacagtatgttgaataggagtgatgagagagggcatccctgtcttgtgccagttttcaaagggaatgcttccagtttttgcccattcagtatgatattggctgtgggtttgtcatagatagctcttattattttgaaatacgtcccatcaatacctaatttattgagagtttttagcatgaagggttgttgaattttgtcaaaggccttttctgcatctattgagataatcatgtggtttttgtctttggcaacctactcatctgacaaagggctaatatccagaatctacaatgaactcaaacaaatttacaagaaaaaaacaaacaaccccatcaaaaagtgggcaaaggacatgaacagacacttctcaaaagaagacatttatgcagccaaaaaacacatgaaaaaatgctcatcatcactggccatcagagaagtgcaaatcaaaaccacaatgagataccatctcacaccagttagaatggcagtcattaaaaagtcaggaaacaacaggtgctggagaggatgtggagaaataggaacacttttacactgttggtgggactataaagtagttcaaccattgtggaagtcagtgtggcgattcctcagggatctagaactagaaataccatttgacccagccatcccattactgggtatatacccaaaggactataaatcatgctgctataaagacacatgcacacgtatgtttattgcggcactattcacaatagcaaagacttggaagcaacccaaatgtccaacaatgatagactgggttaagaaaatgtggcacatatacaccatggaatactatgcagccataaaaaatgatgagttcatgtcctttgtagggacatggatgaaattggaaatcatcattctcagtaaactatcacaagaacaaaaaaccaaacactgcatattctcactcataggtgggaattgaacaatgagatcacatggacacaggaaggggaacatcacactctggggactgttgtggggtgggggaaggggggagggatagcattgggagatatacctaatgctagataacgagttagtgggtgcagtgcaccagcatggcacatgtatacataggtaactaacctgcacaatgtgcacatgtaccctaaaacttaaagtataataataaaaggaaaaaaataaaaataaaatagaacaaaaataaatcctttcatgacagttttagagggatttgaggatagagcaagatcagatgagtgttttcatctgccaccttcaatgacagtgtaatattcataaaatcaaaaattaaccattgaaataaatatagtttatttcaaaattttggatattgcgaacaatacttcaatgaccattttatgcacacttgctcctagagaatggtttccatgggaatgtaaaaagataagaccattctgaaaacaattcagcaaggactatcaaaatcagaaacacacatgacccaggaatttagaggctatacgtatttacgcatttgatggatattgctaagctgtcctctagaaaggccgtatcaattcactttctcattgacagtgcaataagtctgtttccttacatctttctaacactggctatatattagtttttaaaggttattatcaaaccaattagtaaaagaatgtctattttgctttattagagaggttgaacagttttctttgtttactagatatttatattaattctgtgaggtatctatctacattctttgcctatttttctactagattatcttttccttattatctttgtagggaatttttatatattaataatttacattaaccttttgtctgattataaactgttttctccctattagtcttttttaatagggccttttaccatccagaaacttcacatt

SEQ ID NO: 30634 - DNA, 2300 bp, Homo sapien
gacatagcagagagacaggaggcctccacaccatttccccagacccctggcagcacattcccaggtcagaatatccttctccagaggcagttctgggagggggcaccagagtttgcgagttcctagcaatgacactttccagcaggagagcaagggttgggagatgggaatgcaagtgtaaggaaaggggacttcagctccccccaccatcaccaacactcagacccatccggcaaccaagggtgctgtacacaggcttctagttgatttcagcacttcagacaacctgacacttgaaggagttagacaacactgactggcccagggtagttggggggactctgggacctgagatctgcctcagcaatctccaacaccccaagagctttgcataatgcatagttcttacttccccagccacatagagagtaagtgttagccagcctcccaggtgtgcgcgcgcgcgtgtgtgtgtgtgtgtgtgtacctgcacacatacagacaggacaagactcactttagcagaaggaaacctgccttggaagtcagccatctccacttgcctgtctatggcctcagctctctagggactccagttcaacattactggaagccaacaacctctccttccatcagatgcccagtgggtgagtcagggggtggggtggtgggggggggcgctggtaatgcaataagacaacagcctttacacggaaccaaactctgagccactgttattggaggaagaccttcagaatctcagagtgtggctgtgacatctctcctgcttctctgctccatcagtcacttgtcactccatctttccctttcctcacccttaaaatgaagtaagaatgacagctaccatatgaagaccactttctatacaccaggcgccttacattcatgccattctcacaacagccatgtgagaaatttttatcaacccagtgataagggtgagaaggtggagggaaaatggctggtccaaggtcacacagccaggaagtgatggagctggtactggaatgcagtctgtgtgacacaggctgctccaaggaggatctgggaactctcaggaccatgctacaaggtggggtccatacactccaatgcggggagggctcccagagcaaaggcctccatgtgggggtgcatttattaacagtagaaactcgaattaggggaacgcccccagcagggtgggcccgtagtgcccaggggtaccaggcagaagcctatgtaaacactcctgagacctacagccaaacccctgctgctgttggctgggcaggccaggccgggctaaaaatagaaggcttctcaggtccagctccctgtgccccagcctcctcctctccccctccctccttccccacagggcaggagccaggcttctagaacgaaccgagactttaagactttcgtttcagatcaaagaggatcgttagcttgatactcaatgggcatgttccaagttctacaggggccgtaactggggggagctcctgactccaacaccccacccaactccctcctagggagagagagctgtcaacctccaaaaccaacccagggaaggagtgaggtcgaggccaaaacttggacaatctctgcacatcttgcaattcaatctggagcccctttgctgtctttccttttcctgaatctactctcaatgttgacagcactgtgcgatttctgtatttgccaggggcttctcgtgggaggtcggctccagccctctcgagaaccctccggagaccgtggggatgaggcagcgctcagccagagaagccctggagcccaggaccagcgcttcaagtgcaccgggcgggaggcaggggcgcagggagggaggctctggaccggccgcccctgctgactatggccccggtgcaggtcaaggcttgggcccggggatttcctttcaaaggtgacttagagccgcttcattagggtagcgccctcccaggcgggccctaatggcgtgtttggcagagtcagcgaaaagcagcgccctgcggctccagcggcgggggagcgccctcttccgcgccctcgccctctcccgtgtggggcagctgcgcgcacggggccatttgcagcgcaagcagcctagcgtgcggccgcggcgcccaggtcggaaaggaggcggcatcatggagctgaagaaggacatcaacgctgtatctatcgacatgctgctgatcgtgcactcggagaagcggcgcgccgcacagggtacgctctcagaccagcaggcgaacccgagctcgctgctgcagcgcggaggaggt

SEQ ID NO: 30635 - DNA, 2300 bp, Homo sapien
gatttgagcagaagggatacagcctctacttgaatgatatcccagccacctcagtgttctcttgtctctccttcccctttcctgatacatccaaatgccttcagccacatcaccttccccatggtgtctccctctcagcccaagaatggatagtggggaagaggggaagcagctaagtcaacccaggccaaggatgggaatagagttggcattaagaagagcatctcatctatgctcctggcaggccccagaagctaggctgttggactgatggccatgggtaaacctctgagaagagggtctaggtgtcaggcaccatcaggatccaggggcagcagcatctcccagagcagtcgaggtgactccaatttcaggagtttgctccaaagcggtgttcacactgcaattctttccaaaggaaacattggtcaatgtctggagacattctaagttctcacaatagggaagtgaatgtgattggcatctaatgcgtagaggccagggatgctgctagacatcccacagtgtacaggaaagccccaccaaagagaattatctggctcaaaatgtcaatagcgccaaggatgagaggccctgctccgaagctgtcttcagacatagcagagagacaggaggcctccacaccatttccccagacccctggcagcacattcccaggtcagaatatccttctccagaggcagttctgggagggggcaccagagtttgcgagttcctagcaatgacactttccagcaggagagcaagggttgggagatgggaatgcaagtgtaaggaaaggggacttcagctccccccaccatcaccaacactcagacccatccggcaaccaagggtgctgtacacaggcttctagttgatttcagcacttcagacaacctgacacttgaaggagttagacaacactgactggcccagggtagttggggggactctgggacctgagatctgcctcagcaatctccaacaccccaagagctttgcataatgcatagttcttacttccccagccacatagagagtaagtgttagccagcctcccaggtgtgcgcgcgcgcgtgtgtgtgtgtgtgtgtgtacctgcacacatacagacaggacaagactcactttagcagaaggaaacctgccttggaagtcagccatctccacttgcctgtctatggcctcagctctctagggactccagttcaacattactggaagccaacaacctctccttccatcagatgcccagtgggtgagtcagggggtggggtggtgggggggggcgctggtaatgcaataagacaacagcctttacacggaaccaaactctgagccactgttattggaggaagaccttcagaatctcagagtgtggctgtgacatctctcctgcttctctgctccatcagtcacttgtcactccatctttccctttcctcacccttaaaatgaagtaagaatgacagctaccatatgaagaccactttctatacaccaggcgccttacattcatgccattctcacaacagccatgtgagaaatttttatcaacccagtgataagggtgagaaggtggagggaaaatggctggtccaaggtcacacagccaggaagtgatggagctggtactggaatgcagtctgtgtgacacaggctgctccaaggaggatctgggaactctcaggaccatgctacaaggtggggtccatacactccaatgcggggagggctcccagagcaaaggcctccatgtgggggtgcatttattaacagtagaaactcgaattaggggaacgcccccagcagggtgggcccgtagtgcccaggggtaccaggcagaagcctatgtaaacactcctgagacctacagccaaacccctgctgctgttggctgggcaggccaggccgggctaaaaatagaaggcttctcaggtccagctccctgtgccccagcctcctcctctccccctccctccttccccacagggcaggagccaggcttctagaacgaaccgagactttaagactttcgtttcagatcaaagaggatcgttagcttgatactcaatgggcatgttccaagttctacaggggccgtaactggggggagctcctgactccaacaccccacccaactccctcctagggagagagagctgtcaacctccaaaaccaacccagggaaggagtgaggtcgaggccaaaacttggacaatctctgcacatcttgcaattcaatctggagcccctttgctgtctttccttttcctgaatctactctcaatgttgac

SEQ ID NO: 30636 - DNA, 2300 bp, Homo sapien
agacatgcctaccaagtgactgtgatatagtgaaagggggagggaagagtgtgaaactcacccatccatccatccacctgtccatccatgaggggatggctgggggtaaaaaagcaagtgaagctgccaaggagttgcccatgtaccccaggaggacgaactccaaggatggagtttgggggatacctctcttgaaagctgaagaggtaacagagggaacagtaagaagtggcaagacgggtaggaggagaagcaggaccatggaaactggggccagagccccaaaagatctactggacaccaatgtcagcaggtgctgacggtgcaggaggatgacagctaactaggagcaggttgttgcccagggtgacatcaggtggctccagggacatcacgacacagctggtggtgtggaggcgtagagggcagctaacatggcattaaggtggatgatgagaaggtggaggttgatgacatcttcccttcaggcacagaggtggggtaggagggaggggaggggaggaggaaggcagcctgagtcagagccagggaaggaaagaattgtcaggattgggggacttgagtctggctgtggtggagaggaagaagtcccagcaaaggagagactagacacgcagaggtggggggtgtggggaactgatttagaaaagcccagaaaggagagtcatcccaaagggaaatatcgcatctgcccactgttagctcattaacagaccaggggaaaggattggtgcctccaaggtgagaggcgtaggaggaggggtggggaacctaacgggtcatccctgaccctgtaggaccagactatcatcaggtatgtagggggggcgggagaggagggaaggacacatctccagcataacatataacagcctcaaggtgagtttctgatttagaacccttgaccatctccagaaacaggaagataaagtgtagctgtgagagctgagcctgggagaattgctcctatctccaaggctgcatccccagttgctgcctaagtccttcccacccacactgaaggcctggcccacagcaacagtgcacctcgccttgcaccggcctgggagagccctcttgcaggctttgctgttttatagctgactgtgtgactcctggtctccccacgctgagctgtcctctggggtcagggccctctgtggaagttcacaatgcactgggaagtgaacaccaaaggcaaccagaggcttctgcagaaaaagaactgcgaaacgttggacaggaagcaaatccggttccctgtggaccctggagcaagtgcccacaggttatctgaacagtattcattctttcgacggacatgtactatgcctcccgcaggccaggcactgttctgtgaactgtggattctgtagtgaacaaaatagacaagaatccgaaaatggtgaccccattttaatgagggagagaccccacgataaacaaaatcgattagtaaataccaacccatgctagagagtgaagagctctggaggagaggcacgggtgcgcccctggagttgctctaaacagggtaggcagggtgctcttgtcacagagaagatgaacgaaggctcgtttgatcatttaaagcggatccagtcctgggtgggatgtaagggcacgaggcctccccagctccttcgctgggcaccctatggggggacagggtgagttgggcgggccgctgcggttctccgagagcaccacgagggggagcccggacccctcctagcgccttccgagccctcccgcacagccttgcaagcaaaagtttttcttaaactaacaatgccagtgtaaggaggtgctcgcgcctgattggccgggggaattttgcaggtttgattccttgattggacaggaggtgttaggggtggggagagagctgatggtgggggatcccgctccctcccgcgtcagtctggccggctccgtcctcccgtaggctccgctgtagctagcaatgtgacaccaggacgcactcgctctcgcgcgctctcccaggctcgttctccctcgccctctctctctcacacacgcacgcacacacccacctctcccataaacacacacacacacatgcacacccacacccacgcgcgcccgcaccgccccacgcgcacacactcctgcccacgcccacgcagcgctccgggaagtccggtccgggcgagagcgcgaaaggataccgagaagccacccgcggagagcgcagcggcgccctgggacgcggcgctctcccggcgctgctgcctcggcttggtctcggcctgcgg

SEQ ID NO: 30637 - DNA, 2300 bp, Homo sapien
acaaggccttttaccattatataatatccgtctttgtctttttaaagtttgttttgtctgatataagaatagctaaccctgcttgcttttggtgtcaatttgcatgaaatgcctttttccaccctttaagttttagttatatgagtctgtctgtgttaggtgagtctcttgaaggcagcagatagttggttgttgagttcttatccattctgcagttctgtatcttttaagtggagcatttagaccatttacattcaatgttagtattgagatgtgaggtaccattccatttatcatgctatttgttgcctgtgtaccttgttgtttttgctttttaaattgtacttttgttttataggttctgtgagatttatggtttaaagaggttctgttttgatatgtttccagcatttgtttcaagatttagagctccttttagcagttcttgtagtggtggcttggtagtggcaaattctctcagcatttgtttgtctgaaaaagactatatatttccttagcatatgatgcttagttttactggatacaaaattcttgggtgataattgttttgcttgaggaggctaaagatagggtcccagtcccttctagcttgtagggtttctgctgagaaatctgctgttaatctgacaggttttcctttatagcttacctggtgcttttgtctcacagctcttgagattctttcctttgtcttaactttagataacctgatggcaatgtgcctaggcaatgatctttttgcaatgaatttcccaggtgttctttgagctgcttgtagttggatgtctaggtctctagcaaggctgggaatgttttcctcaattatttccccaaatatgttttccaaatgtttagattcctcttcttcctcaggaacaccaattattctcaggttttgttgtttaacaaaatcccaaacttcttggaggctttgttcatgttttcttattcctttttctttgtctttgttggattgggttaattcaaagaccttgtcttcaagctctgaatttcttctacttgttcagttctactgctgagagtttccagagcattttgcatttctataagtgtgtccaatgtttcctgaagttttgattgttttttctttatgctgtgtatttcctcaaatatttctcccttcacttcttgtatcattttttggatttccttgcactgggcctcgcctttctctggtgcctcttggattagcataataactaacctcctgaattctttttcaggtaaatcagggatttcttctcggtttggatccattgagctagtgtgattttttctggaggtgttaaaggaccttattttgtcatattaccagagttggttttctggtttcttctcatttgagtaggctctgtcagagggaaagggctgaaggctgttattcagattcttttgtcccacagtgtgttcccttgatgtagtactctcccccttttcctgtggatgtggcttcctgagagccaggctgcagtgattgttacctctcttctgggtctagacacccagcaagtctaccaggctctgggctgttactgggggttgtctgcacagagtcctgtgatgtgaactgtccatgagtctctcagccgtggataccagcacctgttctggtggaggtggcaggggggtgaaatggactctgtgagggttcttagctttggtggtttaatgttctatttttgtgctggttggcctactgccaggaggtggtgctttcaagagagcatcagctgtggtagtatggagaggcaccagcgtggggaagggggtgcctagaactcccaagagtacatgccctttgtcttcagctaccagagtgggtagggaagggcaatgaggtggaggcagggctaggcatgtctgagctcagaccctccttgggcgtgtcttgctgtggctgctgtgggggatgggggtgagattttcaggttaatggagttgtgtacctaggaggattatggctgcctctgctgagtcatgcaggttgtcagggaagtgggggagagctggcagtcacaggcctcacctagctcccatgcaatctgaagggcctgtctcactcccaccatccccctctaacagcacggagtcagtttccaggcagtgggcaaggagggctaagaacttgccccaggctacctgcctcccagctgaaaagggctttagttcttcccctgcctgtggagtctgcatgccagattcgcaccctcccctgagttctggccaggaggcttctgaacaagttcatattgttacaa

SEQ ID NO: 30638 - DNA, 2300 bp, Homo sapien
tcccctaccgtcatgtaatttaaacatttattttcaaatctttctcccttacttggccataagctccttgagaacaaagattgacagagtttcactctgatcacccaggctggagtgcaatggagagatctcggctcactgcaacctccacctcccgggttcaagtgattctcccgcctcagccttctgagtagctgggattacagacgcgtgccaccacgcctggctaatttttgtatttttagtagagatgggttttcaccatgtttaccaggctggtctcaaactcctggcctcaggtgatccaccctccttggcctcccaaagtgctgggatttcaagcgtgagccaccacgcccagcccctgtatcttctttattttatatcatttgtattcctaccacctagtacagtctgagtactcaatacattgtggtgaattggcaactctctagccccaattcaccatggtcctcatgacagagagactaactctattgtattgaatcaaatttccagtcacgtattgtgtcctttatacattcaagttataatgtgtataaatgcatggcaaaagggccaaaggagccctaatgtaaaaacattggcaataaaactgttgagacaaaccaagaatccaggttgccagggtcagcagttttaacattgttttatggtacattgtgtacttttccttcttactgatatgcattgcactgtgacctttgcagagtcctatcctgccctgcatttttcacagagttgctctcagtctcaaataagataccatatgcatgtgaaagggcttttgaaatggaaaagcagtagaaagttgaaagtaaaatggtctctttctctctagggcatcaaggcatctcacagagcacactttagctactgggaggattgaccttgggtgaaatttcagtatgtaaagcttgtttggggttatcttacataattttttctttccttgtgctatacacacacacacacatatatgtgcatatatgtacaatgcacatatatacacacacacatatggcacctagtatatgcttggtgctatgctaggtgctggggagacagtgagaacaacccaggtgcccaggacctgtcctcacagcccacctaatccttttaagtctttacatacctcccatcccccacccccatgctccttactcatggtattcaacccaactgattgacttatttattgttatttatatgcttatatatttatagatttatcattttatcaagatttttacgaagatactcaattggaggttcctaattctggagaaatttccattttacaaatatattcttggagagggcatgattatggacctgtcacatttgagtactgtggcagttagaaggagggcaattttgggaggcccttccaggctatgtccttccagctattaatgaggttctgtttcagagcagaccatattacacggtgttattaataaatctggcgagtggttataagggtgtgtgtatcggaataatccattaagctgtacattggttttatatggctgtctatatttgtgttttatttaacagtaacagttaacaataacagttaaaaataagtatcacttcttttaaaattcacacaacttcttgggctgagtgaaatgtggcgcaggtgcaggactgtgggaagacaggagcgccagggaatgtctggccagcagcgcgctgccctcaaggggcctccttgaaggccccttgaagagggcaacacaactaatgacgataacaataacaacgatgacaatattgacgatgacaataacagtaataaatccgagcaagagactcgaatctgtcaaacagcagcgaccaccacgaatcgcatccccgcggcgccgccatacaggagactgccctcgccgaggccacagcggctctcgcggcgcccctggaggcccccttcctgccttggccagaggggcggggcgtaggctgggggcggggccggagagtgggcggggcctggcgcgtgggcggggctccgggcgggccggccgccgagggtggggccgaggaggaggaggaggaggaggagaaggaggtaggggcctgcgggtggctgggcggggcgcgctcgggcctccgctcttcacgcgccgcattcgtagcccgagagtccgcgccgcggggaggcttggaggcaagcgctgcccgcgagctgagccgccggaggaggagccgcgggcaacgaggtaggcaaaggaacactggccgcacggcctggagccttcagctccctcgtcccg

SEQ ID NO: 30639 - DNA, 2300 bp, Homo sapien
taatgaattgaataattactgtgaaaagtataaccagcataaacagactgaggacaaatgcagctgactcttagtaaacacacaacccaactactaaggtaagaaatatgagagtgtaagagaaactattagccacaaatctgtgtgtgatgggcattagttgctctgtttcagaggagaaatggagagctttggctaaataagataatatgttaagtggagttcctttgagagacgttacatagtatttcactaagtgctgtatatataaagttaagaattacagtaaggggacttaaataaacaggaagccttcatgaaatagctaaattttgagatggatcttgaaagatgattagaatgtataatttgaggaaagggagcattctcaggaaaggaatgaacctactcacctacagccacaggttggtgttgggaaggagaggaaatttaaggtgtggtttaatagaataagcattaaattgtaagtctaaaggcctagttgcattcctacaaacctttttgacattttatttaggagataaataatgagggagaaaaagagtattctagtcgggagtgtaaggaaaaaatatgggaaagctacccacctcaaagaattaacatggaagcccagtgagagagaaaattgagaaaataaggaacgactcaggatgaagcataagaccagtggttttcagttgtaatcctctttcaatcatagtacgtatcaaaagctttcagataaaatttgatgtgaacagaagactctgccacttaaaagaaattctttaaaacacagctttagacatataagcctaatgtatacattagaaagagttgtcagaatgtcttgaaaagaaatcagtgggaaaaagcagacttaaatttgtaggaaacagtggaaaaccaaagaatttaattcccactaaattagacaaaggttcagtaaaagagggttgtaagctatttttttgttttaataatgtttggtgtatattttctagacatagaaaaatattgaatgatgtggttgattgaaaataaatattgaaatctaaatataaaatgtgagaaaacagccctctgtatcaatgtgttctacatctagttggaaaatatttggggaaaaaagtatggttgcatatgtattgaatatgtacagacttttttttcttgtcattatttcctaaacaatagagtataacagctatttacataatacttatattgtattaagtattacaagtaatctagaaatgctttaaagtatatgggagaatgtgagtaggttgtatgcaaatattacacattttatgtaagagacttgagcagctgtggattttggtccgtggagggtcctggaaccaatccccacagttaccaaaggatgactttactttatgattcacttacaaataactatatgaggcagatatttaatatatgatgaaataataggtattttaaaaatcttaactgattaaagcttctcaaaggaagaaaacttacaaattcagtatgtagtatgtcattgctgtttgatcatcttttgtcctttttttagccaaatttcacttgcttatatgtatctaaaacttttctatggcattcagttgttctactttcttaatacttccaagaacaaattttcaaatatgttcatcatcagttcaagaaaatgtttgataactatgatagtcttttgctttaaaaaattttacatctgagatcaacagatctttttgtaaattcccatttgagaatgaaagtttctgtttttcctcttgttttgactagagagatctggaaagatttgggtatttacttcccttcaaataaaaaataaaaaactattcttaatagtttcaaattcgaagttcagtagcctgttcttttttttataaaatattaaagagaaaaagccgaaaatgttctacatactctttttcttctagtttgagaagaaactgctttatgtggattgacacctcacataccctgagtttaagaagttagcattatctgagaaggtactatttttaggtccagctgtaatgtttctaactttggtacacagagtagtgggtgctccctttcccagaaggctccatattctcaacatgtgcaggtcaatttgacataaagctaccaacaaggagcaacaggcccactgcaggctgtgtttataacttgaaaattatgagcaggtattgggagccacagactgtatttgggaaccagctgcatgtcaggacaagcatagattgtggtctgtggaggctgggagagcacaatgc

SEQ ID NO: 30640 - DNA, 2300 bp, Homo sapien
gtgagagctcggtgaagtcctgatcggcacccatgaaggtgaggccgcacgagtccaagggccagaggccgtgggaacagcgcgggtccgacgggtaggagggggcagtgggttcgagcctccacgcttacatacagcctgccagggccttagagccctctgactgcgaaccaccgcagagaggtgcggaacgcggccccgacccggcaaaagccgtccgcacgcctgctgggcgcgcagccacgttgactactgcagccttcccggctcggcgagagcctgccagccagccgaggctgcgccctttccgcggtcgggatgagcggttccaggagaaaggccgcgagggcggggcttggggcctggcgcggctatttcctcacaccgcggtcagtcaggacgagaggccgcgttcaggccagtgcagagcgccacatggcgctaccaagtcgggccccggcgttggcgggcacagaagcagtgtaatgcgggaagcctgcagcccacactggggaaggatgtgccagctaacgaatgtttcaccacagcccacatgcctgggagagggaatttgagagcacgtgggggaggggcgaagagagctgtcggctcgcagagagcatgctccattctgagagtcgaagtggagagccaggcatgcgcagtgagcccagggtgggttggcagcggtgagggactggcgcgagcaggctgatgtgtttatccggttttctgggtgggcggtcaaagcgcacgcggaagggcgaaaggcggcggagctaggtagcagcttgcgcatgcgtggagtgagccggtagctctgggaggctgtggagggggttgttagaggagaagcaagggaaaagggaagcgaagggagaggaaaggggggaggggtgagagtgtgctctgcgcatgcgtgcgagcgctagcgacgacggcggcgggggagtctcggggatgacagtggctttgcccgttggggtaacggtcgtcgtcgccgccagcagaggcctgaggcgccacacagcccgcgggatccattaaggccgcagcagcccgggccctaccgagctggagtggcgcgtggagtcggggtgagggcggcgaggcacgggggaggggcctgcggcggggccttgctgtgtgcgctgggcggcggcggggcctggcggtgtgagcgcttgccttccgcggccggggagtgctgagggcggcggcggccgtcgtgctcggcggaggagtcgtctgtgtgtgtggcgccgaaaaaatggccgggcagtgagggggcggcgcttgagtctggtgaccccggagtgtgcgactgaggcgcgaggggcgccgccgcggcccggccgggcttgccccccgccccctcccgcccgccggcggcggcccgcgcacttcctccccggccttcccctccgggttgaggactcccgcccgcctcgccacctcggggaactgcgggctgcaacccacggggcggagagccagggcgcagtctgggccccgcgtccgatatggagagcgcggcggcggcgtccgccagccgcaacatcaaccttcgtcgccgccgcggcgtcttgcactagatccgggaagccgctgcccgaccgtcgtccttgccgtcgccgccgcctccgcgccctgtactgggatggagtaagaggccctgcagcccgggagaagcgtgccgcgcctcagacggggccggggcctgctcccgcgcctgccagctcgacttgaggaggcgcctccgtgtccggagatggagctcgagtgcaggccgcctgccgagccgcggggctagactgagctccgagtcccgccccgagcgcccaagccgccgcgttctgcgctctgtggtcgctccggacgaactcgaacgctggtttctctctcatatttttggtctggaagtctcagggacggaggggcgccaaggccccatgtgtgggaggattgtttcagctccacaaacttgcacggattttggttacttgtttggccaatggttcggctctgatttcttccgaattgttgcaaattcgccatcgttccctggctgcttactaagttggatccggaatttcttttcaaccgggagccattggtgtcgaagtgtctgcaatgaaccccgtgaatgctactgctctctacatttccgcgagccgcctagtgctcaactacgaccccggagaccccaaggcgtttactgagattaacaggctcttgccttacttccgacagtccctttcgtgctgtgtttgcggtgagacgctttttattgttccctt

SEQ ID NO: 30641 - DNA, 2300 bp, Homo sapien
ttgtcattttccacgtataagacaaccaaatacagtttgcacagctaatcaaaattaggaagttatattcttactgcttaatatttaagtgttgataatatggtaggtcttgtgaaaaaaaaacctgtcttcaaatggtaatagaaattataaatcgagattatatgtgttcccttgatatcttaactattcctactcacctcaagtggcagcttgtaactaacacgtaccacatttacatgttccatatacgtgcctgtgtacatatgtaacatgtgccacaatagatttacacgcatcataattttcactttgcaaacgtatagagtacctactgtgcatgaaaaattatgctgaggagctttggtgtgtacagagataagaaatgcttcctatggcctgttactatttgtgctactcaaaaaaaggttttgtactttgagatgggagggaagtcatctactaagtcaggcttttgtttatttatatcccagtgcccttgatctcctgcaaaaacaaaaggcaaaagcttgttttaaaaaacaaaacatttgcaaggatttgggtttgttctagagcaagatcacgcattcttcaagacatctgttcacacagaagagctaggtcttttaaaaaagctaggtctttcaaaaaaaaaaaaaaggagttcgttttgtttttaaaacaggactctgttccggtgagagctcggtgaagtcctgatcggcacccatgaaggtgaggccgcacgagtccaagggccagaggccgtgggaacagcgcgggtccgacgggtaggagggggcagtgggttcgagcctccacgcttacatacagcctgccagggccttagagccctctgactgcgaaccaccgcagagaggtgcggaacgcggccccgacccggcaaaagccgtccgcacgcctgctgggcgcgcagccacgttgactactgcagccttcccggctcggcgagagcctgccagccagccgaggctgcgccctttccgcggtcgggatgagcggttccaggagaaaggccgcgagggcggggcttggggcctggcgcggctatttcctcacaccgcggtcagtcaggacgagaggccgcgttcaggccagtgcagagcgccacatggcgctaccaagtcgggccccggcgttggcgggcacagaagcagtgtaatgcgggaagcctgcagcccacactggggaaggatgtgccagctaacgaatgtttcaccacagcccacatgcctgggagagggaatttgagagcacgtgggggaggggcgaagagagctgtcggctcgcagagagcatgctccattctgagagtcgaagtggagagccaggcatgcgcagtgagcccagggtgggttggcagcggtgagggactggcgcgagcaggctgatgtgtttatccggttttctgggtgggcggtcaaagcgcacgcggaagggcgaaaggcggcggagctaggtagcagcttgcgcatgcgtggagtgagccggtagctctgggaggctgtggagggggttgttagaggagaagcaagggaaaagggaagcgaagggagaggaaaggggggaggggtgagagtgtgctctgcgcatgcgtgcgagcgctagcgacgacggcggcgggggagtctcggggatgacagtggctttgcccgttggggtaacggtcgtcgtcgccgccagcagaggcctgaggcgccacacagcccgcgggatccattaaggccgcagcagcccgggccctaccgagctggagtggcgcgtggagtcggggtgagggcggcgaggcacgggggaggggcctgcggcggggccttgctgtgtgcgctgggcggcggcggggcctggcggtgtgagcgcttgccttccgcggccggggagtgctgagggcggcggcggccgtcgtgctcggcggaggagtcgtctgtgtgtgtggcgccgaaaaaatggccgggcagtgagggggcggcgcttgagtctggtgaccccggagtgtgcgactgaggcgcgaggggcgccgccgcggcccggccgggcttgccccccgccccctcccgcccgccggcggcggcccgcgcacttcctccccggccttcccctccgggttgaggactcccgcccgcctcgccacctcggggaactgcgggctgcaacccacggggcggagagccagggcgcagtctgggccccgcgtccgatatggagagcgcggcggcggcgtccgccagccgcaacatcaaccttcgtcgccgccgcggcgtcttgcactagatccg

SEQ ID NO: 30642 - DNA, 2300 bp, Homo sapien
ccaggccaaaagcaagtcccaatttctgaacatgaaaaaactcttcacaatctaatgccattctcactttccagtctcatttaccaccatttccccaaaagctgggaacacaacaaagtatgtgtgtgtgtctgtgtatgtgaatctgaacatgccaggcctttgctcacactgcttctgttccctggcatatggatgctttcttggagaaactctcctcaacacactcagccttactcaaattctctcttgtgctcccaaggcaatctgcctctctaggttgtccatctgcctctctaggttggtaaagtctttaaagcaaggacccaaatgcaaggtcaagagtacccattacggagttatacagatacaggtgggctttgcctagccaagaggctttggcctctaagctgccctctctatctagatgaactgttactactccaggaaatgcaatcagtactgatgtttagttcttggcacatggtaggtgctcaaaaatgttttctgagttgaattgcattaacattaaggtcataggtcagaatttgtactttatgaaggccctggctatgagctggatctgggaagggctcatgatcaactttagcagttttctgtggctaaaaatgagaaatataaaccatgttctttgtcttgaagacctgcctgttagtgggagaaacagatggtcaagctctcaacagtacaattccaaattcctagagcagtggttcttaaactttagcaagcagatcagaatcacctaaaggtcatctgctaaaacagatggctggccccagccccagagtttctgatttaaaggtctggagtaagttctgagaattcgagcttgcatttccaactcactcccaggtgatactgaagttgctggattgacaagattccctccttgatcaaacattggtcaggctcttctgagctctctctttgactaggcctgagtgtgggctcccatgtcattccttgtggaattccattttagcaagaaacttgccaagtcagtttagccagaatcctccattcttgatatctgattactctccatatctggttttgacccataccgccaccatcccccaggtgatgttcagttaccctgacctgccttgggcaggaatcctgttaggtcaatttagccagattccccgccaatgtttcctcttagtaattttccatccactgacttccacacactgccccttagctataaattaccactttgctatattcagcccaatcgctctgacttatggcaaaactctatccctacctctgtcagattgggcctgaataaagtttgccttaccattcttaaacatgaataattaagtgtcatgaatagttttttctttaatgggatccatactttgagaactactgattagaggttaagggtcctgtgctcattatctggcacatattaatgataggtctctgagtttgaatcctggccaaccacattgtcagtcttggcttttttttttttttttttttgagacagggttttgcccaggctggagtgcagtgatgcaatcacggctcactgcagcctcgacttcctgggccaagccatcctgccgccttagcctcccgagtagctggggtcacaggtgcaagccgccatgcccagctaatttttaatttttttgtagaggtggggtcttactatattgctcaggctggtcttgggctcctgggctcacctacctcggcctcagtcttgcctcttgatcaaatcactcatctctctgtgcttgatttacctcatctgtgaaatccagatagtaagctagtgcatggtaagtgcaaaaagcaacacctggcacaatgcttaataaatgttggttaaatcttataatcattttctgtaggaagtgggacgacaaagttaagggtctaggtggtcagagaagagcaaggactatgtcccttttttgtgcagccaggcaggccctgtactttttctctgcgcgaccctcctcgggcagcaccgggtctcgaactctcacgccttactcccaagcaggttctgtagtccagcccccgcggctccctacagccagccgatgctgcgcaagcgccgtacccacgctttagcacatgcgtactcaggtgcgccggtaggggacgcgccggcacagcaaaaatggcggcggcattacgggtggcggcggtcggggcaaggctcagcgttctggcgagcggtctccgcgccgcggtccgcagcctttgcagccaggccacctctgttaacgaacgcatcgaaaacaagcgcc

SEQ ID NO: 30643 - DNA, 2300 bp, Homo sapien
attgtgccacttgatgagaatgctccttctgtggtactcctgtggaaaggcttagctcaaaattaaacatgaagaaataccaaaggaacccaaatagaagtcatgctttacaaattaactggtctgttgtcttcaaagatgtcatgattatgaaagacaaagatggagggggaaagttaaaggagcctaaagagatataaccactaaaagcaccaggtgatcctggctcaggttctggaccagaattttgttgcttgtgctgctataaaggatactattggaacaattggcaaacttgaataatgtcatataataagaaatagtggccgggcgcggtggctcacgcctgtaatcccagcactttgggaggccgaggtgggcggatcacgaggtcgagatcgagactattctgaccaacatggtgaaaccatctctaaaaatacaaaaaaattagctgggcatggtggtgcgtgcctgtagtcccagctactcgggaggcttaggagaattgcttgaacccagggggcggagattgcagtgagccgagatcgtgccactgcactccatcctgggcagctaagcgagactccgtctcaaacaaacaaaagaaaattgtgaattgggcacagtggctcatgcctgtaatctcagcactttgggaggctgaggcaggtggattgcgtgaggccaagagtttgagaccagcctgcgcaacatagcaagaccctgtctctacaaaaaatataattttttttttttggtggcatatacctgtagtcctagctacttgggaggctgaggtgagagaattgcttgagccctggaggttaaggctgcagtgagctgtgatcatgcttctgcactccagcctgggtcacagagcaagacctgtctcaaaaaaaaaatagtattgtggtaatgtttatttcctgattttgataatatcactgtagttataaaaaagaatgttcttatgtgtttatatatatataaaagagagagtgatggtcgggcacagtggctcacgcctgtaatcacagcatgttggaggccaaggtgggaggattgctcaaggccaggaattggagaccagtctgggcaacatagcgagatctcatctctactaaaaattaaaaaattaactgagcatggtggtgcacagctgtggtcctagttgcttgggaggcagaggtggggaagatcacttgagcccaggagatcgaggctgcagtgagccataattgcaccactgcattccagcctgggtgacagagggagaccctgtctcaaaaaaagaaaaaaaaaaaaagcagaatagtttgtagtaaaataataatgaagaatcggggtgaagggtatatgtactgttcttgaattttttatttttatttatttattttttgagataggatctccctccgttgcccaggctagagtgcagtggcataatcttggcttgctgcaacctctgccttccagtttaagcgattctcctgcctcagtctcctgagtagctgggattacaggtgcctgccaccacaccaggccaattttttgcatttttagtagagatggggtttcgctacattggccaggctggtcttgaactcctggcctcaggtgatccacctgcctcgacctcccaaagtgctaagattacaggagtgagccactgggcccggcctgacatttttatttaggttggaaataatttcaaagtgaaaaggtaaagttgtcacaaaaattccacactcaaataggacttttaaaacaaacttcattggtgtgtccatcttagcagcagttgaggttttccacaccatttctccccagcagggaggaggtgctgcctctgcctgttgtcctgcttccttggagaacctgtgatagagctggagctgtctacctctacctctgtaattctgtaatagaaatgtcattctgtagtgtcattacatcttatacttgtctttaccattttgagctcagaagtaaatttattcctgcaggttgttgatgagcgtgaattttttgagatcatgcccaattatgccaagaacatcattgttggttttgcaagaatgaatgggaggactgttggaattgttggcaaccaacctaaggtggcctcaggtaggatggagctcttataagccttggttttggggttggaggccagggaagcctgggtccatggtatcctttctgtcttttgcctgttcttcagacatggccttccatgaccagaggaaaaaatctaaatggttgttataaaagctaattttttttttttttttttt

SEQ ID NO: 30644 - DNA, 2300 bp, Homo sapien
ttgcatgaggcattcagggaacacccatccactggcctgtagcatgggtcctcacggcttgagactctgggcttacatgcataattgcaccctggcagtgcccttttgaagaccacatagagtcaatgcagctacagaaatgaagttttcagccaggcatggtggctcacgcctgtaatcccagcactttggaaggccaaggtgagtggatcacttgagctcaagagttcgagaccagcctgggtagcatggtaaaactcctctacaaaaaatacaaaaattagctgcgtatgatggcgcacaccagctactcgtgaggctaaggtaggaggatggcttgagcccacaaggtggaggttgttgcagtgagccaagattgcaccactactgcactccaatctaggtaacagagccagactgtcttaaaaagtttctcttggcattagacctcctcactctttctttaagaagtcataccctacacacttcatgggtctggcaatagggggtgagttccttaaatggcctaatatgcctatgcaaaaaaggcaaaggtgtgggagacaaatcagcaagcaagctttccagacagccaaggaaggaaggtcatttaaggatggtctgtaacagctcatctagatggttacaagagtatgagactagatgagcactttcaggcttgggtcaggcttgcaaatctcccatttgtggcttgactgtaactccctgtttgcccctgttcccaggtaacagtccatcaagcagggactagtatattcatgggaaacaaaggtttgatgccactcaggcttgccttttttttttcggggggggggggggggcggtaagtgaagacagggtctcggtctgtcacccaggctggagtacaatggtgtgatctcagctcacagcaacctccgcctctggggttcaagagattctcctgcctcaggctctcaagtagctggaattacaggcacccaccaccacgcccagctaagttttgtatttttagtagagacaggctttcaccatgttgcccaggccggtcatgaactgagctcaagcaatccacctgccttggcctcccaaagtgctgggattacagggcatgggccatcgcacccagccttaggcttttcatactagaccaagctcaggtaagattctatccctgcccttctgagtgtcttgttctgtggagatctccatcaggcaccactttttgaagagcatctttctgctcccaaggacacataaagggagtattttcaccacccaggacagtagggacatggtcaaaacttaactaactattgaggctgccacattggctggaatatgccagctggattccacagaggccccagactgaggcactgcctatcaagtggctgcaactcctgcttggaattgtagaaatcccatgctgacatcagaggtgcacagagtatgaggaccaatacttctaaaagggtaaagtcatagctctccagaaatcctttggaaccagaaagacaaaacagtcacatctgttgaataggtgaagagggctgattcatcaactccacatgtgggtgagtatccttcacagacttctttggctgagcagaccacatcttaagcaccagcaccaggacaaagtatcagtgcaaccagaggcagaaagttgggctggggagaccaagacagggtcaaaaaaagaagctagaagaactttgcaacaaaagcactttctaacaagcattagaagggtgtattgtggatgtgctccccattactctagcaactcaaaaagatgactggccatctgttggtactgctttgcaagagaatcatgcgggagataggaaagctgtctaaatgtagtagctttctgggttaagacaagcccaggggaacagaccaccaacctccctcacccctactcttaggccaacccttagaagtccatctcaccttcctcatcagctgagtggtagtactttgaaatgatcagaacacaggcttggctggggtcaaacccatctgagttcaaatcccagcttcaccacttgtcagctgtgtagctcaggaggaactggattaacacaaggcggggcaggaccagcaagaccctagcagtgcttcctacaccacagctcaccatattatctgctctcagtttaaagacagacacttgtcagctatcagctcagtggacccaagtatttcccatttacaaaattcagtgtattttctttttccctttaaggtgagggcaccagctggggaaggcattcccacacaagagaacactc

SEQ ID NO: 30645 - DNA, 2300 bp, Homo sapien
caaaattgacaaatgggatctaattaaactaaagagcttctgcacagcaaaagaaactaccatcagagtgaacaggcaacctacagaatgggagaaaatttttgcaacctacttatctgacaaagggctaatatccagaatctacaatgaactcagacagatttacaagaaaaaaacaaccacatcaaaaagtggacaaaggatatgaacaggcacttctcaaaagaagacatttatgcagccaaaaaacacatgaaaaaatgctcatcatcactggccatcagagaaatgcaaatcaaaaccacaatgagataccatctcacaccagttagaatggcgatcattaaaaagtcaggaaacaacaggtgctggagaggatgtggagaaataggaacacttacattgttggtgggactataaactagttcaaccattgtggaagtcagtgtggcgattcctcaggaatctagaactagacataccatttgactcagccatcccattactgggtatatacccaaaggattataaatcatgctgctataaagacacacgcacacgtatgtttattgcggcactattcacaatagcaaagacttggaaccaacccaaatgtccaacaatgatagaccagattaagaaaatgtggcacatatacaccatggaatactatgcagccataaaaaatgatgagttcatgtcctttgtagggacatggatgaagctggaaaccatcactctcagcaaactatcacaaggacaaaaaaccaaacactgcgtgttctcactcataggtgggaattgaacaatgagaacacatggacacaggaaggggaacatcacacactggggactgttgtggggtggggggagtggtgagggatagcattaggagatacacctaatgctaaatgatgagttaatgggtgcagcacaccaacatggcacatgtatacctatgtaacaaacctgcacgttgtgcacatgtaccctaaaacttaaagtataataataatataataataaaattaaaaaaagaaacacatacattagcctaggcctacaaagtgtcagaattatcagtatcagtgtcttccacctcccacatgtctcattggaacgtcttcagtggcagtattttgcatggagctgtcgtatcctatgataataatgcattcttctggagtacctcctgaaggacctgcctgaggatgtttcacagttaatttttttcataagtaggagtacactctaaaatcatgattaaaagtatagaatagaaattagtatagtatagtatagtatagtatagtatagtatagtatagtatagtaaatacatacgccagtaacatagtcattcattatcctcaagcattaggttctatacacaagttagatatgctatactgttatacgactggcagcataatacaccagcatcaccacaaacaacatcacaacaaactcgtgagtaatgtgttgcaccacagggttatgttactacatcactaggtgataggaatttttcagctccattacaagcttatgggatccaccatcatgtatatgcagttcattattgacggaaacatcactgtgcagtagtacactgacattttttaacattagaatttttagaaatattcattatactatgttgaattagagtttcaaattttatgctaatttgattaagcagtatacaattgatttctaatctttgttataatctatcaattttgtatttgcaaagttgggttaaactcattttgttctttgacctgtaatcaacaccttgcttaaactcattttttaaaagttcaagtcaaactatcttaatgagctatttttgagttgatacagcaaagtaaaagaaataggttatatttgggaaaagtcttaaatatgacacttgtttagtgagaaaaaataattttattaaatttggaaattataacaatatttggaatttaaatactgaaaatttatattatggtactgctattaaactatgttttaatttcatacattttcattaatgttgacttgtagttatatttgtgtaatattttgctgataaattgcctttgtattccaggctttcatgttactctgtgatcttctgatgattttcagccaccaattaatgacaggtggcagagagggccttcagcctttggtgttcaatccagatactggactccaatctgaactcctcagttttgtgatggatcacgtttttattgaccaagacgaggagaaccagagcatgggtacttgtagctatcatcttgtcaa

SEQ ID NO: 30646 - DNA, 2300 bp, Homo sapien
ggaagtgtcttaaaagaaagggaaaaagggtttcaagtaggggatggggattggtgaaaaccgtaactgtttcttttgagaatgtgtcaatgaaaggaacgttgatagcatagcaactggagggagtaacatcactgaattaaaaaaaaaaaaaagacaaaagaaactttttttttttgagacagagtctcactcttatcgcccaagctggagtgcagtggcgtgatctcggctcactgcaaccttcacctcccgggttcgagagattctcctgcctcagcctcccgagtagctggcattacaggcgcacaccagcacgcctggctgtttgtatttttagtagagacagggtttcaccatgttggccagggtagtctcgaactcctgacctcatgttatctgcccgcctctgcctcacaacgtgctggtattacaggtgtgagccaccgcacccagccaagacaacagaaacttctgagaaacagaaaggaagaagacagtggataagaacatatttacattataaggcgctaggaaagtagtggtggaaggagaaggtgggaagggatggcatagtttcaggcagagggagtggctttggagagaagggttctgggttaatttggttagaagttttgggatcacgaacaggaggtggtcacagatattttataatggaggcaaggtcaaaccggaattggagtcccatagctctgagcccaggaaactggatgaatttatctattagtatggactgggactggcatctttaacaacatggaaagcttgaaacagtctttgtggaaaataggagatcagccagagattagaagaaaacgcaagaaaattataagtaggagtccagtcacgaattcatatccaatctggtcagttatgacttcctccagcgaaaagccacacatcttgcaaacccttgagagagaaaacacaaataggggtaacctactggagacaggcccttaagactataaagtagttgagcgattccatactgaaatagagttggctatagcgatagagaagttagtcatatatggggctaatgatccaggagagtaaggattcacttttgtggtgaaaagttgtaagcaggtgaaaggtagggatccatggccacggacgggcaggtggagatcagggaagaggcgacgttaaacataaatagtttgttaatgatttcaccttactgattatttctcttttggcatctagaaggctaagattctcatgtgtatttcagagctactgaaagtagtcctaggttgtggagggagaaatccactttcacagctgagtctatcttctcagtctagttatattctcctctcacaaactagccaatgctgccgccttatgcaaagccgacaccacggaaagatgtgctttacagaggcaggatgacgccaatcggcctagggccggcggtgtttcgtctagattaatggcgagggaagtccccaatagtccttttgaaaccttttcactcttgcctggtgaaagcgcttgtcagccgtaaatcgcgaatacaatgctaagctctgaggcccttgctaaatccaagtaggagcagggatctgcgcggcctcaccctcgggtttccgcagggcgtctcgagagctgcggatgggggcagcaggagccgggcgggaacagaggaaagcgccggccctgagacctagggaggagcctcggtgaaggaacccggggcgggttcctgcctagatctccaagaagctccaaaaatggcgggcggcaactcggcgagccggacgcgcaggcgccaccgtggccgtccttccgccagccgcgggcggcccaagaaccgtccacagcgcccttatccagaagcctacgcctctcgcgattggctgaactgcgcgagcgctccgtgtgggggcggggccgccacgcagcggccacgtttcccgccccgctggtgcgcgtgcgcgcaatccccactggaaagcgtttgcgcgcgcccctgccgcggcccctagctcgcgcctcagctccctcccctttccgggcaggcccgtcccgtcagcaaggcagtgagcaccgcggccagcagagggcggtccggacccaagtctgcagcggcgccattggcgtgtggaaaatgccaccagatggcgggttaggattgcagctccgttgaaggcgcggcccccgctcccgaacccccggcgaccaccccgtaacaacccccccacatcgggaataacacaccggagacttttggggggaaactaggtcgatggtcggcggcgcccggatgg

SEQ ID NO: 30647 - DNA, 2300 bp, Homo sapien
tgaaacataagctcaatattttattggaactactgggaaataagtgctctgcttcttttggaatggttagctataaagatgatataagttgaacactggggaaaggtggggaggtggcaagaaatcactatgtgaaaacaaactctttgatgtcaacaaagaggaaaggagagatcatgtcctgatgtcaatgtttgcattcgtgaatctagtcatatctgaagttacctatctatggatttttcagttattaagccaaatatactccttttcttaaatcagtctgagtttaagtttttgacacttgtaaggaaaagccctatgtatcatagcacaaaataattccatttattaaacatcacaaaatgtctaaaaatcctctttcatatctttctataccttggtgtcactcagaatgtcagctgtgctaaatccctagtctcactctctcaaaactcccagaaaccatctctcctagtcagctcattccaggtctttttttcttactcccttactcaaactttgctggtcgccttccttatccccaccccatcccaccttctccaaaacaaaaaatctgagccttgcagatcagccgagccttctgaggctccttttgcttctttacctctattccttattgagatcagcacaattaatgcatgtctgaacaacaaatgatcctttctctttggaagggtgaaagtttggaaatatttacatgttaaatgttctgttctggtctcatttgtattcagtacaaatagtgtgtttgcttggacattaattttatttgcaaatagctacagctgggggtccctttgggtaagtcttgctaagatactgcattggtgggttttttgtttattttgtttttgttttgtttttcaaggggatggggaaggaatcaaagtagtcaaatcagtttggttgtttttacaagcccgagaaatggtcaaattttggattcagaccaagcacaccatagtgtgctagaggcaatttaatgacttcctaccctcttgcctttttccccctctttgggaacattcttggattttctacagaaacagccagaggctctcaattgacaattgcctcactcagcagtttcttgttaagcacacttgtcagacactgtttccaggactctcttaagtgtcctaagaatattgactcattcaaaagcagcccagctgtagttgggagagcaccagcacttgctctataaagatctagattgtctctctacctcaagaggaatccaaaatcctgttatgctggactctgaaatgatccccagccctttggtgatcacactgtttatgagcagtctgaattccattcttgggtctacctaaactagcaccctcgggctatggggcccagtggggagaccacctagcatgctggctgcctggagcccagggaactgtcaagatggctctggaagacttctcgccttttaaaagccccgtatttcttttacatatatttttgtcctcatgaattttgccaaccgcaatggactaaaatctattatagcgtcctggaaaggtggggaaaagatgggatagttgaggagagtttaatgaagggactatttaaaaaggtgtggatggggttaaaggaaacctctgggcgtcattacccactccaggcctgaaggggcaagggtagttagtggtaaccagaacctggagaaaactgcaggagagggccacaggatgggagtaatggctttcagatgaagaacatagccactgctaacagggtggcccgctggggatgcaggggaggtcctgaatcacatcctgccttctgatctgcaggtgcctcccacttgccaaaaccaattgaaagccagattatagttgacgtagcccataaaggtcagtcctgagtcacagagcagagtggagagtgggtctgaagggacagaggaaaaaccagcaagcacctcctgttttttcccacagccagcaccttggttcagcccttaccctttcttgcctgtcccctggacccatcaaatccactgcttttaatgaccagtctgtttccaagaggctatattcattccacttgggactggggcatatgcacttgggtagaagaaccagctgtgcagtgtcaagacccttccctcagagaccttatcagtaaaatggcgggtggactcggggatgcccgaagacttttccggaccacgattttccgatgctggacacatatttaaacatgaaggaatagacttgcgacttttaagcgcaaacaatgggtggaaatggacagaaact

SEQ ID NO: 30648 - DNA, 2300 bp, Homo sapien
ttatggtgggtttattggaacataacccctttgtaagttaaggaacatttatatagtcacattaggagtgagggcttcagtatgaatttttgggggggatgcaattcagtccataccagtcatgataaaatatgcagttatttaaacccttagaataaactcaaaattcaccgccattattcactttggatgctaataacagaatgtagacatagagtagctgttgcccagtttcatggtctacttgtcccagtcaacctgaggatagtacagcataaataggtaaatttgtgcttgaccttgtgatcctacatatggcaggctgtcttagtccctttagtgttgctagaaaggaatacccaaagctggataatttagaaatagaaaaggtttttcggcttatggttctgatgtctggaaaagttcaagactgagcatctgcatctgatggtagcctaagactgcttctactcatgccagaaggcaaaggagagctggtgtgtgcagagattacatggccagagaggacgcaaaagaagaaaggaagtgcgacgttctttttaaccagctctggtggaaataaagagaactcatttaccctctccccagggaggacattaatctattcctgaaggaaccacctccatgacccaacactgcccattagtccccacctccaacattggggatcaaatttcaacaggaggtttaggggaacaaacatctaaattacagcacaggccaaccacatgcatgcattaccaatcacgtaaataattttgaagttaaatgcagaaaactgcaaacttttgaggctgatatccagggccaggattaaaataaaaagtattaatgccttaaacagtatttactgaccatctaccctactgcaaggccctagggagaaactgaacagacatggttactgattcaacggagtttacaatctaggtagacatacaggcaaaccatttcaatagctcggatggagaaaacacctgtgctccaaggaaggtacctaactgagcaagcttccctgaggagcgatcctaaactgtgccacaaagatggttaagaagagatgaggcggctgggcgtggtggctcacgcctgtaatcccagcactttgggaggccgaggctggcgaatcacgaggtcaagagatcgagaccatcctggtgaaaccccgtcactgctaaaaatacaaaaacattagctgggcgtggtggtacatgcctgtaatcccagctactcgggaggctgaggcaggagaatagcttgaacccggaggcggaggttgcagtgagccgagatcgtgccactgcactccaccctggcgacagagcgaaactcgtttcaaaaaaaaaaaaaaaagaggcaggttacggcgcgggggcggggaagggggcctgcagcaccggcgaggggaagaaccaacttactgatgcctcagccagtggctggagccctaagaatggacagacctggctccgaaggtcctcttcataacactactgccgccaagaatgtaagctgcccaagcacgaggacacttttagagggccctcagactcagcttcttttggtctgtgcctcaaattaagcacatgtcttacatttctcccaggtcccaattttcaggtctgcttttctttgtttttctttgtcgctccccgctcctaagaaccttcggctgggatgacattcttcaggtgcagaaaccagggggaagctcccagagcagtgggggctgaactcaggacacagtcatttttgctgttaagtctctcctgcggcgctgaggaggcaggctcaaagtaaccaaccagagcagccgcagagggaaaagctaagacagttctggtccggcccagcgcttctcaccctctagctctctactctccgccgcgcagcctccgctccctccacatcaggcacggcgcttgattgacatgagggcccgcccaatcccagtgcggcagagaccgttgtcgcgtcagggaccggggaagggggcgactgaacctatcagattgggtccagagtgggtttcctgcccgcgcggatccgcctgcccaccgcgcgtgccccgcctctctcccaagagctacgcggcggcggcggagcgcaggcctcgtgccgttacggccatcacggcggccgcagtggcgtcctggagccctcctcaggtgagctggagctgcccggctcggcagcgggaaggtgagacggccttgttggcaggcagacacacacacaccccccttcagtccgctgtccgtccatacagcctgttactc

SEQ ID NO: 30649 - DNA, 2300 bp, Homo sapien
ggacatgtatatagtgtgtagaaaccctttaggacattcttggcagataatagatatccagtacacattggcttatattgctaacttttgacatgctggaactgtgagcagaagcgaacttaggagagaggaatcaggaagccaagatggagaacaaaggtaacattggggacagacgttgaggccatgtatgaagcactcttaagaggagcagtgagagactgtacaagcagctagtgaccagaggtcaaagtacagatgtggccactgactcacagtgctggaatcaaggaaaatatgcaccaggttttcttgactatggtgtggtaaaaagatatacagcaatgtttattgtatacttattttgtgccagatcctgttctaagtttcacttaatcctcacaacagccctgagtcagacactattataattgttcccaattttcagatgagaaccataaagcagatagtttaaatgacttgcctaaagaaacacaactaaaaagttgacaccaatcaacctgagacaaagattatttatatactagagactcccctgcccatataagcatctaagctcaaatttcgcaagctgaacatttgcagcctttttctatagcacccccaatcctgcctgtcctgaccacactccacccacttcattatttcacttgaggtgctgccatccacccagttacccaaactcagaacctgaaagccatgtttggctcctcctccccagccctcttaatgcactcaatatccaggagctatcagttctatcttctttatcttttgaatttggtcatttctctctgcagacatgagaaacctagtggaagccaacaatgtctgtcacctggatcactaccatagctccctcatggccctcctgccttcaatctggccccctgtgctgttttctccaccctagtcacaaactttttaaagctcaaatgcagggaatgacatggtcatatttgagctttgaacccttcctttgaccttcattcctctcaggataaattccaagctcctcaataaggcattcaaaactctctagaatcctgtttctgtctgccactaagccctatttctcgccatttcaaccttgttctcgtgttgcaccaaacttcttcttgcttcctaaaaacaacattcctggctgattttttttttttttttccagagtttaacacccagtcctggagtcacctcctccaggaagctttctgtaatcctacaaactgggttagatgtttctttttagtgatgctatgtttccttacgaatattgctgtcccttcattttaaaaattgacttatgattattcccgtgtctatcttctccactagttgggaaattcttgttgagggaatggactgttgaattcctaagaactagcacatagtaggccttcagtgaaggtttcttgaatgaataaataaatgaccaactttcccaaggttacattgtaagttctgaaacttgaaccaaaatacattatactctagaacccatgtttattccactattgtatttgcacattagggtggttaaagtccttcaagggctaaattttaaagggctaaatactatcacaaggtttttcttccacctattgaaattggttttaatttttcagtaatacattcacgtgactcagtaatcaaacgatatacaaagatattcagtcaaaagtcttgttcccatttttctcttccacctttccaattcccactttctctgccccaaggtaaccaatcttgttcatttcttatatcttcttttagtttttctttttgcaaatgcatgcaaatatgaagctatatattattctttaccctcctgacttttagaagggtattttaaattttttcaaatatctttagtttttctgaagtgggtacatattagaaaaaagagctagtcagtacccagcttgaatgaactcacagagagaaacttggaagaggacagctatttaatgagggagggagataatcctgcctgctcattggcttttagggaggtgcagagtcctttaggacagagcctgtggtccgggtattgctcataggcagattctcaagctccccaaagttacattttctctggaactctcctaggccactccctgctgatgcaacatctgggtttgggcagaaaggagggtgcttcggagcccgccctttctgagcttcctgggccggctctagaacaattcaggcttcgctgcgactcagacctcagctccaacatatgcattctgaagaaagatggctgagatggacagaat

SEQ ID NO: 30650 - DNA, 2300 bp, Homo sapien
caggctggtctcgaactcctgacctcagctgatccgcctgcctcggcctcccaaagtgctgggattatggtgtgagccaccgcacctggcctgttttgtcttgtttttcataatgaatggatgtgggttttgtaaatcctttttctgtgtcaattgatatgatttatgattttattctttagtttatcgacatggtaaattacattaactgattttcaaatgttgaaccagccctgcatacctagaacaaatcccacttggttatggtatatagttctttttgtacattactgaatttggattgctatattttgttgaagatttttgtctaagttcatgagatatatttttatgtagtttatgtatatattttcctcatctgattttggtatcatggtaatactggcctcataaagtaagctggaaactgttctttcctattctatgttttagaggaaattgcattttgttgatgttgtcatctttaaatgtttggtagaattttccattaaaaccatctgtgcctggagatttcatttttgagagctttaaagttatataattaaattacattaattaataaattgatttgttgacataatttaattatgtaattaaattagttatataaaatgtagctttgtatttatataggtttatattccccaaatagctggctagagaatttttttaaaactttaccagaggaaggtgtcagaggggaccattccttgtcctcctgtaccactctaccccttttcctttccatcccttgggtgatttcaagcttaggggtgggtgggggtcaggaagactgccttgtgggtgctccaggtgtttccccacagaacagaccatggatgctgagggtgagatggaggtgcatcactagggccctacattagagaaagggcagggaaaccaggtggggtgtccccagcagccttccatccctttgtggtcacagggcttgataacaaacagcaggtgccaatctggagataggcacagagatgaaaagtcccaaatgaggactccagccccacccccactatgctgtagatgctatcactgcactgtaacagcaaagggaggcaggtgttgggcatttaaacaggaacatagcagagagttcagactgtacctttgggtgacatgtgaggatgaagtttttggctttgtgactgcccaaagtccttatgagcaggttcagcttcataggcctctttcattctctacaaatcatagtcccactgtgtgcatactctgggcacactgtgtctgggtacactcggggcatacttgtgtcccagactggctcaggggcctgcagtctttccggggtggactcacagagctggcttggtgtcccacttgaatggactctctccacagcagatctgagcctgtacttcccacctggcaactgatgacccatttggccttgttgagggacatgaaacgattgctttggcatctgaggatggcagtagcaggagagggaggtgatgagaatgttgcagtagtctgcattggttttccatgaatgattaagaggctcacgtttatgcaacttgcttaaagccacatagtaagtggcagagtcactggatcctagccagtctaacagaagagtcataaataatgtgactcagttttctcatttgtacaatggaaaaactaatggtctttacctcccagtatggtcatgagaattcaataagacagtcatgtaacaatccagcacatggtctagatagaacatggtaagtattagataaatattagtcattattattattaatattgatatgtcatttatcaacaaagtcagaattataatggtggtacccaaaatttagtgttaacataagcatgataaaattagagttgtttctggtttataaacatgtgaggcttttttttttttgagacagagtctcattctgttgtctaggctggagtgcagtggtgcaatctcagcttactgcaacctccgccagtgaggcccttcattagacactaatttgaagctatggcattcccccactatgagcccacctgtcagccaggctatctgccttgatcctagatgaagtggccattctgcctgcccctcagaacctctctgtactctcaaccaacatgaagcatctcttgatgtggagcccagtgatcgcgcctggagaaacagtgtactattctgtcgaataccaggggtgagttttttcttttaatagttcttctcccttaagcagaagttggttcctgaaggcatagcccttcctcctgagcccaag

SEQ ID NO: 30651 - DNA, 2300 bp, Homo sapien
ggctggtctctaagtcctgggctcaagcgatctgcctgtttcagcctcccaaggcaggtgtgagccattgcacctgcctttaattttttttttaagaaccagaattacattctgggtttttgtggggcagggtcttagaatgaggaactctgaccaagcagggcttcaagggaactgtagggtagtgaactgggagatattcttagcaaatgttggaagcccctgatctagggcttgaaattgttttttggtttttgtttttgctgcttggaaattaattaatcaaatagttaaaaatgtaataatattctttagtattactactactgctatcctctaatgaatattaatgaaaattatttttcagaaaataaccaattcaccccagaagttaatcagctgcagaagggaggaggtggatgcctgtgccacggctgtgatgtctcctgaggaactcctcagggcctggatctcataggtttgcggaagggcccaggtgaagccgagaacctggtctgcatgacatggaaaccatgaggggacaagttgtgtttctgttttccgccacggacaagggatgagagaagtaggaagagcctgttgtctacaagtctagaagcaaccatcagaggcagggtggtttgtctaacagaacactgactgaggcttaggggatgtgacctctagactgggggctgccacttgctggctgagcaaccctgggaaaagtgacttcatcccttcggtcctaagttttctcatctgtaatgggggaattacctacacacctgctaaacacacacacacagagtctctctctatatatacacacgtacacataaatacacccagcacttgcaaggctagagggaaactggtgacactctacagtctgactgattcagtgtttctggagagcaggacataaatgtatgatgagaatgatcaaggactctacacactgggtggcttggagagcccactttcccagaataatccttgagagaaaaggaatcatgggagcaatggtgttgagttcacttcaagcccaatgccggtgcagaggggaatggcttagcgagctctacagtaggtgacctggaggaaggtcacagccacactgaaaatgggatgtgcatgaacacggaggatccatgaactactgtaaagtgttgacagtgtgtgcacactgcagacagcaggtgaaatgtatgtgtgcaatgcgacgagaatgcagaagtcagtaacatgtgcatgtttgttgtgctccttttttctgttggtaaagtacagaattcagcaaataaaaagggccaccctggccaaaagcggtctttaaagttctagttacattttcaacctcaagtccagagaggctccaaaggatacctttggtcaagaggactcggggtgggggtgggggtggggatgggagcagcggaggagcagccccagaagtccagagcccagggctgcctggttgggggcagcctctggctgcatgagaaccccaactgaggcagctggcataagcttcgcctggttaggtgctcctaagcctttcctgttggccccaccccacaggaaatccctggggaaccctcttttccttgacagcttactcagggtatccccagcccctcttagtctgctcatttaggacctacctctggaagcttctacccacccctttgccccaccaggtgaagaaaagagccaaccacagagaaggaatgatgggaggaaacttcttgaggggtgaagggattgatgggcagggcctgcgccttgctttctaaccccctcgaagctctggagcctccaagttggtttatcttcaccctcacttcctgggccctttccagccagcccagtggtgggacagtctaactgcatcaactgggtgtttccccagaggcccacagcccttcaccacctggaggggtctctccaggagcatgagatcgctcaagacccgttccttcttttcctttgtgttattttgtatgcttctctgtgttgttcgttagagggtgtgtgctaattttatatttgacctaaactagaaacacactttcagtttgcaaaaacaaagaccatattactattccagtcatcaccctccctcctctctcttcctgcccccttatggtggggtggtggggggcactatccttctgtcacagcccaggcgcagaactgagaaaggaccctgacctccatctgcttgagtctctcacaactattcccagtgcccatccattttttggcatctataggtacacagagatttctcttga

SEQ ID NO: 30652 - DNA, 2300 bp, Homo sapien
gtctgtgtagtgagcaagagttaaactgtaaagaaaagagaagtagcaatcagcaggaaggaaaataaagtttccattccccaaccctcagattttctacttgtaatttagtggatgaaatatttaataaagaagattttttttcatttttaatgaggtgactcagcatatagattagtaataataatgatgataataacaacaactaacatttttggagtgcttgctatgttctaggccccattataagaactttacatatgtcagcccattttttttcacacaacaatcttagaaaataagtattattatttattattattgctattattatcctcactttagaaaaaaagaaagtgagacatttaaatgttaagcaacctgatcacagtcttacagttagtaaacattggagcgggcatgtgcccaagcaatgtgactccgcattatgctgtttgcttactgcagatgggtgtcccttaacacattattgacaagatgtggactatgatggatctaagtccatgtaacaaggagctacctgaattttaaaataatatggaagaaaagtgataagtatatataaaaatctagggatgggggggaggagccaagacggccgaataggaacagctccagtctacagttcccagcgtgagcgacgcagaagacgggtgatttctgcatttccatctgaggtaccgggttcatctcactagggagtgccagacagtgggcgcaggccagtgggtgtgcgcactgtgcgcaagccgaagcagggcgaggcattgcctcgcctgggaagcacaaggagtcagggagttccctttccgagtcaaagaaaggggtgatggacgcacctggaaaatcgggtcactcccacccgaatattgcgcttttcagaccggcttaaaaaacggcgcaccacgagactatatcccacacctcgctcggagggtcctacgcccacggagtctcgctgattgctagcacagcagtctgagatcaaactgcaaggcggcagcgaggctgggggaggggagcccgccattgcccaggcttgcttaggtaaacaaagcagcccggaagctcgaactgggtggagcccaccacagctcaaggaggcctgcctgcctctgtaggctccacctctgggggcagggcacagacaaacaaaaagacagcggtaacctctgcagacttaaatgtccctgtctgacagctttgaagagagcagtggttctcccagcacgcagctggagatctgagaatgggcagactgcctcctcaagtgggtccctgacccctgacccccgagcagcctaactgggaggcaccccccagcaggggcacactgacacctcacacggcagggtattccaacagacctgcagctgagggtcctgtctgttagaaggaaaactaacaaacagaaaggacatccacaccaaaaacccatctgtacatcaccatcatcaaagatcaaaagtagataaaaccacaaagatggggaaaaaacagaacagaaaaactggaaactctaaaacgcagagcgcctctcctcctccaaaggaacgcagttcctcaccagcaacggaacaaagctggatggagaatgactttgatgagctgagagaagaaggtttcagatgatcaaattactctgagctacgggaggacattcaaaccaaaggcaaagaagttgaaaactttgaaaaaaatttagaagaatgtataactagaataaccaatacagagaagtgcttaaaggagctgatggagctgaaaaccaaggctcgagaactacatgaagaatgcagaagcctcaggagccgctgcgatcaactggaagaaagggtatcagcaatggaagatgaaatgaatgaaatgaagcgagaagggaagtttagagaaaaacgaataaaaagaaatgagcaaagcctccaagaaatatgggactatgtgaaaagaccaaatctacgtctgattggtgtacctgaaagtgatggggagaatggaaccaagttggaaaacactctgcaggatattatccagaggaacttccccaatctagcaaggcaggccaacgttcagattcaggaaatacagagaacgccacaaagatactcctcgagaagagcaactccaagacacataattgtcagattcaccaaagttgaaatgaaggaaaaaatgtgaagggcagccagagagaaaggtcgggttaccctcaaagggaagcccatcagactaacagcggatctctcggcagaaaccctacaagccagaagagagtgggg

SEQ ID NO: 30653 - DNA, 2300 bp, Homo sapien
gaaatggccgaagagtatttttggtatgtttttcttgaacgttcatacttgatggactacaaatttttccttccattttgaggtctgtttcttgtccacttaaaaataatatgttggacgggcgtggtggctcactcttgtaatcccagctctttcggaggttgaggcaggcggaacacttgaggccaggagttcgaggccagtctggccaacatggcaaaaccccatatctactaaaagtacaaaaattagccgggtgtggtggtgcacgcctgtagtcccagttactcgggagactgagggcaggagaatcttgaacctgggaggcagaggttgcagtgagccaagatggcaccactacactccagcctgggccacagaggaagaccctgtcgcaaaaaaaaaggttattatagaatatttggaaacagaaaagttcagtggagacatcaattattctaccacccagtcaaaaacaactggtaatagtttggtggatttttctttgtgatgtgtgtgctttgttttatttcttcttgaataatagggtccagtttccacggtgccagagcttgtttccacaatgaatattaaaaacaattctggtttgaaaccactgtactttagagttttattttatgtgcggtggaagaagcctctagacttatcaggctctagccccgtggttcttacatgtgagtgtgcattagaatcaccccaagggctcattaaaacacagattgctgggtgtaacttcagagtttctgaatcagtaagtctagagtgaggccaagattctgtattaatgttccccacgatgctgatgctgctctggataccactttttgaggaccactgcctttgaataaaggggacagggttgaggaaagcacaggaaatgaaagctctcaaggcacctgaaaagggtatttctgcagaggaaatccatagattttggggaggatctgaacatagtattttgtaactgtttgtagaacaagtttatttgaattttagtctcagattctcctgaagaccttcttcaacagtgcttatagcaagctgacttagcagatcgatgtgtctcttcctccagtcttgattattgtagctatatattaagtcctgaaatcagagagagtggttcttctcactttattgttctttttcaaaaaattttagctattctaattcctttgcttttccatatgaattttagaatagttctacctatatctacaaaattcttgctggtgttttgatggaaactgcattaaaactgtgtatcagttgggcataattgatgtctttactatgttgaactgctaatccatgaacagtatctatccatttatttcaatctttcatttctttcatcagcatacaagctgcagtattttgtcagatttacacgtaattatttcattttattttgagtaattataaatagtgttgtattttgatacagaaaaagcatttgacaacatttaacactcattctaataaaaattctcagaaaactaggaatagggggaacttcctcaacttgtaaagggagcctatagaaaacctacagctaacatcatacttaataatgaatgactaaatgctttttccctaaatcacgaataaggcaaggatgtctgttctcactactgctattcaacacggtacacctagccaaggcaataaactaagaacaggaaaagaaaaaatgaaactctatttgtagatcacatgattatctacattgaaaattacaagaaatctacccccaaaatcctaaatctagtaagcgtaaatttaggaaggtcataggatataaaacatagacaaatctatcatatttccacgctaacaataaatatatgaaaaccaaatcaataatctactttctgactctatagatttgcctgttctggatgttttatataaatagaatcataaattatgttttcctttgttactggcttctttcactcagtgtaatgttttcaaggttcattgatgctgcagcatgtatgagtgcttcgcttctttttactacttaataatactccattgtggaggagccaagatggctgaataggaacagctccagtctacagctcccagcgtgagcaacgcagaagacgggtgatttccgcatttccatctgaggtaccgggttcatctcactagggagtaccagacagtgggcgcaggccagtgggtgcacgcactgtgcgcgagccgaagcagggcgaggcattgcctcacctgggaagcgaaaggggtcagggagttccctttccgagtca

SEQ ID NO: 30654 - DNA, 2300 bp, Homo sapien
tgtctgcaatgcgattataataagtgtattttattaatgtaatttgtttgcttttttgaaggatgcaagggaaaatgtgccttttaggagatttttttccatcttatctgggttcagtttgcagaattacacatactctgtgtgtacacactcaccctcaaaagccaaactcagaaatttccttgaaatgcccgtttttatgattcagaaatatcccgtgggaaacctattgtgatgttataccaggaacaattaaatggaccaaagcaatgcaattaaggcagagaagaaataagatggaaaatggggagaaataaacagattcttttccattaagtattgttttgagatttctaattttttcaggacctctaagaaaattgtgaggtgtcacttctctcttctgggtctatctgtaattgaatctaggtcactattctaaggcaagaaaagtctgctttccactttcctacatcaggctgaaatttgggggagggacaagggtcttgcaatttcatttaaaatgtaatggtggatgaactgataagcaaatacggaaaaaagagtctgcttaaaagaaaaaaaaggcatggttttaatatgctacagatggggggaaaatgatttacatgagagtttatttcctctttgctgatatgaaagaattacagatacaaaacccactgatctatagaataaaaaaagaaaagaaatgttattttcctgtaaaggtgtcagttcatttatattcatttaaccatccatccatcaattcactttctcactccttgcacattctctctggctctgttaaaccttcccctaccaatacactttgctagaatatgcaatgaagttttcttttaaaaaatagtgtgagattgagatgaagtaggtaaagataagtaaagagagaaggttttgttgttgttgttaaataattaccccctcataattcagcattatgatttatgattttagaacaaaattttacccatattcacatctcattactactgcagtttgagtacatacaacatgccagtggttaagaatatatgcagaagatatgcaattattttttcataagatatgcatgcaatacaaagaaatttattagttataaaccttcctgtaacttaaaaaatgtagtaaaagatgagtcagatgttgggtcaataattcattgttttattaaaatagctgttttaataagtatgaagtagttcacatttccctaaggatttcctgcttgctcaaggtatgagcaacatcaaatcttttgtgtttaaagttttcaggtccaaaaaaatgtatagtaaaatttgcatatattaagaaagaaatgagaggtgcagtcatttgaggagcttctaaatgctggagaagattacataagaatacgttttacttttcctgaaataaaaattgatgaccagtatgacagatatttcctccatattctcccaaataaaggggtaacatagtgtcatctcctctttcaatgacacgcaaatgaatgactggaaacctatagatctaagcaaggacaagaccaacaaccagcatctgttgctggttttcataagtaagaaaaacagtacattgtttaagacagcaatgcattcccacaggatgaatcttctccagactgaagaccgtttccttcaaccttttttttttctgtcttattcctttctcctcctcttgtttagttttcttttttttttttttaacctgtaaatactattgatgaatcagaaattttctttctaggtcttcataaattatcagtataattctttgtcatgcctgcttcttcctggtctcactttctctcactgtggtaatccattttcttaatcacctaatttttaatcaaccaaagtgagtatgaggtaaaaggattagcagtttgggcagaagttaaaatgtctcatggatgttttgactcaaactctatagacttatttgtagcaagtgcttatgatataattcagctgaacgagagggcagctttaagacattttagaattgtttcttaccattgtcttttacttcctgggctcttcaatgtttgtcataattatacctagttagaaggcttcatttgctctgagttatcattgagaactaaatggagaagaaaagaactgaaggcctgaagatatgtcatctgtagaaaaggtgagctgaacttttctctgtctgaacatactttgggtttacaatgagacatttacgtatttgtataaatcggttatactctgagctaatgtgaacacaaacttggtataaat

SEQ ID NO: 30655 - DNA, 2300 bp, Homo sapien
gcttccttgttttctctctgggccagtgaactgatttttctagttcgtttcttcactgtatgaattttttaatagattattgagggaatctaagacaatagttttcaaattatgttccctggatccctgtgggattctaataagtgatcttagaggctacttcatggagcaagagaaaagtttcttcatcccataaatcagagtagcatgcccttcctcctgccctcccactgccacacaagcatatacatgcacacacacatgaatgcacacacacacacacttttaatctaaacgatatatttgtcttcctgacaatatcatagtcaaagaaagaggtacctcttttttacaattatgaactaacatattccaaaatcttaactttagaaatggaaagactagaacacagagatgttagccaacaacatataatatagctctgtgagttggtgaaaaaagttgagacttgagtccaggttcaaaataagtaggaataatatttggacaaaaaaaaacctttaagcctttttgtaactagagacactttgtgtgagtaggctgcagtttaatttctggatcaatgtgaagaaacacaatgtgagagtgatcatcaattgctacagctttcaattatattatcagtctgccctagtaatatttcctagtattttctgagtacagtgctccatatgtaatgctcaacatttcacatgtattttcacatttaatgtacaaaacaatccagagagataagcactattattacctcattttacatatgaagataatgtggctcaaagaggttaagtatttagctgctacccatccacagctagtaagcaatggagtggggcttgaacccaagctgtgtagttccagagcccaaagcccttcttgcttcttacctctgctatcttccttcctgcatggtttctccattgattaaggcagtcaggtgccacagaagctgcaaacagtttaaccacattaactagtcaattctatcaaataactactacagctgattctcattaaccatgtgtaccatattttcaaatttgcctacttgctaaaacttattttaactccaaaatcaatactcatggcactgctgcagtcataacagcatgtgccgagggtgaaaattttgcattgcccaagttgcatgttcccagctgaggtccagtaacgtgaaaatcttccttcttttttcagctctcatacggtaaacaagtgtcctctttgaagtatgtgtaccgccacgtttttcacatttttgtgctttttgttgatttcactgtttaaaatggcccccaagcatagtacagaagcactgattactgtttagaagcacaggcaggctgtgctgtgccttatggagaaaatatgtgtgttagataagcttcattcaggcatgaatttcactgctgttggctgtgagtccaatgctaatgaaccaacaatttatattaaataagctgtttttaaacagaaatacacatacagtaagtttatctactgatgatgaaaatgttgtgaccagaggcttgcaggagcctgaccctgtacttcccctatgggcaatgattcagtattcactaattcggtgttctttgtgactttatagaacgtaactaccatgattaactagaatcaactataccttattatgcctcataaccggccttgcctaagttttttaactaaggtggcagcatgtatctcagtccccagggccacatggatgaagcccttgtatctccaagtattttgtggcttaactactggaagccctgcctgaccaatctgcagtgccttccgggcaaccacctctgcacttgctttaccctctacagaggggagcctggttaatcaggaaagaaactccctcaaaaggtaaacagtgagtagagtgtacatatggtggaaaacaaatgactcttggtaccctattgtgggaattatctcacttcaatagataaaggagtagggcaagcccaggtggcactggtgagtaaccgcctccattacatggtccgttcctgacgtgtacaccagcctctcagagaaaactccatccctacactcggtagtctcagaattgcgctgtccacttgtcgtgtggctctgtgtcgacactgtgcgccaccatggccgtgactgcctgtcagggcttggggttcgtggtttcactgattgggattgcgggcatcattgctgccacctgcatggaccagtggagcacccaagacttgtacaacaaccccgtaacagctgttttcaactaccaggggctg

SEQ ID NO: 30656 - DNA, 2300 bp, Homo sapien
agtgttgcctccattcaaattagaggtagttcttccctatttgctttctgtgtttgctgggaataatgcagtgggagcagaggctgggtgcacccaagataacaaaatgtccagacacagaggctcgtttcctggagaacctgtaaagacctataaaggttaaagattggagtatgtatgtggggggggagtgtgggggtgtgtgggggtgtgtgtgggtgtgtgtgtatgtttcagggccttgaggtccagattttggagagtgtcattaaaatgtctccggagggctgggcacagtggctcacgcctgcaatcctggcactttgggaggccgaggcaggcagatcatttgaggtcaggagttcgaggccagcctgaccaacatggtgaaaccccatctctactaaaatacaaaaattagctgggtgtggtggcaggcgcctgtaatctcagctagtcaggaggctgaggcaggagaatcgcttgaacccaggaggtggaggttgcagtgagccaagattgcgccactgcactccagcctgggcgacagagtgagactccctctcaaaataaataaataaataaataaaaacaaaatatatctggaagccaggcacagtgagtcacgcctgtaatcccagcactttgggaagccaagataagcagatcacttgagctcaggaattcgagcccagcgtaagcaacatggtgaaaccctgtctctactaaaaacataaaaattagccgggtgtggtggtatgcatgtatagttccaaatactctggaggctgaggcatgagaattgcttgaacccaggaggcagaatttgcagtgaccccgatgacaacactgcactccagtctgggcaacagagcaagactccatctcaaaaaatttttaaaaagtctctggattcagaggccagacatacctggcccccatatccgtcaaccaattctctagcaaaatttagttgtatagacaaaacataacacctgatgtcttcagccaagtctctctactgtgattatacaattcctaatattttgaccaattctagtgaaaacttttctgcaaaatgtagaagatagtgtatgagatctgaaaaggctctggagtgttctagtttagatctcacatgttgtggatgaagaacctgtgacctacaagggcttaggagtttgcccccaacctgcccagcacacgacaagttaggggcagcatcaggagcagatcctaagcctctccgtgaccaggccaaggacttcagcccagctaaccctggtccctcctctggcctttgtgggacctcctgtgtcagccacagagtcctcatgtggttcttgtggcacgagtgaaagcatgacatggaaatcaacggggtccctggcttcctctcatcccagttccaatgcttatggaccaagagcatagatctaggatttggcttcgtgttctcaaaagtggggacaattttgcctgcccctgctgctccatatggaaacagagaaagagcgctggactggaagctgaggtgggagccccacccctgccgtttttagagtatctgtggttccaggcactgggacaagtcccttaacttatctgtacttttcttgactcacccccaaaaaatggggataatagtgcctgccctacccatttctgtaagatcaaaatggaaagatgtaagtgaaaaaagtcgttcatgagttgtgaggagaaaatgtgaaaagtctggtttaagacagagcacggtgggtgcttcccaggggccatcttaagcgaggtcagccaaagtggtctgcagtcacgttccccgtggtggggacacgtcagccttttctccagatggcggcgctctccggaggagccggagctggagggaggccggtctggcccggagcagggagtccttctgctccctggcacggctctgcgctgaacccacccggcctgcggagagcagacaagtgcctcttgggcccgcttctctaacaaatgtaaaaataatgcccttgaaccaggagcgaaactgagctatctaaggaaaacactgtgagcaaatactgagagcctagggaaaccatctgattagaagagctcccctcaggagcgcgttagcttcacaccttcggcagcaggagggcggcagcttctcgcaggcggcagggcgggcggccaggatcatgtccaccaccacatgccaagtggtggcgttcctcctgtccatcctggggctggccggctgcatcgcggccaccgggatggacatgtggagcacccaggacctgtacgac

SEQ ID NO: 30657 - DNA, 2300 bp, Homo sapien
agctctctgtccgcggtcccgcaggttggcggcactggagtgggccgggcaggctctgcctccgccgcagagagcgcccggactgcgtggggctggggaagcatcccgggaacggcgggcggtgagcattccgggaaccatctctgggctgtctggggcggtggagcaagtctggaggcgggacgtggggcgagtatgggagccgccacctcgagacgtcttcccgccgtccccggctccaggagaccccacggtgagcgggccgcgcgggaaaactatgccaggaattcgtcccgggagcggggcgggtgggtagcttggctgcagtccgagggatcagcgattcgggaggttaaacattagcgggggcgaactccctgccggggtgcagcggggcgcgggaggagccggctgcgtgcgtccgcgctgcccagggcgcgcccttctggcccggcgcggccctgcagcccggccccctcggcctgctccgaactgcggcgcccagggagggaaggacccgtgcgcgggggacgaatgacgggatgccccaagactcggcttcactgggaagacggccttgggtttttactttttgaaaaaagaaaagtgatttgggagggcttgatgatctgagtgccgtaggtaaaggaggattcttttagtaatgaggtgatttaaaagcaatcgcattggcatctttcgttccccttcttcctttcctgggctggacctcagcaggaggcagacgtggtattttcatcctgaggtggctgcgcataaagtccaccgaagacctgctcagtgcaggacagggatcaggaggcagggcagaggagggggtccgaggctgcctgggcagggcctagttcacggagcacttcctaggggcccagggcctaggctgcccctgcctggtctcctggaattcgatttctaacaggactttggagagaggcctgggaagtatggggtgttctgacttggcttctcacaccctcatctgcagatagggtgggtgatctctcccttctcagttgcagcccctagcacctctcctccccctcccggatgtgaggactggccagtgagaacaatcctgcttagggaaggctgatcctccagtctagtggctgataaggggccttctgactgtcttggtcagacacctccctcatctgggaatattttttgatactatctaacttgataaaatacctcatgaagttgtatgcttcaggttgggaacagaaacctgagttcatgtgggcaccataactgtgggttgtgccatggagctgatatttggtcaaaggttttttgctcaactcaaattgataggagcagggaaaggctgccctgaggcttcttgtggactccttgcagagatggttagtcctggccagcctggctaagcactggcaatgtctcctgtccctaggcctggcagctctagtagttctggcttagtcactgaaggtgaactccttcatggcaaagaaaacgctagtatgttctaagccagttttcttttacatgtgaaaagcaattatgtttgtttgttttacaattctgcatctgggaagataggacatgtcagtattcattcctcttctctaaaacactcccaagagacatcagtcaaatacctacccctatttttattttaaataaaatccgtttgtggcaaaaacttaataggcttttgataaaaccatggccacttaaaaatatctccttaaagttgctgggaataggaggccaggtgtaaggagagcgctgtgcccggttgaggggacctttgtctcgctgcttgaaggttctaggagtcgctgcagcccccatgagggtcagggaagagtggaaaaggagaacaccatggaatctgagaataaggctaagctctgcagtggcagtacttcaggagagctcccaggtccctgtcatctctgttgaggtctctggagctcccttgcatactgtgtgtgcatagcctgtttgcaaactgtgtgaaggtttccttggcagccacaacaattagcattaatgacacgcctgagctcccccagtgggcactgctgaagttagcttgggagccagggcaggtttgtaaatgattgcctggcagccaccttggaaacttggctccctcaagttctcctcttgactgcattcttgaggaagcagaagagacagtaaagtggtgatgttgttgttgttgtctagctgtcagtttatgttaaaaaataaggtgtttggccaattttgagggagttatttttgacagattattggtgggccgg

SEQ ID NO: 30658 - DNA, 2300 bp, Homo sapien
ccaggtataagtggaataatacaatatttgtccttttgtgtccagcttatttcatttagcataatgcttttgccttgatctgaatgtttgtgtccctgcaaaatggggttgaaatcctgacccccaaggtgacggtattgggaggtggggcctttggggggtggttaggtcatgaaggtagagtcctcataattgggactagtgcccttatgaaagaaaccccagagagctagccagcccccttctactaagtgagggtgcagtgagaagatgacagcctatcaaccaggaaacaggccctcaccaggcaccgaatctgccaatgtcttgattttggacttcccagcctccagaactgtaagaaaaaaacttctattgtttatatgctacccactcaatggtattttgttatagcagcctgaatagactaagacagttttcaaggttcattcatgtgtcagaatttccttcccttttaaagttaatattacattgtatggatataccacattttgcttatccattaatctgtcgatagacatttgaattgtttccactttttggctattgtgaataatgctattatgaacatgagtatacaaatatctgtttgaatccctgctttcagttctttggggtatatacccagaaatggaattgttggatcttttggcaattcttgtttaattttttgaggaactaccattctgtatccacagtaatggtaccattttacattcccaccagcaatgcacaggagttccagtttccctgcaagtccttgacaacgcttgttcccatacacatttgctttggctgcctcaaaatgtagagcttggcagattgagattgtggtgggacgaaagcctttgaaatggaaaaaagagaaagagggagggagaagagttgcggagtggagagagagagagtgtgtgtgaaaaggagcttttttcccactcttccctgaccctcatgggggctgcagcgactcctagaaccttcaagcagcgagacagaggttccctccaccaggcgcagagctctccttacacctggcctcctattcccagcaactttaaggagatatttttaagtggccatggttttatcaaatgcctattaagtttttgccacaaaaggattttatttaaaataaaaataggggtaggtatttgactgatgccccttgtgagtgctctagagaagaggaatgaatactgacatgtcctatcttcccagatgcagaattgtaaaacaaacataactgcttttcacatgtgaaagaaaactggcttagaacatactagcgttttctttgccatgaaggagttcaccttcagtgactaagccagaactactagagttgccgggcctagggacaggagacattgccagtgcttagccaggctggccaggactaaccatctctgcaaggagtccacaagaagcctcagggcagcctttccctgctcctatcaatttgagttgagcaacaaacattttgaccaaatatcagctctatggcacaactcacagttacggtgcccacaaaacggaatctcagcaaagcaactactactatgggaagagatcagggactaatatcaggagaaaaaataagtttttcagtcctgggtttccaagttggcatccccagggcaaaccagcaggttgggagggtagggggtggtgggtgggggctgcggagggaaggtggctgctgtctgtctgatcagacctggggcacacccaaagaactctcctagcttgggatccggtcaggaagaaaccaggacggtccctttaggagggtgggcagggctatctgcccggggggtgcggccgcccctgcacagcaggctatcgattgtaccggaggcagggtgtggggaaaccggggcaagtccagcctctcagcaaggccaggaagccattcacttggatcctggattttactaacggattaaacgtggcattcccgccttcccccatccgttacagacctaaaaatagctcgtccgagaggggccgggagaggctccacctcttcttgaggtggggcggggcggctgtagtaggagctggaggcaccagagaccccaagccacgagctgaccgacgcaccgaggagctctctgtccgcggtcccgcaggttggcggcactggagtgggccgggcaggctctgcctccgccgcagagagcgcccggactgcgtggggctggggaagcatcccgggaacggcgggcggtgagcattccgggaaccatctctgggctgtctggggcggtggagcaagt

SEQ ID NO: 30659 - DNA, 2300 bp, Homo sapien
agttccaggtagagtggctcagatgacaggaggccttctcagaaagacacaggaaggactttgggctatgaacctacagaggctccaagtaccagtgacctggcttctgaacgcatctcatcaactcttatacagggttgaagatttccctcttaaaagttcactggggaccaggcgcggtggctcatgcctgtaatcccagcactttgggaggccaaagtgggcggatcacttgaggtcaggagttcgagaccagcctggccaatatggtgaaaccctgtctctactaaaaatacaaagattatctaggaatggtggcacatgcctgtagtcccagctacttgggaggccaaggaaggagaatcacttgaaccagggaggcagaggttgcagtgagccaagatcacaccacagcactccagcctgtgcaacagagggagactctgtctcaaaaaaaaacaaaaaaaaaaaaaacaaggttagaatagggaatagatttcactcatctgaacaaaacaaaacaacttaatgtttgttatcagggagtacaaataccatccatattgatataattctatttttctcttctattttccttggtagaaagtgacaataacttctttggtttaaagagaactttcattctcacagtgagcctgaggtcggtcattttctgcacttttcaagggagttgaggctctgggcagtttaggggcttgtctagtgccctcagcctgtggtggctggaggcataactccaagctcagtgctacttccatcatgctttctacttggttcttggtcagataggtcctacttttgtgcttgggatttcactgcattgctgatgctcacattcatcctcacctgacaaaggccattaactacatcactgatctctgccttgaccacttgttcaatagttttagccactgggctagcagttgggaggcactaagatatgtgacccacctgaggcccaggaatgtgttatcactcccacagatggggtcctctagttacccctgggcaaggagcaggagcactaatctccactccccttcataggaaagaacaaccaatctgtccaattacagagaactttggaaagatgccaaggcactctgagcccagaattaatgaggtccagagaagaaattcagctccaaaaggaagaggtttgtggagacctacaagctgtttctggggtccttggacacatagaaaaccagaagccatcaatgagtggggcagctttaactcccttcatgtaggacctgctatgttagaatctaaagtctgctcaggagcaggcctacctgctcacactagagcatccagggggaactgtgaatacctgctcatggccaagacaggtgactctcagcagaggatggctccaaagaagattgctaagagctcatttcaggggcggtggagaataggccacaggtgagtgctaacaccttgggaaatgtggggactgccacatcagtggaggacaacaaagctggcttcctgagactgggacgaggcttataccccataagggggaccttggggaaaaaggagccttcctgcagccactgtgactgacactggggaatcacttctcattctagatcactgggcctttggactgcagggctttgttcattgcttatttgtggtgatgggctctctttccttttaatcaaactttgtgcttgcaaaggggagtttgtaccaccttacagggtctctgtccataattttgattcaagctaaactgatcaagtgcaggatatgttggctccaaggttatgccaggatacagttttctccaggtgaaataatccctttataacccccataatagatccacaaacaggcaggattagtgtgtgggtcaccttaaaaatctggtaaacccctcttgttcccaagtggctgtgtttgggagaacttagtaaagggaggagcttcctgggaactttttgtgtttagtctcaatctgccaatgatttacttacccctgtgttgttgagttggaagattgggtggtgatttatcagaaagtgtagcaggaagaacttgtcatttctaagacctcaaatactggttaactgcatttgcagctagaagttaggctctgattcactgttttgtattttctaaaagggttatatgtaatttgaaagatagacctgccaagacgtgagatctgtgttctccttggttagagctaacatttttggtgaggaaagcactgcaggtaacggttcagagcctggactttggtggcaggtggatgcaagtta

SEQ ID NO: 30660 - DNA, 2300 bp, Homo sapien
aataaatatatacttataatgaaacttctatggaagtatgcatttcttcctttcacctctgattctggctgaactctgactttcccataaagtagtccataggaaaactgtgtagaaaatgctgggttaacagagttacagatttcttcttggagacatgtagagaatttctgagagtctttattgcactaatgggcattgcctttctcaagagtagaatgtgacgcttcccagacttacttaaccaaacacttctgtgttagaggtatactttaaaaatgttcctcaaacacggtttggaaggttttgtctgaaaatatacctatacgccctttctgttgtggatttattcttctcacttcccagtttcactgggagaaggagaggttactcttttcattgtatctctgcattaataatatgtttgacctctttgtaattgtctcctcaacttcctctgactgccactttctattttatcccctttaccaacaccagagatcacttttccttggactgctttgctgccaatatctgcctataatctccatgccttccatttttcttttttttttgagacagagtcttgctctgttgcccaggctggagtgcagtggcgcgatctccactcactgcaagctccaccttccgggttcacaccattctcctgcctcagtgtccagagtagctgggactacaggcgcccgccaccacgcctggctaattttttctatttttagtagagacggcgtttcactgtgttagccaggatggtctcgatctcctgatctcgtgatccacccgcctcggcctcccaaagtgctgggattacaggcatgagccaccgcgcctggccatgccttccatttttcttaatacagattgagcatctctaatctgaaatctgaaatgctctagaatctgaaatttttgacatgacacacaattttcagatttttggattaaggatattaaaccagtatgtattctgtaaatattccaaaatctgaaaaaatctgaaatttaaaacacttctagtcccaagcattttagataaggcatactcaacttgtacctcaccagaactgaactgttgcttggtcctcagcaggagataccatagtttgcttccttgtgttttttcctccatgatgaagctggaacaagatcacaactgccttttagaggccatgctctggagttcaggttttaactagagatgctggggaaagtttttttaaccttttccaaaatgacctacatgtttgtgattctttccacgtttctttctgtcaattcacttttgaaaaaaaaaaacctttattggagtataatttacatagcataaaattaatatgttttggcatggtggctcatgcctgtaatcccagcactttgggaggccaaggcgggtggatcacttgaggccaggagttcgaggccagtctggccaacatggcgaaactccatctctactaaaaatacaaaaattagctgggcatgttagcacatgcttgtaatcccagctattcgggaggctgagacatgagaatcacttgagcccgggaggcagaggttgccgtgagtcaagatcgtgccactgcactccaacctggacgacagagtaagactctgtctcaaaacaaagaaaagaaaagaaaaaaaccacattttaagtgaacaattcagtgatttttagtaaatttccagagttgtgctaatatcacatcatctagttttagaacttgtccatcacccccaaagatcctttgtgcctgcttgaaggcaatccttgttcctgccctcagccccaggggagcactaacttgctttgtgtttctatagatttgcctttcctgaacattcatttaaatggaatcgtaaaatatatagtctttggcaactgatttctttcgtttgcttgattttgagattcactcatgttgtagcatgtataaatattgcattcctttttactgctgagtaatagttcattctatggatatatcacatctatttttggtgttgtagctaagaaatctttgcctaacccagagttacaaagattttctcctgtgggttcttctaaaaattgtatagtttaagttctgccagtttacttttaagctcttttgtttatctttaatccttgggttatatgctttgatttatgtgtgttcaatgctttgagttaacatcatcatcatcattagtttttgccttgaattttgtatggaaattgaaggtctgagaagttaaatgccttctcttttatcacacaagtgggtatagaattaact

SEQ ID NO: 30661 - DNA, 2300 bp, Homo sapien
ttcaagagatccatccaccttggcctcccaaagtgctgggacaacaggtgggagtcaccgcggccaaaaaacgagatttttaaactaagaatccaatgaaacagaaacagacaatagaatcagctctgcagataagtaagatattgggcttagaagacaggcaacctaaaataacaatgattaatatatgagagaaagagaggaaaagatgaaggaaataaattaaaagataaagaatctctttaaactattggcttcactggaaaagaatccaatataaatcctaaaattgaaaaggactataatgttaaaacattaataaatgagtttgtacattggacatagaacaaaataggattagtaaactagaagagaggttattagaaactatccaaaataaaacactgataaaaatgagaactatggaatagaaataaaagataggtaaaataccatggaaaaattccaaaggagtaggaaaagacagaaaaaaaagcaacatttaagtagatactgaccaagaatattccaaaactgaaaaaagataccaagctatagattcagaaagcataaatgagtaaagttcaaaaaaaaaaccacctagatatattttattaaaatagctttaaggagtagggagagaaagtagagaaagagaaaacagtaaatagcaaagaaaaagacacattactggctgggcgcggtggctaacgcctgtaatcctagcacttcgggaagccgaggtgggcgtatcacttgaggtcaggagttcgaaaccagcttggccaccatggtgaaaccctgtctctactaaaaatgcaaaaaattagctgggcatggtggtgtgcacctgtaatcccagctacttgggaggctgaggcaggagaatcgcttgaactggggaggcggaggttgcagtgagccgagatcgtgccactgcctccagcctgggcaacagagtgagagaccgtctcaaaaaaacaaaaaacaaacaaacaaacaaaaaacccacattactttcagtgaaaaaaaaccttaagtttataggtgacttctcagtagaagataatgcaagccagaagataatagaatgctatttttgaaatgctttgtaaaaaaaaaaccacacacacacacacacacacacacacacacacacactgcttaactggtattcggtactcagtaaacacaccctttatgaattaaggtgaaacaaagacatctctttctttctttttcttttttttttttttagacggagtctcaccctgtcacccaggctggagtgcaatggcacgatctcagatcactgcaacctctgcctcctgggttcaagcgattctcctgccccagcctcccaagtagctgggattacaggtgtgcgccaccacgcccagctaattttttgtatctttagtagagacagggtttcaccatgttggccatgctggtctcaaactcctgacctcgtgagccgcccgcctctgcctcccaaagtgctgggattacaggtgtgagccagcacactggcttcttttcttttcttctctctctctttctcttttgtctcttttttttttttttagacggagtctcgctctgtcgcccaagctggagtgcaggggcgcgatctcaggtcactgcaacctccgtctcctgggtttgagggattctcctgcctcagcctctgaagtagctgtgattacagacgtgcgctactgcgcccagctaatttttgtatttttagtagagacagggtttcaccattttccccagagtggaaagaaatttttaaacaaacaaatatctagaaaaaaattaatctgtcgtcggcctacactaaacaaacaggaaaacttaaactgagctcttcagacagaagaaaaatgattccaaagagaaaaatggaaatccaggaagaaaagagtaaggatggaaagagtacatttgtggatgtatatacaaaaaaatattgactgcataaaacaataattaaaaaaaaagaaaaaaggaaaaaaagaaaataagttccctgggatcccagaattaggtttgaccttcccggtccctctctcgcgagatctggaaaccggaagtgaattattttgcaggagtctacacccaggcggtggctatacttattaaagttggcgggagctgagcgatcagtcggtcctgggctggctgtggtgtagggcgttgcaggcagcgctcacctcctcaggccggcagaatgcgggtggctgtggctggctgctgccacggcgagctggataagatctatgagacgctggcgc

SEQ ID NO: 30662 - DNA, 2300 bp, Homo sapien
tcctccccgctcggatttcagccacagcagcagtgacagttctgtgcaagctcagatttatgctgcctatatcccaccctaagatgaaacctgcagactctgcttttttgtatcaggttaaagaagcccgttctgttctgggcacaaatataatccaggagggcagggagttaatagccctagggaaatcctcaaccaatacatatggtattggtggatgaatgctgtagcttcaagatggacaatccagagaggtattctgtatgttttcagaggtgattgaggaataaacagtggcatcaataatggacaattatcttgaatatttattctttcttttttcactctccctgacctatcaattttgttccctgaaagcacttactaaataaacaaaatgcacccaaatcttcgtcccaggctcaaactaagccaaaaattcgtacaacaaacatttactaagtgactgtgctaggcactgagatagacaacctagaagataaaactcccagtgcctgtcttgaagtgtatagtgagacaaacacggaaacaattaacaacaacaaaaccaccctacaattaaagtgaagtatgaaggcatgggggaaagggtatctaacccatgcctgggggagacaattcctggaggatgtattgcttgagctaatggatggagtgtggatcaaatacagttataatgactctatatactatgtattagggttatgttctgccccattgcagtatgcagtacatgatgtgattttaggtggtccatggatggacatttaaactttttgtagttaatgtgtactagaataaaaataaggagcacaacaaacttgatttcacagagtattatggtttaggataaagccaaaaatttttaatgagttgaaattggctttaaataaaaatattgaatgaataataatacctaggtgcagattggcaaagattgtgtaggtggtgtacagattacccaagtttcagaaatagtattatagcagaaggactacctaaaataaaattcctgccttccaggaattcaacagtttgttaaggaacacagacccataagcaggggtggtaaatgctacactaaatttggaaaccaagtacaggaggaagacaggaaaacagtgaggagcagagtgcgggagaggctaccagctacaagaccagttggaaggctattgctgtagtccaggggagaggttacaagagcctgaattagggtgtggctatagaaatggaaggaatacaagtaatgttaacaggccaattgcaaccatactgtgaaaaccttactggttgcaagcagtacgaaggtgaaacttatccaaccaagtcaagggcagtgttgcacacacacacacacacacacacaaagtagtaggacagctgaattaatcaagtataattgaaagcatacttttatttagcttcggttatgagagtgttttagtgcgaaatatttagatatttgcccccattttccccacttaactcagaagctggagaaatgttaacacatattgtataacgctttctatgttctaggttttttctgagagcttcacgtttgttgactcctctatcctcattaacctttattttatagatgaggaaactcaaacagaaggttagataacttgcccagggtaaagcagctgataaatcaagtagctaggaagaaacccaagcattctggctattcttaacactacaccagaataaacggggccggcacacaacgctaaggcaagtcacgtatctgtatcggatcgtgaaacaatcactcttacggttggcaaaggttctgggatcgcaatttccccacctataaaatggagataacgacgccgggagtttggtgcagagagagagaatgaatatgaaagtgaacttcaaactatgtatgtggctccacgtactactttttccaaatatgaatactggaatccataaactgcaatttatcagtccgtaaaactcgtagcgtcagggcgagactccgcctctggggccccgcccaccgcgagcggcaggtggggccggcagatcttctttgcgcatgcggaaaccgctgcccgcttccacctctaacccaggctcagagtagctgctgtttctgagagaacgattcgtaggacagcccctgacgccattcccttttgcccttctttctgcgggcctttccggtacttgagcggtgtccagagcgtggccagttctcgtctatctggctgcctttagggagcggtgcctagcgttggccaatagttggctgtcgaaag

SEQ ID NO: 30663 - DNA, 2300 bp, Homo sapien
ggagaggctaccagctacaagaccagttggaaggctattgctgtagtccaggggagaggttacaagagcctgaattagggtgtggctatagaaatggaaggaatacaagtaatgttaacaggccaattgcaaccatactgtgaaaaccttactggttgcaagcagtacgaaggtgaaacttatccaaccaagtcaagggcagtgttgcacacacacacacacacacacacaaagtagtaggacagctgaattaatcaagtataattgaaagcatacttttatttagcttcggttatgagagtgttttagtgcgaaatatttagatatttgcccccattttccccacttaactcagaagctggagaaatgttaacacatattgtataacgctttctatgttctaggttttttctgagagcttcacgtttgttgactcctctatcctcattaacctttattttatagatgaggaaactcaaacagaaggttagataacttgcccagggtaaagcagctgataaatcaagtagctaggaagaaacccaagcattctggctattcttaacactacaccagaataaacggggccggcacacaacgctaaggcaagtcacgtatctgtatcggatcgtgaaacaatcactcttacggttggcaaaggttctgggatcgcaatttccccacctataaaatggagataacgacgccgggagtttggtgcagagagagagaatgaatatgaaagtgaacttcaaactatgtatgtggctccacgtactactttttccaaatatgaatactggaatccataaactgcaatttatcagtccgtaaaactcgtagcgtcagggcgagactccgcctctggggccccgcccaccgcgagcggcaggtggggccggcagatcttctttgcgcatgcggaaaccgctgcccgcttccacctctaacccaggctcagagtagctgctgtttctgagagaacgattcgtaggacagcccctgacgccattcccttttgcccttctttctgcgggcctttccggtacttgagcggtgtccagagcgtggccagttctcgtctatctggctgcctttagggagcggtgcctagcgttggccaatagttggctgtcgaaagtgccggcccccgcgccggcgcctgcagcagccgggtgggaaggctcaagatggcgtgcttgttggagaccccaatccgcatgagcgtcctttcggtgagtgacccgccgcggccgcccgcccgccctccaggaagcctcatcccggtctccaccattcccccaagcgtggtgtgcctcctgggcaccaccccctggggtggaccccggctcagtctcgggccagggagtgagcgagggtggagaggcgggatagacgggcagaggggaccgcggccgagccaaagacgtttccaactccgggagctcccgccggtgcgggttcccaggatggcgtctggcaggcggggtggctgggcttatagacaactggctgggcggcgcggcttggactttgccaagcgtttcactgagccttccttttagcgatgccgcttcccgggggccgaacgctctgccttgtgaagcgccgggcttgcagccggcctgagaacgagcgcccactcagctctcccgggctttggcaagaagaggtgcaggctccttggcccccatttcctcagagctgccaggccaagtctgtgcggcttctatcgcgtcccagcacctgggcaccggctgaagcagtttgctttttggcaatggtgattcgtatcagctgcaactcttcctagtgtgtgtggttttttaagcccctttcctccgctctgctcagaggtcgcggctctgagtcagaggaactctatgttccctgtgcctggtattccgtttttctttaaggggagtcaaacattgaaggggggaaaagggggtgagatttatttccccattgttgaaagaagggaacgtattgacatgccaggaagtaaaacctgttttttttttttttaaaaaaagtttttttaaagaaaaagacgactttcacctttcactatgttgctcttgaaccaggaccaggaatgaaagttactgggagataacttcgaaggattttgcaacaaattcgagctgtccgactctgagaatggtcagtttaccaatggttcatttgctattgttggaaacaagcaggcaaatactgattgaccatcttttagacttgtggaagccagtctgatactgagagggtagttggattataaatgacttgtcgggttccta

SEQ ID NO: 30664 - DNA, 2300 bp, Homo sapien
catatttttattgtttctttgataattgtgatcaaaagtagtattttatcagtaaaatgttatagggcatcattttagctatagaatgctctttaaaaaaaaaaaaaaagctgcccttgcatctcttttttaggatacagttgtaccatgagttcttattgatttgcacccattaaatttaaaatcttttttggatagctaccagtgccatgatgccttgaagtatagaagcagtggctttctatatcaagaaggaacagaatttcatatttgagacctttatttaaccacagtgtctcagacttagcatattcctgcatatacatcagcatttaaaatgtgttatgttttgtatttttagttaaaaagtaaagagtttccagacttaactaattacgttttcttttatatatgaaagcaagcagtgtcatattaccaggtgttgagttaaaaccttcgccattcattgttgtccatctacaagttgtagcaaatattggcatgtagtctttaattgtgtaacattagagttgggtattgcaggagttacttgcagaacagggaagcagtcatttttgtcttctgtcctcttgcagtgactccattctgtccttttagtctttttttttttttttttttttttttgagacagagtctcgctttgttgcccaggctggagtgcggttgcacgatcttggctcactgcaagctccgcctcccacgttcacgccattctcgtgcctcagcctcccgagtagctgggactacaggcacctgccaccacccctggctgattttttctatattttagtagagacagggtttcaccatgttagccaggatggtcttgatctcctgaccttgtgatccgcctgccttggcctcccaaagtgctgggattacaggcgtgagccaccgtgtccggcctgtccttttagtctttaaatttatttcaggtagggcctactaatgtgtatgttttccctacctcagctatctagtttagtcttggtaaagagctcataaggataggaatggagagtggaactaacttcaaactagccagaggcaggggaaataaatatatactgaaaggtacctcctctttcctgtgccatgcaaaggctaaaccagtcagcacttgcacatcaagaaacaattgtttgggtggctgtttattgttcctttacttcatctcctctagcttcattaattcccccagctcttcctccatttctcctatcttttctgcactagacttccttatttactataatgatttgaaaaacctacaggttgtggaaaggggactagtctggtaacattactcttctgccagggtttgctgtattaccaaagtgccattaatgtattctaggttcctcctgtgggcacatgctagtgctgcagagcattgcccaagtgaggggcagggcttcttcataccccagctacctatcctgtgagtgcttgtcaacctcaggttccacattaaaacatcatgtgtagactcagacttagaagtgaggattagattggattagaatggaaagaattaaaaaaaaaaaaaacatctcttaggagcttctggaaattgtaaagcatattatatatggttaaggattgggcccttggtattatcccaaaccagtaacctagttttgaggaatagtagcacaattcatgggtgttttaaaagttagcgcttcttaaattttattgtaatattgtttcctctccttctgttccctgtctccaatccatacataaaagtattctatttttttattcgctttgaaagccacttggtaattaattgttactaagttctctttgtcttaccaactgtattttgtatagtgttcttttaattttgattagggatttatctagttaaatttaaattgctacttcctgatttttttcctattcaaaattagttctaacttttatagttaattttaacttactgtactctgcagctgtacaggtgttattgttatttctttgaggcctgttagtattttaagcagatttacataattttttagaagagtttagattctgagacattaaaatttgcatttgcagaattaaacacattttttgtttgttcatttatttttacaggttcgaatgcaagcactgaaatgtttctcagttttagcttttgaaaacccccaggtatcgatgaccctggtaaatggtaggctggagctttcagtggcacctacatgatttaattgatgaactttttagatttaaagaatttccttaatcattgttgtttgttttatttc

SEQ ID NO: 30665 - DNA, 2300 bp, Homo sapien
ctcagcctcccgagtagctgggactacaggcacctgccaccacccctggctgattttttctatattttagtagagacagggtttcaccatgttagccaggatggtcttgatctcctgaccttgtgatccgcctgccttggcctcccaaagtgctgggattacaggcgtgagccaccgtgtccggcctgtccttttagtctttaaatttatttcaggtagggcctactaatgtgtatgttttccctacctcagctatctagtttagtcttggtaaagagctcataaggataggaatggagagtggaactaacttcaaactagccagaggcaggggaaataaatatatactgaaaggtacctcctctttcctgtgccatgcaaaggctaaaccagtcagcacttgcacatcaagaaacaattgtttgggtggctgtttattgttcctttacttcatctcctctagcttcattaattcccccagctcttcctccatttctcctatcttttctgcactagacttccttatttactataatgatttgaaaaacctacaggttgtggaaaggggactagtctggtaacattactcttctgccagggtttgctgtattaccaaagtgccattaatgtattctaggttcctcctgtgggcacatgctagtgctgcagagcattgcccaagtgaggggcagggcttcttcataccccagctacctatcctgtgagtgcttgtcaacctcaggttccacattaaaacatcatgtgtagactcagacttagaagtgaggattagattggattagaatggaaagaattaaaaaaaaaaaaaacatctcttaggagcttctggaaattgtaaagcatattatatatggttaaggattgggcccttggtattatcccaaaccagtaacctagttttgaggaatagtagcacaattcatgggtgttttaaaagttagcgcttcttaaattttattgtaatattgtttcctctccttctgttccctgtctccaatccatacataaaagtattctatttttttattcgctttgaaagccacttggtaattaattgttactaagttctctttgtcttaccaactgtattttgtatagtgttcttttaattttgattagggatttatctagttaaatttaaattgctacttcctgatttttttcctattcaaaattagttctaacttttatagttaattttaacttactgtactctgcagctgtacaggtgttattgttatttctttgaggcctgttagtattttaagcagatttacataattttttagaagagtttagattctgagacattaaaatttgcatttgcagaattaaacacattttttgtttgttcatttatttttacaggttcgaatgcaagcactgaaatgtttctcagttttagcttttgaaaacccccaggtatcgatgaccctggtaaatggtaggctggagctttcagtggcacctacatgatttaattgatgaactttttagatttaaagaatttccttaatcattgttgtttgttttatttctagttttggttgatggagaattgttaccacagatttttgtgaagatgttacagagggataagcctattgagatgcagctcacatcagcaaaatggtaaaagtcaggacaatgtgggaagaaagacagtgctttatcaatatcttagagtatttttggacaaccaaatttgcttgcttccaatccccattttattttgagattttgaaatttgaaagtcaggagtccatcccacattttcttaaatggatgtgagttttttatactcagcttattactagtaatatgcagaacaggaactctcgtataacatctgagactgtcttcagaaaattactttattacatcctcaaactactgtccttctacttcagttgaaataatactgaattagattagatttaaccaacatatactatgctaagtattagccagggaaatacaaagatatagaaatatggaatgagaattagttgaagttgataaccaagggatgatttcagagaacgtggcttcctcatcttttaaggaaaaaaaaaaaacacaaaatcttcaaaagttgtgatggtttagaagatacttatgcaaaggttttttttttttttttctagacggagtctcactctgtcacccaggctggagtgcagtggcaactatctcggctcactgcaacctccgcctcccaggttcaagcaattctcctgcctcagcctcctgagtaactggcattacaggcacatgcc

SEQ ID NO: 30666 - DNA, 2300 bp, Homo sapien
tctttgagatggagtcttgttctgtcacccaggctggagtgcagtggcacgatcttggctcactgcaacctccgtcttctgggttcaagtgattctcctgcctcagcctcccaagtagctgggattataggcatgcaccaccaggcccagttatttgatacttttttttagtagagacagggtttcaccatgttggccaggctcctgccctcaagtgatccacctgcctcggcctcccagagtgctgggattacaggcgtgagctactgcaccctacccaaactgtacacttttgaaagtgagaggggttgctattaataattgcatgggacaacaggtgaaaagtgggggtgtcccaggcaaactgggacatgtggtttacctaaatttgtttctgaggtttagcctggcaaagatgtgagtacattttgtaatagagaccacatggtaagaaatttaaccctttcagaaagaataaatgtcactatctttccatgtgctggcaagaggaatttagcatctgatttgaattttattttggaaactaaattctaagggagattccacaccattcaagagcttcagcaaccaccaccttgtggcaatgaacatgatttgcatctagtcaactcagtttgcaatgtggtgtcttaaggactgcctgtggctctgcgtaatattatcatggaactgaatattgccatgggactgaatgcaagaaaagagtaggtggattcggagctgaagtgggagaaggcaggatgacaggtaggaagatgttcggtctccagtatacccatcgccctgtacttcacagagggttgctgggtacctcatggccaaacagggtatcagcactccctggatggaaatcatttggtgtatgcttcacttaggaagaattgatatcttaacaatattaattcttcctatccatgaacacggaatatttcttcatttatttaaatctgtgagatctctttcatcagctgtgattgattcctagtttaattctattgcagtcagagaacatactttgttctatccttttaaatttgttaagctatgttttatggcctagattgtggtctatctcagtgaatgtcccatgtgagcttgagaaagaatctatattccgctgttgttgaactaaatattgcataaatgtcaattagatcaatttgatatttttcagttcaactatatccttgctcatttgcttctgctggatgtattaattactttttaaaaatggtatgaaagcattctattataatactgagtttacctatttttccttgcagttttatcttcttttgcctcacatatttcggtgctctgtttttaagtacatacatattaagtattgttatgtcttcccaaataactgatccctttaactttatgtaatgtccctgtttatacctgataaatttccttgttctgaagtctgcttttcttgaaattaacatacctacttcagctatttttttaattagtgtcagcctggtatagctttctctatccttttgcttttaatgtattttcttgtggataacacacgattgggctttgtttgtttttgaaatccattctgacaatctcttttttaattggtgtaatcagattattcacatttaaagtggttattgatacagttggattaatatctacaatgtctgtaactgttttgtatgtgtctcacttgactttcatatctaattttgaatttgtaatttcatattctttgccttaaagagaacgcttgcagatccctcaaaacctggagacaccccccaccttgcacacattataccggtatgtgatggtagaaaagctgcacatcagtcttggcaggcagggcaggagggatgcagggattcacagatgcgactgtgcaacgcacagatgcactgggtctttgcttggtgggttcgaagcctccagacgctgacaaacactgcagccaatgagtgggttcctatggtccgatatggagggcaaggggcgggactccctcctgcctctccctggctgggttcagagcctccgcggagagactgcgttgggcccagagtgggcgtggcttacgtgtccgccggctttcctggcaggcctggcgggggggccaggttgccatgacgaccgcggctaggtcgcggcagactcggttggtgactccgggcgcgtcgaagatcttgtacctgtcgttcgcagtggctcactttcccagtaatccataagaacagcagggataacagggtcccatgtcgtttttttgtcagaattcctcgactggc

SEQ ID NO: 30667 - DNA, 2300 bp, Homo sapien
ccacaccacttgctcctcagttggcactcagcttgcttgaaggcaggtctctgccccagtgcccggtactcagtagatgctctggcagtgtttactggatgaatgaagcttttctgctcagtggctctgttctctaagcccccatttgccagcaactgagccacaacttgtatttcaaggttcaaagagcagaggaggcagctcaaatggaacagcccatccgcaatcgcaatctgcaagatttactctcaccattaggcaatcttaggtaggtcaagcacagtgtctcacacttgtaatcccagcactttgggagacccagataggtggattgcttgagtcccaggagttcgagatcagcctcgggaacatctctacaaaaagtacaagaagtagccaggcatggtggtgcacacctatagtcccagctactcaggatgctgaggtaagaagatgtcttgagtccgggaggtcgaggctgcagtgagctatgatgctatgatcatgcgactgcattatagcctgggtgacagagcgagactctgtctcaaaaaaaaaaaaaaaaaaaaaaaaaaaaaaggagaatcccaggtacctgggtatgactattagctgtttaagttccatttctgagaagaggtattattacagatatgtgtataaaagcagtataaagacatctctttgactcttgcatagatgttggctcagctcaagctgagggcatggtcagggtcttgtgccagtcagggcccaagagaggacatctcttacatggggagcccacgaggggctgacaggccaccaggatgtacagatccctgcccgccttcccaagttctgtggtaaatagagggggttgagggagtcaggttccagggcaaacctagacagtcgaggtaaactactgtccctcaagccttctccccaaccaggtcttttactccctactgccaaggagagatactcttgatggcacccaacctgctgtccccttcctgggggacacttggggtctacagggtctttggagcagcaggtgggagtggaggcacagggggtgcacagcagctcccaccaaatggctgcatgggtggctgggatgccaaaggaagcctgcatgggattaagagcctcagcatggcaggcagagccagcagcactgtgaggctcccttaggcctggggcaaacctgagaagggagtgggttccctggacatgtaaagctggttctaagtcattgaggtccacccagaaaaagaatgtcctcagaaatgatgctgacaatcaaaaccacaatgaaatgccatttcgcccccaataggatgactagaataaaaaaagacacacaattacaagtgtttgcaaagatgtggagatattggaaccctcatatgttgttggtgggaatgtaaaatggtgcagctgctttggaaaacagtttggcagttcccccaaaagttaaacatggagttaacatatgatccaggaattccactcttaggtatatacccaagagaaagaaaagcatatgttcatacaaagacttgtacatgaatattcatagcagctttattcacagtagccccaaagcagaaaactaaatatccatcaagtgatgcagggataaacaaaacgtatagacatacagtgaaatattactcagtcatgaaaaggaatgaagtactgctacatgttacaacatgaatagatcattaaacattggttactgaaagaagctagtcatagtcacaaaaggccacatgttgtatgattccgtttatagaaaatgtcctgaatagggaaatccatagagattgaaagtagattagtggttcccagaggcggaggaaaggggtgaatgaggagtgactgctaacgggtagttctttttgtgaggggcaggggaggggagtgggaagtggtgaaaatgttctggaattagctcatggtgatggttgcaaaactttgtgaatatgctaaacaccactgaatcgtacacttttttttttttgagacagcgtctcactctgttgcccaggctagagtgcagtagcgcaatctcggctcactacaacctctgcctcccgggttcacgtgattctcctgcctcagcctcccgagtagatgagatcacaggcacgtgccgccatgccgggttgacttttgtatttttagtagagacggggtttcaccatgttgcctaggctggtcttgaactcctgacctcaggcgattcacccgcctcggcctcccaaagtgttaggattacaggcgtgagccaccgcgcccggcttgaa

SEQ ID NO: 30668 - DNA, 2300 bp, Homo sapien
cacccaacctgctgtccccttcctgggggacacttggggtctacagggtctttggagcagcaggtgggagtggaggcacagggggtgcacagcagctcccaccaaatggctgcatgggtggctgggatgccaaaggaagcctgcatgggattaagagcctcagcatggcaggcagagccagcagcactgtgaggctcccttaggcctggggcaaacctgagaagggagtgggttccctggacatgtaaagctggttctaagtcattgaggtccacccagaaaaagaatgtcctcagaaatgatgctgacaatcaaaaccacaatgaaatgccatttcgcccccaataggatgactagaataaaaaaagacacacaattacaagtgtttgcaaagatgtggagatattggaaccctcatatgttgttggtgggaatgtaaaatggtgcagctgctttggaaaacagtttggcagttcccccaaaagttaaacatggagttaacatatgatccaggaattccactcttaggtatatacccaagagaaagaaaagcatatgttcatacaaagacttgtacatgaatattcatagcagctttattcacagtagccccaaagcagaaaactaaatatccatcaagtgatgcagggataaacaaaacgtatagacatacagtgaaatattactcagtcatgaaaaggaatgaagtactgctacatgttacaacatgaatagatcattaaacattggttactgaaagaagctagtcatagtcacaaaaggccacatgttgtatgattccgtttatagaaaatgtcctgaatagggaaatccatagagattgaaagtagattagtggttcccagaggcggaggaaaggggtgaatgaggagtgactgctaacgggtagttctttttgtgaggggcaggggaggggagtgggaagtggtgaaaatgttctggaattagctcatggtgatggttgcaaaactttgtgaatatgctaaacaccactgaatcgtacacttttttttttttgagacagcgtctcactctgttgcccaggctagagtgcagtagcgcaatctcggctcactacaacctctgcctcccgggttcacgtgattctcctgcctcagcctcccgagtagatgagatcacaggcacgtgccgccatgccgggttgacttttgtatttttagtagagacggggtttcaccatgttgcctaggctggtcttgaactcctgacctcaggcgattcacccgcctcggcctcccaaagtgttaggattacaggcgtgagccaccgcgcccggcttgaattgtacacttcaaaaggtggaattttatggtgttgaattatatctttatttttttaacggggggaaaatgacgccgctggagaggagttagcggaactgaaacaatgaaatggtgcgcgagtgtcgcctgtccccgtcgcatccatcccaacgaagtttgggccctggaacggtgcacccagaaggcctgcggggagagacgctggggcatgatctggaagaaagacgtctcaggattcgaagggaatgcagctaaggtggcggcggaggttcgcctaggactggggaggcgtccctaggctcagaagttggcccggccggagcggagatttaaaggttggagcgcagaggctcttaaagaggccgagtcgaattcccactcggcgtccaccttaaagccagctccccggcaccacggatctgacccgggtaagtgctgggccgcgggagaggctgcggcgccgaccccagcccctggcgctctagcgcgccctgccgggcccaggggactcggcgcgggtgggctggacttcgtaggcgcgcgtcctgggggccggggtgcacgcgggggcgacagggtcgaggcacccggcccgggctccccactggcgcgcccgcagcggcgctctatttttagcaggcgctgtggcaatataaggaatgcgcggcgcgctaggcgctcggggcgcacgctggcggcgcggtcgctttaaggaggcgccggggcggggacggaccggagtggccggctggcggggagccgtcagtccggcggccgcggggcccggcgggcgcgacgctgcctcctcaccggcgcaggctaggagggggcggcctgagtgccgtagccgagccggggctggagcgcgcggtgagtggtcgggcggccttggaggggagggggcccggccgcgccgcctctcgccccggccgtcgctttgttccggggcgggaggtgtggccgccctccgggctc

SEQ ID NO: 30669 - DNA, 2300 bp, Homo sapien
taatgcatgcttgttgtagaaaattgaaacattaagaaaatgaaaatgccctgaaatctgccttagagacaaccatctgctaaagttcttaatgcctggatccacacctggcattaggatcaggtgtacttactagctgttttgcagcctgtctttttttcatacataacaacacactttttctaggttagtgaatatcttccttttaaatgactgcatagtactccattatatggataaactttaacttttccccccaacattaagttatttctattttcccccattcttaacatctttcttcacttctctgattatctccttagaataaattctcacatggggtagagctgcaggagagggtatgaatatatttacgcaagtgtattttcagtatagcctaggcagatttgcactttctctgcagtgtagcaaagcttgtacttctccgacactttggggaagtcctaaatgtcaacatcaggcttcagtaactacaaagggttctgcaatgactctcgactgtagccccatgcaaatcagtgtggccacataacccacatttgtgtccagccccctttctgtcaaaatctagaactgaagactattttagagctgaaactaattataaaagtaatctaatccagccctttaaactcatagataaggaaactatggctcagagagatcagtggccttcccaagtagcggcggagcacacagggcacccagttctttgtcctccctgccacactgccaccctcctctctgtgagaccatcggtttcccagtcacacgtacaccatgcttttcccatcccaatttgcacagggattctttcttttcttctacacagccgtaggattaagctttccctccctcgatttttgtgctacccaggaatgccctaccaggaggtggtattgcttcttcctggcagggtccacagttagttagcagtttaggttcctggctacaacctccaaattgttctttaggggatccccctagctgcacctgtgtttaacatttggtgctgtcagcctccttctggaaactcttggcttccatcatgaccacagatcctggtttccctccttttcttctgagtgcctccaggaggctccctcctgcctctcctccttgtcactttgtgacactgtttacaaaggtcactcttcacttctgttaaggcccaattattctttagaatcctggtcccacttccagctgcctcctggtcaccttagctcagggtttctcaacctcagcactattgacattttaggatggataattcttcactgggggggactgccctgcgcattgtacaatccctggtctgtgctgaacagatgccagtggtacccactccattttgacaacaaaaaaaaatatctctagacattgcaaatatccctggggagcaaaattcccctgactgagaaccactgccttagctggcctcagcagcatcaaaacaaaacttcgacctgctcctaccccctcctccccaaataaaatgattcccgcatgactttgtgtataatacagggcaagaagcagagagaaaggagccacaatcatagaattctgaaacttggaaggggcctcagagtcccagagctcaggtgtgctaagctatcatggccccctttctaagcttagacacagcttcaaatccttctcagcatagcagcccagttaataagaggggatgtgaaagatgaacctccatgccagccctgctcagaccactgccctcgtgttaacctgtacaagtagagtttagtggccaaaaagcttatttgacatggcttttggctatacttgctaaacaagaccagtggtactgtgtcctcaacaccaggcctggcacataattggtgttgaataaatgatggttgaataaatcactttaacagtggactgtctctggctagtgagaccaggggtaatgcttttattttcttttgcatttcttcattttcaaacctctttataattgagagtattactttataaaggaggaaaacatatgaatattttcccctaagttaaaaaagccctctgtctcattccacatgtcttgctgccgcaggtctgacctacgagaaacatggcaaccagcgccgtccccagtgacaacctccccacatacaagctggtggtggtgggggatgggggtgtgggcaaaagtgccctcaccatccagtttttccagaagatctttgtgcctgactatgaccccaccattgaagactcctacctgaaacatacggagattgacaatcaatggg

SEQ ID NO: 30670 - DNA, 2300 bp, Homo sapien
ctgagattgccttactgcactccagatggggcaacagagtgagactccatctcaaaaaataaataaaataaaataaaaaataaaataactttaaaaaggaggggggtgaaatcataatcccatcaccctaacgtactttggagaagttttagaagaggaacattccaggtagagagaacagcaagtacaaaagccttgcagcataaatgagcttgatgtgttcaaggaaagaaaggcgatgcagctggggatggcaatgtcccacaggtcgtctcaggctgggcatctgtctcagtgggtgtccatccagttcacaaaccaacaaccttcctttctctagtaatccccccacaaactcactaccttccacaccccctcccaaactagcccaggttgaggtgtggacttgctgtgtgtgaaggatgaaggggatgacagattcagcaggatcctgtctccaaggggtttggaattgggacaggataagggtcaaggcagtctctctggattggtgagacctgtgtcctccatctctggatgttggggggaaagtgctgtgttctgcacttcaaccagacaggcaggtcagcagggagggccacaaggatgaggagcgcagttctggcagttagtttcctggtccatccatcctgagagccagacacattctgcctcagcttccaggagaattcccagtatccctagcctacactctcttttgcttcagcagacctgggttaaccaatagagaaatattttgaggaaagaattctgtggtcaaataatctgggaaacactgggttaaatagaatttaataactttttgtctgaaggacttctcagagcctttactaggactgtgtacatgcaactctcaagaaggaactccagcgagcagcatttcttccgttgatttcccaggctacactgggagaatgttaagttgggggactttaagcctctgttttggctgagtcctggaaagccaagaacaatagagaagggtccaggtattctgaccaccaggaactcacgtattgttgaaaaaactcattgcagtaagtaattttatccaagagagaggataaagccagagagagaaaaagagagtgacagagcaagagtcagaacgagaacgggagaccggggcggggtggggaggggggagggagggagagagagaaaaggaaagagaatattttgattgctatccatcggctccagcctttcgataaagctgttgaaacagtagagtcattccaaatcactctggtacatttgtcaactccaaaatcacattccagtaattgatgtgagccctttcatgtggccgtctgaaatatatgctatccgcaagacgatttactatccgaacttaagagattcggagctccacctgctctgatcattaaagggttagaaaccatgggcttcaccattgactctcaggcacctcggggcttcctcttcatctttccttttattcgccggtcgcttgcccttgttgggcgccccacagatggccaagacgggccggtccccggaagttccccgtctgatgatgcagggaatgacgatccaaacagacacctagaagagaggatggggagagaggggcagagggttttgtggcgcgcaggaggggccctgagctcggcttggtgaggctgggggctaggtccaagctttacagatgccagaggagctggcagcgttgcaggctctaggggccagttggagggccgggacgcaggacctgaggctggggaggcctggctgagcctgtccagggagggcctcgaatgccagctgagtccagactatactgtgtattatagaccgcgtgtaggaaacaggttttaggtgatgtttatccatgataagccagttgtacacaggtgttggtgagtcattaaccacctagggcagcacttggtccacccggactggcgagtgcacacctccggctgacgcctgcgccacgtgctggggtcggaggccgagctcaccggctggttgctctttagagcgggcaggagccaggcgggcggcccgcccctctagggcggagacttccggagctgcggactcactggagccgagaactggggcggcgcggcgcggcgcggtgcatttccaggcgctgctctccgtcgcagagaaccctgagctcggcgcgccgagagtcccagcagggcaagggggcgcggcgtcctggtcctcgagcttgggagacagatgcgcatgggcgtgggggcatgcggacctaagctcgggtgaagctctcgggaagggcaaga

SEQ ID NO: 30671 - DNA, 2300 bp, Homo sapien
gaggcgctttgatttttggaattttcagcttttctgctctggtttctccccatctttgtagttttatcttcctttggtctttgatgatggtgacctacagatagggttttggtgtggatgtcctttttgttaatgttgatgcttttcctttctgtttgttagttttccttctaacagttaggtccctcagctgcaggtctgtgggagtttgctggaggtccactccagaccctgtttgcctgggtatcgccagcagaggctgcagaacagcaaatattgctgcctgatctttcctctgaaatcttcatctcagaggggcacctggctgtatgaggtgtcagtcgggccctactgggaggtgtctcccagttaggctacacggaggtcagggacccacttgagtaggcagtctgtccgttctcagagctcaaacaccatgctgggagaaccactgctgtcttcagagctgtcagacagggacatttaagtctgcagaagtttctgctgccttttgttcagctatgccctgcccccagaggtggagtctacagaggcaggcaggcctctttgagctgcggtgggctctacccagttcaagctttcctgccgctttgtttacctactcaagcctcagcaatggcagatgcccctccctcagccaggctgccaccttgcagttcaatcttggactgctgcgctagcagtgagcaaggctccatgggcatgggacccactgagccaggcatgggatataatctcctggtgtgccacttgctgagaccattggaaaagcgcagtgtttgggtagcagtgtctggattttcctggtacagtctgtcacggcttcctttggctaggaatgggtaatctccctactcttgcacttcctgggtgaggcaatgccccaccctgcttcggctcgccctttgtgggctgcacccactgtccaaccagtcccaacgagatgaaccaggtacctcagttggaaacgcagaaatcacctgtcttctgcatcagtcacactgggagctgcagactgaagcctttcatatttggccatcttggatgcccttgggtttatttttaaaaatgcatcattatagtcttgtttttcccctttactagttagaaaattatatacttctgttcagttcttcagtggatgtcctagaaattctcaagcatccttaacttatacaaaagcccagtgttaacagatacctttaccagtgtccacctccattgtaaacaaacttagaacactgttactccatttaccctactctcagctaatatatttctgttactgtgcattttaattgtacattttatacttcacaagatctcattatgtagtctgtgtttaaactcgcccatttttttgctctatttttttctacatctctgcttttccatcagggagtcttctgcatgaagcagcttctttagaatttttttacagagcagatgcaatgaacactctcagatttattttgtgtcatgtgtttgaaaatatattacttttgcctttattattcgttaatgaatgttttcactggctttggaattttagataagcaattattttctttcagcacattgaagatattagtgtctaggtatgactgactttttttttcttttttcttttttttttttactgtatcccagttgcaatatgttgggtttctagaatgtgtggatttatgtctttcattgattctcaaatttttcttagccattagctcttcaaatgctccttctactccattctttcctctgttcttgggtaccagttatgcattctgtggtggggggttagacaggacagagtgtatgtgtgtgtgtggtatatgtgtaaaatcccagaatgctttatttccagaggagaacattataagatagggtttattcaaatgagtcttacaatcagctatctaagaagtcacaaagttttgacgcaggaatgacctgaattgccctgcaagagtagtggattcttttaaatatacttttctttaactccttttgcactttttgtcttttttcatttaggcaactcaaattttttaattgccaatttctgtttcttttgattctacaaaagtaactatgtttccggtagcccctaaaccccaggattccagtcaaccatcagacagactcatgactgaaaaacaggtaaacttaaaatattttaagacactgcttctcaaaatatgtgccaaagaatgctacatctacaaacaggaaaatttgactttaaaaggattctttctcaaataattttaggaaatgct

SEQ ID NO: 30672 - DNA, 2300 bp, Homo sapien
aaaaatccctgcgtaagggtttggggatcggacaaaactgcctccagtcccagctccccaggctttgtgttctttggcttctcctttaatgtctcagcgcctccgattctttatttgtatactaaagctggtaattcttgccttacaaggtggttgtgagggttaaatgaggcagtaagagtaaagcttagaatcacgtcgggcacagactcgatttaagctgtaggtaattactccatcccccaaaatcgacccgggctgaagcgctagttttgtgtcaaacaaccgcgaaggttgtttggggagtgaggactcggagcagaagggggcggttaggcgaatagcacaggtgagtatctctttctccagtttattaacctcattccggattcaggagacctctgactttatacagggcctaataggagtttttcaaggtgaaaaatgccagaaggctaagtcacctgtaacagagagaccaatcagagtttccttttttactgccactttgtttttcaatcaatgatattaaacaggcagggcgcagtggcttacgcctgtaatctcagcactttgggaggccgaggtgggcggatcccctgaggtcaggagttcgagaccaccctggccaacatgatgaaaccacgtctctactaaaaatacaaaaattagctgggcatggtggtgtgcgcctgtaatcccagctactcgggcgggtgaggcagcagaatcgcttgaactcgggaggcggaggttgctgtgagccgagatcgcgccactgcactccagcctgggtgacggagcgagactctgtctcaaaaatatatgtataatatattaaactctgtgcaggcattacccatattggtttcaagcctctgcatgagttttgtactttaaatattgccaagtagactctggcctcccctgccccgccttttggggaagaggtggctgacttggagttttccctacagcttttgcttcaaagcaaggttctgccccttcatgtcacctctcctgagacagaatgatttggttgagatgacattccattttaactctttcctatttggggtaagttcagctctttcttaggaacattaaacagcaagttgcaatatttttagaatagagcttttgcatttaataaggaatagagacttcgaaagggttacatgttcatttattgcagtaatttgaagtatatacttttgaagatgcttacagattttggtgtgattcagttgagaaggaacagttattggccatggtttattgtcagctcccctcccccaccccaaatggtgaaaaaaataattaaattttaagatatggagcatgttacaaggggcttcagacctataaagggcaatttggctgaaagactcgggaaacctagaaagtgccagaagatgcaattatgtttttgcttttctatgcttggcttactatgccatgtacaaatcaactcctaccctccgactcctaccccccgactcctacccccaacaatcttattttaagtgtgttatgacagtaattaaagctgtagcttctgttttggccctagaaagcatttggtctcttcctgtgactttaaagttccagacctttgtcctgtcacagcctgtagtggggaaaaggctgctgcaaactattggcccgtttatttcacagaatggtcctctgaaaaggagggcttggtcacaggtgcaaatgaggagtagttttgttcctgtgtttgcttttgtgatcagtggtagtttgtctgaggatgcttcattttagtatccttgcaaatgagaatatcctacctgtggagccagaagtcagaattgatgatagatgatgatagatttggatacccagctaaatgtcttaacaaggtagggagaggaaagataagaaggagagagaagagaagggaagaggcatatgatggtgagctgggaaggccattagcagttatttcagttgtgcctgctttatctgtgattaccagtaccttggatgcctgctctgggagtaacacaagaccattcttactaggaggttgaacatttcaagattttgttctttttatctttttgaaacctagatgaagatccagtttcagacatgagactcgttgggtgatcatttcattgagatcaacctgaatgaccaggtgtaaagtgcaagagtaatatgctatgactgaggtatgtctaatgtaacggatgactccagatgttgggaggccatggaaaaaaatctaatatttattgagtactatactaggttcattacatatattt

SEQ ID NO: 30673 - DNA, 2300 bp, Homo sapien
acctccgcctcccgggttcaagcgattctcctgcctcagcctcctaagtagctgggattacaggcatgtgccaccacacccggccaattttgtatttttagtagagatggggtttccccatgttggctaggctgttgtcgaactcctgacctcaggtgatccacctaccttggcctcccaaagtgctgggattacaggcgtgagccactgtgcccggccaacacatttttataaatgaatgaatgttaaatgaatgtttagaattattagaattctattgggtagatgaggcccatagaaaactcttgagaccaatgtagcaggattctcagtgaaagactaagtttgtgtgcagggatgttttccttctctagcaaagagaggtgctggaaaggctttcatggtccataagaagggaattgttttggagggcagtgctatagcaactcttcccctccattcaccacataaaaaattcagttagaaaatagagaggaatcagccttcttgtgctttgaagactgtgaaagatactggtgatcatccatctagcatccattttcctcttctcctttacaggtctccagttttattcaaatagccatgtctccaccttgcaactcatgtgactcaaagagcactgacaccattgccaattccaattgtcatagctccttttcacttctggaacccaggcttaagctgtctgtacatttcccaggcagttactggtaaagaggaagagtgtgtgcctgtgtgaacttattggctcaaaaaaccagaaggaaaggttttagatgaaaaagaaagtatgtggtcctgatttctccaagtagacatctggaaaatcacgttagtatgaatttgaagtctacccttttttttttttacaacaaagcagagactaatagcaactgggtccttgttaacttgcttagccactgaattaatcaaagtctcccttgcctctgagctttctgttatgcgagataagcaacttctttattttttaggaagacagtttaactcagattctatatcacgtgcatccaaaataataataactgactcaaagatgtttggcctctacaattagggcagccattctcagaagagtatgcaagggcaccctattatcttggaaaagggaagcactgagactatttgcattttgagaactgaaaatgcaatctgctaaccgtcgttagagtgaatatccaggtatggaaagcacagtgggtaggcgtaggttggggtagggacatgtttgcatggggcaaacacagagatcaaacctaagtgtagtcccagctgcctggaagaaggctaagaagggtctgaaagtattgagctccaagagcccttggatctcctgatgagagacccttggctgatgccctagatgggacatccctgttggctactgtgggacctgcatcatttgactgcaacacagtctgttgcaacatttgactgtaacacagacctacatcatttgactgatttgaaaagacaagttgtcaacagcgacaccatgtggctataagatacaatgacaatggtggacagctacagcctcaggtagggcctgacgcttcgtcgagatgtggaaaatgctgaatgggaagatgaactgtcgtcaacaaatatttattggggtcctccaaatgtcagctgctacagtggtcattcaggtctggaacatcgagaacatgctgacccgtaccccagcaagggctcgtagtcgcggcggggtagggggcgagagagagggcagtctctggtggccaggtaacccaggcttcactttcacccacggccacaagtatttctgacgtcttccgggcaaataagcctccatgtaagtgacagggcacccaaggagtgcgttggaagcgccagcgtgcccgagaccagcacatcgcaccgacgccttcgtttgcggtaagccccgccccccgtagtgagccaaccggagggagcggggcggacccagcttcccggagaggctggagagaatcgtttgggggcattcgcaggccaaagaggggctggccctcgacgcgctcgggctcgattggccgccctcccccggcggtggtaacggtcgcggaggcggggcctgacgtagctgatcccagcctaacctggcccggctggctgctggtgggaggccggcgactgagtaaggtgagtggctctcggggctctcagaggcgtcggcgtgagccccttcccggagtaccccggacttgacctcacctgggcctaaaagtggtcagactgacccttgtcgggga

SEQ ID NO: 30674 - DNA, 2300 bp, Homo sapien
gagctgtgatcatgccactgcactccagcctggaataaaaccctgtctcaaaaaaaaaaaaaaaaaaaaacaacaaaaatacaacaacttagactgggtaatttataaacagtagaattgtattgctcacagttctggaggctgggatatccaagatcaaggctccagcagagtcacagtctgctaagggcttgttctctgcttcaaacatggtgccttctcagagcatccacacatggcagaaggatcaaacaggctccctcaagcctctttcacaagggcaccaatttcccccacaaaggatccatcctgttaatatgaatgtgttgggtcttaggtttcaacatatgaattttggggagataccagcatccaaaccatagcagcccccaaatatgctgggccctcaaaaccctccaaaatcccttcacttatctctattctatgactgggcctactctccacagggaccattcactgctcctcacatggcccactcaacaacttttctcgctctctgtaggcaacactgtctcctccttaaattgaaaatcaaggccacctaagacactacccaggcctgctcttcattcattcattcatttaataaatatttaccagagctaacatgggcctgcacggtacagatgtgagacatacaagaatgagagccaagcggccatggtctctgccttcatggatctcagtctactgttaagttacacattaagcaaaaattacacaaattattgcacaccctgaaaggggctaggaagaagaatccctggtgctgcaatttttgtgttttttttgtttttgtttttgagacgaagtatcactctgtggctcaggctgcagtacagtgaggcgatctcagttcgctgcaactgccacctcccaaggtcaagtgattctcctgcctcagcctcctgagtagctgggattacagacgcatgccaccacgcccggctaatttttgtatttttagtagagctagggtttcaccacgttggccaggctggtctcaaacttctgacctcaggcaatccgcacctggcctcccagagtgctgggattacaggtgtaagccactgtgcccggctgtttttttttttttttttttttgagacagagtcttgctcttcgcccaggctggagtgcagtggctcaatctcagctcactccaacctccacctcccaggttgaagcgattctcctgcctcagcctcccaagtagttgggactacaggcatgcaccaccacgcccctctaagttttatattttcagtagtgacggggttttgccatgcctgcctcagcatcccaaagtgctgggattacaggcgtgagccactgagcccggctgtttctttttgtgtgtgttttttttaatgaaacagggtctcgctctgttgcccaggctggagtgtagtggtgcaatcacagctctctgcagcctctacctcccttcagggcccaagcaattctcccacctcagcgtcccaagtagctaggattacaggcctgagccgctaattattttcttttcttctttctcattctctctctctctttttttttttttttaccatgttgcccaggctggtcttgaactcctggactcaagagatccgccactctgcctcccaaaatgccgtgattacaggtatgagccaccacacccagcaatgctgcaagtcttatgggccaggatagtgtaatctaagaaatgatatatgaagaactctcacaatagggaagaggtgaggagtgtccaggcagagagaagagcatttgcagaggccctgggcgagaagaaacctgcatcctttaaggacctaaatgaagccaagcaggcagaggctagatcacacatgggggcttcatgcccaccttaagtagtttgggtctttaaaaaaggaatgagactcataaagaggttttaaggagcgaatgctattgctgccatgaacagatattccttccccatagctgcagagcaggcacagggctgtttttgcccgccagtatgtccccaccgtctagcccagagcggggccagcggccggctcctacccacacttgctggcaggaagactggacgcactgcgggacatggtgatgtcctgggttggggctgaggaaggcctatgcgcggagggtgcggccttcggctaaggcagaggaccagggttgggtccgtggcggcgggaggggtggcctcctgcgctggtcgccccaggggacctgagaggcgcgacaaacagtcggcgcgtttggtactcgcgcctgcagagctt

SEQ ID NO: 30675 - DNA, 2300 bp, Homo sapien
cattcactgctcctcacatggcccactcaacaacttttctcgctctctgtaggcaacactgtctcctccttaaattgaaaatcaaggccacctaagacactacccaggcctgctcttcattcattcattcatttaataaatatttaccagagctaacatgggcctgcacggtacagatgtgagacatacaagaatgagagccaagcggccatggtctctgccttcatggatctcagtctactgttaagttacacattaagcaaaaattacacaaattattgcacaccctgaaaggggctaggaagaagaatccctggtgctgcaatttttgtgttttttttgtttttgtttttgagacgaagtatcactctgtggctcaggctgcagtacagtgaggcgatctcagttcgctgcaactgccacctcccaaggtcaagtgattctcctgcctcagcctcctgagtagctgggattacagacgcatgccaccacgcccggctaatttttgtatttttagtagagctagggtttcaccacgttggccaggctggtctcaaacttctgacctcaggcaatccgcacctggcctcccagagtgctgggattacaggtgtaagccactgtgcccggctgtttttttttttttttttttttgagacagagtcttgctcttcgcccaggctggagtgcagtggctcaatctcagctcactccaacctccacctcccaggttgaagcgattctcctgcctcagcctcccaagtagttgggactacaggcatgcaccaccacgcccctctaagttttatattttcagtagtgacggggttttgccatgcctgcctcagcatcccaaagtgctgggattacaggcgtgagccactgagcccggctgtttctttttgtgtgtgttttttttaatgaaacagggtctcgctctgttgcccaggctggagtgtagtggtgcaatcacagctctctgcagcctctacctcccttcagggcccaagcaattctcccacctcagcgtcccaagtagctaggattacaggcctgagccgctaattattttcttttcttctttctcattctctctctctctttttttttttttttaccatgttgcccaggctggtcttgaactcctggactcaagagatccgccactctgcctcccaaaatgccgtgattacaggtatgagccaccacacccagcaatgctgcaagtcttatgggccaggatagtgtaatctaagaaatgatatatgaagaactctcacaatagggaagaggtgaggagtgtccaggcagagagaagagcatttgcagaggccctgggcgagaagaaacctgcatcctttaaggacctaaatgaagccaagcaggcagaggctagatcacacatgggggcttcatgcccaccttaagtagtttgggtctttaaaaaaggaatgagactcataaagaggttttaaggagcgaatgctattgctgccatgaacagatattccttccccatagctgcagagcaggcacagggctgtttttgcccgccagtatgtccccaccgtctagcccagagcggggccagcggccggctcctacccacacttgctggcaggaagactggacgcactgcgggacatggtgatgtcctgggttggggctgaggaaggcctatgcgcggagggtgcggccttcggctaaggcagaggaccagggttgggtccgtggcggcgggaggggtggcctcctgcgctggtcgccccaggggacctgagaggcgcgacaaacagtcggcgcgtttggtactcgcgcctgcagagctttcaacctccgcgccggctgcgcctgtttctcggccaggggagcaaggccacgcggcctacgcagccgagtcggaaccaaccggttgtttggtgaaacctaccccagagcctcccgcggcccacagagcacaggtgaggcagcagaccgggtggggtcggtgtcgcgcctgcgcccgcccggacgcctcgggcccgcccgctccgcaccctggaaacccctgcactcagccccccggcgtccccacgctctcggccctgctgcgccggcggcggccatctctgggcggcggcggcgggcggtgtttgcgcggtcggtgagacccgcgcgggtgagacgctgggtgagttccggacgcttccagccggcccgccggtgatcccagacctcggggcgggacgcggctcccgctcaccgccggcaaaggtggaggtgcggcggggcgcggggcgcggggccagcccggggcggtg

SEQ ID NO: 30676 - DNA, 2300 bp, Homo sapien
acgccactgcactctagcctgggcgacagagcaagactccgtctcaaaaaaaaaaaaaaaaaaaaaaaaaaagaagaggaaagaagggcacttactaagcaaataatatactaagacatttcccagagccaatgttcatgaatatccagtcaaaatagcacaaaaattttctgagaatggaagaaaaacacccttactaagtacctgcactatgaaatttcagtgcatcagacgtaaagagaaagtcttaaaactttcgcagagacacagcaggccacataccagagtttagaagtcaaaatgacttggctcctcaatagctacattggcaattataagacagtgcacgttagccttcataattttgagggaaaatgatttctaacctaaaattcgataaccaaacttttttttttttttctgagatggagacttgctctgtcgcccaggctggagtgcagtggcgtgatcccggctcactgcagcctccgcctcctgggttcaagtgattctcctgcctcagcctccccaggcagctgggggaccacaggcatgcgccaccacgcccagtcaagtataaagggtagaatgaagacatttttccaacttgcagggtcacaaaacttgtcactcctctgcatcttttctcagaggctgccagaataaggacatctaccaaaacaagtgcctaaaccaataattatcaagtggggtgatttttcactcaggggacatttgttaatatatgaaaacagttttagttgtcataactggggggtggggtagtccagtggatagaggccagggatgctgctaaacacccatacaggacagaaccccatatcaaagaattatatggcctatgtcagtgtgtgccagtattgagaaaccctggtctcaaccaaaagagaatgtgatgtgggacacaaaacgggctccaaatgggagaagaggaaagggaaggcccaggatgatggctctgcagcaacaccggagaacaaccagcccagctagaaaccagtagattacctgactgtctggaaaacagttttgaaaatgatttgtagatttgttgttgtttgatttgtagatttttaaggagagtttgggaagaattaatgctaaggtcatagaacactaagctaaatgaatgaatgaatacatgcgtacagttttctaaaggaaaaaaggtgaacatgtgaaaaataaaaacactgaatattgatgtaaccagaaattatgacataatgtgccacagtgtgtagcattatgttagcataaaagtactaaatctttatcttccataataagaatagtaatatacaattagggagcaaaaataaatataaacatattatttagaaaaatggaggcagacaccaggaaaaacacctagtgagaagagtaagaagttacctctaaagagtagcactcaatgtggggagctagtagggcaaggatgtacttttttgttgttgttgttgttgttgagacagggtcttactctgtcacccaggcaagagcgtagtggcatcatcatggcccattgcagcctcgacctcctaggctcaagcaattcccccacctcacccccctgagtagctgggaccacaggtgtgtgccactatgcctgactaattttttccttcatttgtagagatggggtctcgctatgttgcctaggctggccttgaactcctggtttcaagtgatcctcctgcctcagcttcccaaagtgctgggattgcagacatgagccaccacaaccaacctgtactcttttcttgttatgttttatagaactatttgactttttaaaaatcagacattttaattctttggatgtatttttctttctaaagcgtctccttttccactagatatctacagtttaatatcagggttatttattattgattgtaaaagtcttaagagtgttagatatggtctcttctcacctggctcagtgggctataaacagagggagaagggctcagatgtggatgggtatagttcctgggggtctaggactatggaggttttgcctttatatttggaacccaccagaaaaatgaaggaaattaaatcccatttgttttccagctcttccacattgactttggacatattcttggaaatttcaaatctaagtttggcattaaaagggagcgagtgccttttattcttacctatgatttcatccatgtcattcaacaaggaaaaacaggaaatacagaaaagtttggccggtgagtactgcccttgtgccaaggctgaacacttctaacattttcttatct

SEQ ID NO: 30677 - DNA, 2300 bp, Homo sapien
agttgaattttaaacataatggttttgatttagttggccattgttgatacaccttgtactacttgcataagtttttttttttacttgcataagttttgatagccatagttattataaaaacaagtaatttagatttgaataacaaatagcatgtctatattcacactttattataaaataattcgttctagctatgctgttaatggaaatagaatatattgagatatcatacaagagtgatgacaagaagtagatattaaggttgaatagcaagaacctcagagttacttctacataggtttttctctaatactaggaagttggccaaatggactggtttaggttagtgatgtctcaaattctactatacaatgaattgcagaattttgagtagtttaagtttcatatttatcttctttctttctttctttttttttttttttttttttttttttgagacagtttctcactctcttacccaggctggagtgctgcagtggcttaatcttggctcactgcaacctccacctccaaggttaaagcgattcttatgcctcagcctcccaagtagctgggattacaggcaagtgccaccatgcccagcaaatttttgtatttctttttgtagagatagggtttcgccatgttgcccaggctagtctcaaactcctgacctcaagtgatccagctgcctcagcctcccaaagtgctgggccacatttatcttcttaagtacccatagtgcgcacctggcccacatttatcttaagtacccataatctaagtctgcttttctcgaatttgtaagattttgtttaagaaaaggtttaaagaaagtttgaaaatgatgctataacaactgttaaaaataagtttattgtatgtaaaatgcttttcgtaagtcagacactatttttacttcagctggttatgtgtgtttatggttatgtgtatatgttgggagcaggtgttattgattgatatgatcacatgatattatattacttttagtcaaatgaatttttggtgtggggaacttatttttcaggttgaagcactcaataagttaaaaactttaaatagtttaatcaaactgaatgccgtgaagttaaacagagccaaagggaaggaggccatgcatacctgtttaaaacagagtgcttaccgggaagccctctctgacctgcagtcacccctgaacccatgtgttatcctctcagaactctagtaagtgactgtgctttgcgcagtgaatctcctatgaatagcaagcagaaagtcactgccttatgggagtagtagggccagctgtcagcctcaggaagtagaatataattaaggaaggaaaatcttaaaagttctccgaggctatgcttatattcaataggatgtatgcttatcagctaaacttaccagtggatttagtgaaagttattacaaatgaatttatatttcaattatatgtaattaaatttattttctatattactgatttttaagagttgacaatcctaataagcaaaatgttgcaaactgtagtaaattatttactgattgattttcctattttaaaataagatcttgtcttgagtgaatttggcaacttatttctcactttctcattccctacaaaagtaataatggaaaataatagtctgtattcagtatattatcagtattcaaatgaatcccttgttaagaaatcaagaatggtctcaaaatagttctaattttaatccaatgatttgttctaattttttattcactaaatgtaataatgtaaagttaagcaaataaaaggaaacgagagaaggaatgttaagtggagaaggtgagaagggccaatcttaggttttgagtccagcctatctggcattagtatatgccacccaaggctgtcctcatggttgcttttctaccaagtgggactcttctaagtctgactcttctgcagacctgacaggaataggtgaggagttttcccaagcctagtatatagtggtaaaattataatcttctgtatcattacactgaagttgactaattttccccacttgatttcagtgttgaaaagtgcaaatacatggattccaaaatgaagcctttgtggctggtatacaataacaaggtatttggtgaggattcagttggagtgatttttaaaaatggtgatggtaagtactgagatttttaacatcaaatttcttagaatttttcatttgttgccattttgctttatctgaaaggtgatgtgtagtgtaagtgtgtaacaatttgcagccaggaaggtagctattaat

SEQ ID NO: 30678 - DNA, 2300 bp, Homo sapien
gctgtgtctcctaagtgttttttaaattctttaacagtccttccaccatcttcttcctcctcttcttgatattgattagctggagaaaccatataatttgttttattgaagatgccacattctctacttggctgattgcttccttgaagtatttaacttttttctctgtttcctgtaaactagcacatagatcagatctaaagccttgattagattcaagttcagttttgttttgtgtgaatggtaagtactgactattgcatttcatgaggagacacataatgtctgatagtcccacttttagtaatgctaagatcaggggattcctgtagtgtcaacaagacagacacggacgattgtaaagtttcttctcctttcaccttattattatttatgtctttagcatctattaatgatcattgcctagatctgttagttcattagcacttgcagaattgtgattttctaatttattattctttttccatttattagcaaaagaagttctaaaaattgttttttaatttttatttttttaagacagggtctcactttgttgtccaggctggagtgcagtggtactattttagctcaatgcagccttagattcttggactcaagcaatcctcatgcctcagtctcccaagtagctgggactacaggtatgcaccactacgcctggccaattttttgtatgttttgtagagacagggtcttgtttgttgcccaggctggtctcaaactcctggactcaagcaatccacccatctaagcctccccaagtaatggtattacaggcatgggccactgtgcccggcctcctgtctcttttgatatgacactttcattaatggcataattgttaaatgaaccttggttcatttaactttagcgctcatgttcttccaattattattgttgtatcttcttgaaggaagcccttaaggaataggtaagacttaaatggcactattaaagggtgcatttgttgggatagtgcgtttgttttgatatgaggagtttattcctcatgtgaacataggtctagcagcaggaaggcagaaggcactgtgataccagtctcgggctgtagagtgatgggagagcaagaaaaataggccagagaaatagcacaaggggccttgccatctgtattgagcgatttggtgtttttaatgcttaggggatgggccgtgaggttgatagaaaattgtccttgttggctgggcacggtgggtcacgcctgtaatcccagcactttgggaggccaaggcgggcggatcacgaggtcaggagatcgagaccatcctggctaacacggttgaaaccccgtctctactaaaaatacaaaaaatttagccaggcatggtggcaggcgcctgtagtctcagctactcgggaggctgaggcaggagaatggcgtaaaactgggaggcggagcttgcagtgagctgagatgtcactactgcattccagcctaggcaacagagagagactccatctcaaaaaaaaaaaaaattgtccttgtagagaaagggccctcttgattgcaaattgttcttgttgagagagggccctcttgattgtcattttcattggaatttgcagagaaaaactcagcctaagaagctaatattttctaaataaagtttggagaaaaatcacctgtcaagtgctggttaactaaatttcttaggaccctgtaatccttaagcatgcagtttattcagatgtcaaatatctatgttgaatttgaatcaatgtggtgtgtgtgtgtgtacatatgtatgtgtatatatttttatttatatgtatataagaataatttttttcctttagttggtggtatggattggataatgtacatatatataatttgtgaagtgataaaagtgtatttaaataatttatttctgctgacttactcttggtttttaaaatatcacattatttaattggcctcctgttacattattggctatattgaaatctaaggactaattgtagattagtggtctttatcatatcttggtataaaatttggctgatggttgttttgctatgttttaattactgatttctagggccccgtggttatgaatgtgcttcagtttcataatgcctcctgctatggcagacatccttgacatctgggcggtggattcacagatagcatctgatggctccatacctgtggatttccttttgcccactgggatttatatccagttggaggtacctcgggaagctaccatttcttatattaagcaggtatgttaataggtataatttctatgtgt

SEQ ID NO: 30679 - DNA, 2300 bp, Homo sapien
caactcgtggccgctaccgcagcctccctcacccatgccctatgcctcctgccagatggcggcagccgcagcggctgcagcagctgcggctgcagccgcgggccccggtagccctggcgcggccgctgtggtcaaggggctggcgggcccggccgcctcgtacgggccgtacacacgcgtgcagagcatggcgctgccccccggcgtagtgaactcgtacaatggcctgggaggcccgccggccgcacccccgcctccgccgcacccccacccgcatccgcacgcacaccatctgcacgcggccgccgcaccgccgcctgccccaccgcaccacggggccgccgcgccgccgccgggccagctcagccctgccagcccagccaccgccgcgcccccggcgcccgcgcccaccagtgcgccgggcctgcagttcgcttgtgcccggcagcccgagctcgccatgatgcattgctcttactgggaccacgacagcaagaccggcgcgctgcattcgcgcctcgatctctgagagcccaccgcatgccggtgcagacggatgcgaggatgcagggacgcgcgacgccggccccggtcgcagccgacgacgccgccgccagcctgacctcacaccctctgggcccgcctctggagccagcgcccagggtccctctgtgctttttcgctttcctaagctcctgtcgctcctctttgtcccctcagtttatgtcctcctgtgctcacctccctgacctctgtgaccttgcactcccctggcctgaagctgcctctctgcgcgctttctactgggctcgtctctttccggagccccagcgtctcctgcccaaattcaccgcggaaagggcccggggcggaggtgcgaccgggcgtcggcagcgcagacctcttggccttctctcacaggtcggtgcgctcgctctccgcgttccccgcccgactgccgtgcagtccatggctagacgcgccggacaggactgatggcgggaccgcgctgcccgagaaagggacggaccaatacgtgtgtttgctccgcgaaccctcttgaagctgttcagaagccgcttgccgcggggcccactaggcggggcgggggttgggacccagcgggagccggggcagcctggctccacggcctgtactcggtttacaccgcgggcgggcgcggagggaggctgcgtttcctccgctatcagtcccgtcgcttcgggcacctccgggccccggcggctggctaatgttttgtttgaaagatcggtggaactttttaagagagtatttaaaaaaaaaaaaaggaaaaaaaattcaccgggcaaccggggaagtattgtggccttggagtttgctaaatccaaatatgaaaatcaaaagctttagtattcctcatcttctcttctggaagatttgcgttagagtttttgttgggccttcaaaaagctgtgttcagagttaggagaatatatccaataaaagatggtttcgtctaccaattggggaagtttcaccctctccctatctgaagaaaaaaatcaaaaacaaatgtccccggatctttcgatgcaagtcctggaggcagggagatcactgcctgcctggcccacgctgctgggacggctcgtcctccctgctttttgtttttcaaacctcctgcttctcccaccttgggaaggagaaatgtgaaacccggcagcggccgacctaggcggtcttgtggcccggagccggcccggcccgaaaaccatagacctggttgtactgtagcttgttgtttgggggaccaaattttctagagagaactagagcacttttgttgtgtttttttgttttgtttttgttttttgccttgtcgattcccgaataaattttgtgttccttcttttaacacggacttctttatttctgtcgctccttagttcagcagctagttaaaagaggaagattttcagcaaaattttatctttttcagaatgagttaaacaaagattgagagcaaccggggtggcaggcgtttgtggctgtcgctgctgctttgttttcctgggattgtttgttttctgtgtcatcactggcccgttgcggctgtttaacgtcagcagaaagactttttctgccgtggttcgttcacaaggcgcgactgtaggtaggacttggtttatttttgtacctattcaagtttgtattctacctcatacacagttgtactaggtgtatgggctggctgtgtttttattattgttctcaaacttttcgattttgagtcaactataacagccaagagtttgttc

SEQ ID NO: 30680 - DNA, 2300 bp, Homo sapien
tccggcgcgtctagccatggactgcacggcagtcgggcggggaacgcggagagcgagcgcaccgacctgtgagagaaggccaagaggtctgcgctgccgacgcccggtcgcacctccgccccgggccctttccgcggtgaatttgggcaggagacgctggggctccggaaagagacgagcccagtagaaagcgcgcagagaggcagcttcaggccaggggagtgcaaggtcacagaggtcagggaggtgagcacaggaggacataaactgaggggacaaagaggagcgacaggagcttaggaaagcgaaaaagcacagagggaccctgggcgctggctccagaggcgggcccagagggtgtgaggtcaggctggcggcggcgtcgtcggctgcgaccggggccggcgtcgcgcgtccctgcatcctcgcatccgtctgcaccggcatgcggtgggctctcagagatcgaggcgcgaatgcagcgcgccggtcttgctgtcgtggtcccagtaagagcaatgcatcatggcgagctcgggctgccgggcacaagcgaactgcaggcccggcgcactggtgggcgcgggcgccgggggcgcggcggtggctgggctggcagggctgagctggcccggcggcggcgcggcggccccgtggtgcggtggggcaggcggcggtgcggcggccgcgtgcagatggtgtgcgtgcggatgcgggtgggggtgcggcggaggcgggggtgcggccggcgggcctcccaggccattgtacgagttcactacgccggggggcagcgccatgctctgcacgcgtgtgtacggcccgtacgaggcggccgggcccgccagccccttgaccacagcggccgcgccagggctaccggggcccgcggctgcagccgcagctgctgcagccgctgcggctgccgccatctggcaggaggcatagggcatgggtgagggaggctgcggtagcggccacgagttgttgaggaagccagactgcaggtacttggggggcgccaggtagccgtagccgtcggccccggcgcccgccacgccgcacccgcctgcggcgcctccggccccgaagagccccttgccgggctggaagtgcgcgggcggcggccggaagggcctcttcatgcggcggcggcgccggtagttgcccttctcgaacatgtcttcgcaggccgggtccagcgtccagtagttgcccttgcgctcgccgccgccctcgcgcggcaccttgatgaagcactcgttgaggctgaggttgtggcggatgctattttgccagcccttcttattcttctcgtagaacgggaacttcgcgatgatgtactggtagatgccggacagcgtgagcctcttctccgcgctctcgcggatcgccatggcgatgagcgccacgtacgagtacgggggcttctgcgccgggtccggcttctccggggctgtcccgccgccacccccaccgcccttgcctgggctcggcggcggcccttctggctccttgactgtgcgaccggtctctggggccagcagggcccccgccgcgtcctcgggctcggggtagctggccatcatgacaaagccggcgcgccgcggccgggccgcctctgctctccgctccaggcgctggcgcggcaaagagttggggcgcacgagtccgcttacggccaagtctcaaacttctggagactgcggatgccgcccgcgcttgcttgctggaggcctgtcgctgctctcccctctccttccccttcccctagggagcggccggcgggagtggagctcagcctctggccatggggagtccgcccaacagagaggggctccggcctcgccgcccctccccgctcaggccagtccccgccttggtgggttttcttttctgcgctcttcccctccccccgccccccggtttcccgaagcacgacccgcgtctctggcggagctgcctcctggagtccctagtgcgccaggagcctcgctctgttctgattcgtatgggctccaccgagttccgcttgcgtcaggcgccttcgcccctatagcggggcggccagccgcgcacgggcgagttcatctccaagtcactttttgtaaacgccccgcacagcctggaccggcctgcccccgcccagcgagcctcaggggcccagccgacagccaggctcacgcgcccttgaaatctgccggtactcgctctgcgggctgggctgggagatgacgaggaccccggtggggtctgcccgcacccggccaaagcccaggaagctcgggccccagcgagga

SEQ ID NO: 30681 - DNA, 2300 bp, Homo sapien
gagagacgcagagagccagcctgggtggtcaagaaaaaaaaaaaggagagaaaaggagagaggagcccccaccaggatggggccagacccagctgtttttccccctgcccaggccctggctgggggaggataggcactgaggccaatctgcagcagccccaaaccggactcaccactcccacccaaagcttgggcaaggatgggggtaaggaagaagaaaaacatctgcactcctgctcagaaagcagcagcagggattctgcggaagtgctgcttcccccatgtctgttgggtgcagtgggagaccgcccataaaaaaaaccaagctactttggggatagccttgctccctctcatccttgtgaccaggcaagggctgccctgctgacctctctggtgtcatcttcaagatgctgaattccaaagagccctaccacccttgtcctccctccctttcatctcagaatgcagatcagaggcctgagtgagcagcagacaacacttgtagatggcctgtggatgctggaaccacaggccgctgaaggctccttgggcttcaggagaaccctcagagtctaaacagcctgggaggaagaggcagtgacaggcattgagtcagccactccagacatgccaatcactaatgcacagctatatgacatccattcagtccaccttcctccataaggtggccttgcccccctcctcagcaccaaggagtttggggcttgaggattcaaaacactggccatctctctcatactttatgactgcagactttttgtttaggccaagttaaaaggcactgttaaggagcacactgttaaaaggcacacctgattttccctgaaacaatctctgtacatgctgaaataattggattcccatcagaattctgcttaaggtaggtgacaactaactcctgattctttggagaaagatcagaacaaatgtctcatcaggagagagatttgaacaagtccctccctcagcctgatgtttgtcttcccagtctgtggcaaaatacatacactgggagggaaagaggcatcgaagaattgtgaaagaaaggaagaaaggggggaaggaaagaagtaagaaaggagaaaaagagaagatgctatatccaccagctacatttactctaatacttgatgaacatattacataactatcagtataagtgtgttttacctcgtaaatacaaatctcacaccttgtacatgtgcatacctgtgtttctgagcagcacacatgcacctggtatctcacccatctcaaggacagctcctctccatgacttccatatgtgacccctgtgcacacacatacacagtcccgcaaagtcccgggcaacagccccgcctgtgttagtgcaatagctgaggggcatctacttggtgctgttaaagcacacatccaaccttcactccaaccccgtaggattagtacacggattcctggttcctagatccactggtaacgcagggagaggcagaggtgattcaggcggcgcccctgacgactatttccagagatcctctcccctgccccattccagcccagtcactctgagagcgcgagggacaggccaggccgaggcttcttcgtacagtcacacccgtttctgggctgactttcccaaagcctcagagcagctctccccaccctaccccgtccagccccctcgccgtctcgcccctccccagccccgagctagaagttcagcctcaagacggcagcaaacggcagagcaaaggagtcgttttctttcacctgaaagccgcgaggaggcttggagcgcctttcctcgctggggcccgagcttcctgggctttggccgggtgcgggcagaccccaccggggtcctcgtcatctcccagcccagcccgcagagcgagtaccggcagatttcaagggcgcgtgagcctggctgtcggctgggcccctgaggctcgctgggcgggggcaggccggtccaggctgtgcggggcgtttacaaaaagtgacttggagatgaactcgcccgtgcgcggctggccgccccgctataggggcgaaggcgcctgacgcaagcggaactcggtggagcccatacgaatcagaacagagcgaggctcctggcgcactagggactccaggaggcagctccgccagagacgcgggtcgtgcttcgggaaaccggggggcggggggaggggaagagcgcagaaaagaaaacccaccaaggcggggactggcctgagcggggaggggcggcgaggccggagcccctctctgttgggcggactccccatggc

SEQ ID NO: 30682 - DNA, 2300 bp, Homo sapien
gggtgtgggagtgcgcacctgtagtcccagttacttgggaggctgaggcaaaggatctcttgagcccactcattgtgccactgcactccatccagggtgacagaatgagaccctgtctccaataaataaacaaataaagaaataaataaagaacaaatatcacaatcatatgatggatactggaatctttagaagaaatttactacacatatttatgtcatctcgaaaataaagttgagaaaaaaactggagaatatgaggtagttatgtaaatttaattgtccagaaaacaacataaacattgcttatttatatctatacatatatatatgtatatgtagctttcatatattgactagaatgatatccatcaactttgtgtcatgatgtgaatcccctgggaatgggggagaagagtggggatcaaaggatatgacaacattatctgtaatatttcctttcctttatagttaaaaagacattaaggaaataatactaagaaataacgactgccaattcagggtgatggactcaagagcatgaaaaaaactctcaaaaataaattagaccaaatgtccatgcggtgaaggtgagtgagtacccctgagaggaaatcaagatgaagcccacactgccctgaaattcaggaatacccattggttaaagtacatagaatatgtcattgtacaagatgctgctggaatgaaagtgtcacaacttcctactttccctcattaaatattgctttcactaatttttaaattgttttttcgttttcttttttttttttttgagatggagtctcactctgttgcccaggctggagtgcaatggcacgatctcggctcattgcaacctctgcctctcaggttcaagcactcctcctgcctcatccctgctagtagctgggattacaggcacacgccaccatgcccggctaattttcgtatttttagtagagacggagtttcgccatgttggccaggctagtctcgaactcctgactgcaggtgatccacacgcctcggcctcccaaagtgctgggattacaggcgtgagccatcgcgcccggcccttaaattcttatttgcagaaacacttccaaaaggtccagtgcattcattacatttgaatgttgtttgtttactatctaatctaatatgcatttatcttgattgtccaggtccaggaaaaggagttaaggagagcaagtggaaaataaaatcagtggtcagaagcacctcagaggatgttgggagaaatcgtataggtaaattcctaactgcaaaaagaaggaaagacaatgatctggattggagagaacggataggtgtatggaagtgataaaaaaaaaggggggaattttaaagaaaactgaagggagctttaagcaagagtaggggtgaaactgaggatacagttggctgaaggtgacaaaggcagaagtaacagctcctgcagcaaaggcaagggatctgaaaatccatgactggttatgtgtggtctactcttcttggtaaaggtgcttaccagaatctgcttttcttttttcatgtccttgcctgccacttaccaaggaattctgccaaaaaaccaaccagccagccagccaaccaaccaacccacccaaacaacagtaatccaactgcccgctgtcgatgaatgaagatgctgcatttccgggctgtggcaagtcctcacagtgagtcttggaggatccacaagaacccgcagccggtggcaagggattgtgggaagcagttcattcctggaacagtcgtctgcgggccttgcacggagggcgtttcgggagcggcgggtgcgcgtggggacctggactccccacgcgcggagagggaggtagaggttggagaggtgagctggggacaggctccagaaggcggaattccgggtcgaagaaggggcctggagagtgtccctctgaactggggttgggggccagagcacagggttctgggatggggccctcccggtaggggctgaacatacttctggcggaggagtagagcccagcggctgagccggctgcggagtccatctggagctccggaaactcggggtccgcgtcctcctcgtaggcctcttcctgggcggcgatctctgggacagatgcgcagaagacttcctgctcaacgacgacgtcctccctgagagcgcccaggaaaacgtccacttccagcccagcagacgagtcgtcctgcgctcctgagcgttcgtcgacagagctcaggaggacctctgggatcaggatgagggtgtgtccatcgagagacactcgc

SEQ ID NO: 30683 - DNA, 2300 bp, Homo sapien
caggactggcagggcatggtggctcacgcctgtaatcccagcactttgggaggccgaggcgggtggatcacctgaggtcaggagttcgaaaccagcctggccaacaaggtgaaaccccctctctattaaaaatacaaaaattagacgggcatggtggtaagtccctgtaatcccagctacttgggaggctgaggcaggaaaatcacttgaacccgggaggcggaggttgcagtgagctgagatcgcgccattgcactccagcctgggggacaagagcaagactttgtctcaaaaaaaaaaaaaaaaaaaactcagggctgggcacggtgtaaccgcagcacccagcactttaggaggccgaggcaggcggatcacttgaggtcaggagtttgacactacactggccaacatgatgaaacctcgtctctactaaaaatacaaaaattagccaggcgtggtggcaagtgcctgtactgccagctactcgggaggctgaggcaggataatggcttgaacccgggaggcggaagttgcagtgagccaagatcgtgccacttaactcaaacctaggcgacagagtgagactccgtctcaaaaaaaaaagctcaggtcagatgcagtgactcacacctgtaatcccagcactttgagaggccgatgagggaggatcgcttgagcccaagagttcaagaccagcctaggcaacatggcaaaaccctgcctctactaaaaatacaaaaaaaaatagccagtatggtggcacaggcctgtagtcccagctactccggaggctgaggtgggaggatcaccagagcctgggaggccaagactgcagtgagctgagattgcaccactgcactccagcctgggagacagagtcagactctgtcaaaaaaaaaaaaaaaattcaagaatcatggaaatataagtgttcaatttaaaaattaattttatacggccaggcgcggtagctcacgcctgtaatcccagcactttgggaggctgaggcgggcagatcacgcggtcaggagatcgagaccatcctggctaacacggtgaaaccccgtctctactaaaaatacaaaaaaaattagccgggcgcggtggtgggcgcctgtagtcccagctattcgggaggctgaggcaggagaatggcgtgaactcaggaggtggagcttgcagtgagccgagatcgcgccactgcactccagcctgggcgacagagcgagactctgtctcaaaaaaaaaaaaaaaaagaaaaaaaaataattttattaatattgttttaaattttaatatgattaataattttataactttttaactttcaggatgaaactattcacaaatgtttcactttttttttttttttttttagacagggtctcactctgttgcccaggctggagtgcagtggcaccaccacggttcactccagctttgacctcccgggctccatcgatcttgccatctcagcctcccaaatagctgggaccacaggtacgcaccaccacgccaggctaatttttgaatttttaaatttttcatagggaccgagtctcaccatgttgcccagagtggtcttgaactcctgggctcaagcgatcagccttcctcagcctcccaaagtgctgggattacaagcgtgagccaccactcccagcttcactcagaattttaaaatcaattttcccaagtagaaatctgtattttctgaatactcctaaaatgaaataatttagtagcattaaaggaattgtatgtagcatttggatgggtcggagagatctgagtggtcttttctctagaatccctgaaatcacaagaaaacatgagttctaaaggcgagccatctttgaaattctattacagttgttatcattttttctgaataagttatactgatcattctgccccctagaggcctgtaagagtatttccccagcgtgtccgaccaattatagccacggatactggacagcacggatacctccgcctctagagcgggtcctccagggggcggagcattgcgtgacattttgcgacttcggttccgctgccgtcatttacaacataattggctttgcagtgcgcatccgggtctgcatcaggaaggcccaagggtccaacgagctaagctgagcccggtggccggcgaggcaccaccagcagcccagactacggtcccccaggaggcgccccgggagctccgaggactcgccccgcgtcgcgcggtcctgcgccccgctcgtcccaaccagcctcccctaccaccgacatctgttacttcaaagaggact

SEQ ID NO: 30684 - DNA, 2300 bp, Homo sapien
cgttccaagaattgtaattcagtcgctctgggatggggcaaataatctgcattttccatgaacctaccagaggatgacagtgccaccaagtgatgacagaccactgtccagcaagagagacttgatttaaatgtaaagactatccaaaggaatgctatgcaaccctaaaaaagaataaattttgtagaaaggggagggagataaataacatgtatgagatttgcttttaaatgcccaagaatattttggaatgataaaatgtaataatggttcccgccaaggtgggatcatcacatgcttagcaaagatgtcaggaaatgctttgttgtcccctgtaagcacttgaaaatattactattccaaaatcagtgctgagtattttctcctattaacactagttgagctacaccttcccttttaccgcctggacacgtgacgtagaggtgcctttcagctgacacaggtcaaaaacgctgacattgtgtaggtctatcaccttaaatggagctggacaagccagaccccgctctggtagttactggctcttgggcaagttggctaacctttctgcatgacattttcatcatccataaattgggctaaaacagatagacctcagagctgtagtttaggtcaaattagataaagttaaccatacttcagctgattgtaacataatagagtcggccctctggatccgcaggtttcgaattcgcagattcaaccaacagaagaccaaaaatattcgggaaaaaaaaggaaaataacacaataaaaaatatatatcactttgggaggccaatgcgggtggatcaaaaggtcaggagatcgagaccatcctggctaacacggtgaaaccccgtctctactaaaaatacaaaaaaattagccgggtgagatggcgggtgcctgtagtcccagctactcgggaggctgaggcaggagaatggcgtgaacccgggaggcggagcttgcagtgagccgagatcctgccactgcactccagcctgggcgacagggcgagactccgtctcaaaaaaaaaaacaaaaaacaaaaaaaacccatatatataaggtcaggcacagtgactcacgcctgtagtcccagcactttgggaggccaaggcgggtggaatgcttgagcccaggagttcgagtccagcctgggcaatatggcaaaaccccgtctccacaaaaaatacaaaaattagccgagtgtggtggcacgtgtttgtaatcccagcttgtcaggaagctgaggtggaagatcacctgagcccaggaggtggtggttgcagtgagcagagattgcaccaaagcactccagcctgggcaacagaatgaaaccccatctcagaaacaaacaaaccatatatatatgaaactctgtgtagcaaccaggggtatagcatttacattgtattaggtactataagtattctagagatgctttaaaatacacggaaggatgtaagtgatatgcaaatgtacaccattttatatgagacttgagcatctgtagattttggtatccatgcgggagtccaggaaccaatcctccagggatatcaagggaagactgtaattactatagtaccaactatcataataaacagataatgcaggacctgccattgtcacgcaggatctcagctttaccctcccttccaagacccctaaaaggatattacatcgatgtacaagataggagaactcaaaaacgcacgccactatccgtcaatagtaacgcgcagggcacttccgggacggggcctgggaatatgggtttaggattcggtgtcctggtttggcactccactagtgttacttgaacctgaatcgctcttcaactccgcgtctgacgtcaacgcaaaggacaagaacttgatactggaagccaggccctagagcggcacagatgctcggccccctagcggcccgtaagagtatttccccagcgtgaccgaccaaccacagccaccgaccaaccacagccaccgctattgggcagcaggtgtacctccgcctctagggcgggtcctccagggggcagaggattgcgtgacattttgcgacttcggttccgctgccgtcatttacaacataattggctttgcagtgcgcatccgggtctgcgtcaggaaggcccaagtttccatcgcgcgaggctgagccacacagcgtgcgaggttcccccagcagcagcaccgactccgatctccgggaggcgcccccagagctccgaggactcgccccgcgtcgcgcggtcctgccgacacctgttacctcaaagaggactt

SEQ ID NO: 30685 - DNA, 2300 bp, Homo sapien
aaaggggagtggggctctcctcttgggacaagggaggggccctctctgagtccctttagttaaactgtgaactcccctcagagcaggtatgatccgttatgagagcctggttggaagacccaggagtggcaggacccaggatggatcagagtgagctgtgggggcacacgctgtgggactggcccctgctgggtgaaagaccctcagagctctgggtagaacctgcaagcaaaagggtatcccagtgatgtaaatcagaccagtgtgcaaaagtagatatcatcaacgtgcatattgagcaactactgtgtgcatctggggagaatgttggtacactgacaggctgtaagcacatgtgaaaagctatgaactgtatcagatagttggcgggtgtggggatgtgcaggaggattccaaggggaggggtggtatgtgggtggaaggggccatagcttagtggtgctctgcagaagctgatttcggtgggggaatcatggaggggcagaaagagtgtgcaaggtcaggagggtgcttgctgtgacccaggaaccagatgtggggagttgggtcaggccagcagcagtgggaaagagaaggtgcgaggaaggaaaggaatttgagaggagcaggaaaccagtcatggttgcctgagcagagggagcaagggtgaggaccaaaaggaaattcccacatgttatgtcaggtgcagggagagaggtagagctgacaggactaggtatgctggcccccaagtgagaggtgggattggagttgctgggagagcttgcttatgggccagaggatgtctggctcatctcagtactgctcatggggcggaatgaatgcgaagtccccccagatggggacaccatgtggcagagtgggaccactctggctttgatgcagtctcgccatacctctctcagctgtgtgacttcaggagcaatccttaacctttctgagcctatatcagctataccatctccctccacctgaccttgagatggcaattacagtggctgtagtccagtttatcaatagaaaggagccatggctggacagacgtggggacatggggcagtcccatttcacaggctggaaaacagaggccctaaaacaacacagctcccttacacagctggcctttggggctgcttggtcctagctctggatcctccacaaggatcctcacactgtggtgctggaagtgcctggtggccttgtggtggccgctcccacctccctatcagctgttaacctacaaatgccctagtaaggaaaatattttcattcttttataacaccattctcaggactgcttaatcatatttttctttgtctttgaaaacaagctcctgtgtggttttctattttcttgctgctcttctaaggatattctagaactgaaccttgctgtctggcacttcatgcctttttaattgcgtcaccatcctctggctactttagatggggttagggtgggcaggcgctaagcccctccaagtgcctcacaccacacttgacctcacttctattctgggacaaaggtgtcacctcattttgcagaagaaactgatgttcagagaggttaagtatcctgctcaaggtcacacagcctttttgatgagaattcaagccattttgatctccaagccagggataagtctgttaataaacccactctgccctgatctctggcaccagcctgctgtggtgacctcaagcaagtccgttaaagtctctctgccccacgttctctgggtgtgacagcctattgtgaaaacaggagaatgaggataagagtgactgtcaactggctatgtgagccattggtcagttttctgaagggtctgctatatgcccgctgatgctgtggtctccccaaccagattattagcatcctcacaccccttgtatgacttgacccacagaggggctcatcaaagatgtgcttgtgttggattctttttgttattgttattggatcttgatattatatgctgaagccaagttgtgactgatggaagaatctgtagaggtgtttgctgaaagctaagggactgcatgggtgggtgggtgggaaggggagtttcttcacagaaaggaagaagaggaacacgttgctgtgtgctcgtggcacgtggcctgttgggtcctttcgcagtcctttgaagcagttgcttttactgtcccctgttttatagaagaggaaacagccaaggtgacttaagggcagagcgccagcaggtatggagcctgaatttaaatgcaggtctgcatactgcaagcacctgggttct

SEQ ID NO: 30686 - DNA, 2300 bp, Homo sapien
ctcactcatcagtgagcacattgctgaaaaaggctgcttcagcccaaaccctaaatacttagttattcacttcaagcttccaccgtcgactattctatgtctcatagtttgaattattgagaaaaaatctgcttggtgcctggtcatctggggtaggctgaagaatgcccccatacttcctcccaagtataactgcactctaatccatggaacttgtggatgttaccttatatggaaacatggtctttgcagatgtgattaagttaaagattttaaaatggggattatcttggattatcagggtgggtcagtgattatgcaatcacatacatccttataagaagaaaacagaggaagatttggcacaaatagaagaagagaagctgatgtgaagatggaggcagagattgaaatgatgcagccacaggcaaaggaatgtttacagtcatcagaaactggaagagacaaggggcagattcttctccagagatagactctaaggggagcagagctcccttgatttcagctcagtaatactgatttcagatttctcatgcggaattgtgaaagaatacatttttgttattttaaaccataatatttgtggtagtttgttatagcagccacaggaaactaatgctaatacagcagccaatggattcattcatcctgcactaagtgtccaatcagctgtgtccaggaggatgtttacaggaaaaacatagccactgaggcctgctccctcagctatgggaagaaagtagagggttcattttcagagaaaaggcatgggctgggagacacctgcattcatcctgccactagtctctgacacctgctatcatgtaggtgtaagcattgggaagtgcagggcagcagacttgcctaaataggcaccaagcctagtgctctcccttcccctcccaaatagggaatgagttcataaacagcactgttaatattaatgctaagttgggggaaaatagctgaggctggaaggtgagtctattcatccagctaagtcaaacaagagtttactaacaccctgttttcccaggccttgggataagtgcttagcacaggcaccaatctatagtctagagaaggataagacctgcacatcctggatagctggaaaaaatgtaaagaatcatttaatcattcattcatttattcaacaaaagtttgctgtgcacgtagatgtactaggctaggtgatattgcaataaaatatgtagagtcactgtgttcatggggtgagaaaaagaaataagcagataaagagcaaaataacagattataaaatgggctataaaggaaaggaataagtgttgagacagagaatcaggtgtatgaattggcagtggcagtggtggtggtggtaatcagggcttggagtcaggagttagatttagggtgcatgtgagcagtgtggatggagaaatttaagaagtagttggatttaaacctgaggatgggggagaaggtttgggcaggaagtggaatacataaattatgtatttatttgagacaagagtctcactctgtcacccaggctagagtgtttgtttgtttgtttatttgagatggagtcttgctttgttgctcaggctggagtgcaatggcacgatcttggctcaatgcaacctttgcctcctcggttcaagcgattctcctggtacaggcgcccgccaccatgcttggctaatttttatatttttagtagagacgggggtttcaccatgttggccaggctaatctcgaactcctgacctcaggtgatccgcccgccttggcctcccagactgctgggattacaggcgtgagccacggcgcctggccggaaatttgttatttagaacgatggaaacgggtaggaaaaagagcatatagggaaaaaggtgtaagttttaactttatgcatagggaaggacataaacaccgtctacttgtgaataagtagtttagaagaaacaatctataagggcccggaagacttccggccctttccgcctttaactagactacatttcccagagtgctgcaagaactgggtgtgactcggaatccctcccaaccacttccggcgcaagtggcttctgataatcatggcgcccctcggaacaactgtattgctgtggagcctcttgaggagttctccgggcgtggaacgggtctgtttccgggctcgaatccagccctggcacggtggcctgctccaaccgctaccttgctctttcgagatggggctgccacgccgccggttcagctccgaggccggtaagtgaccttccggactt

SEQ ID NO: 30687 - DNA, 2300 bp, Homo sapien
atttctcatgcggaattgtgaaagaatacatttttgttattttaaaccataatatttgtggtagtttgttatagcagccacaggaaactaatgctaatacagcagccaatggattcattcatcctgcactaagtgtccaatcagctgtgtccaggaggatgtttacaggaaaaacatagccactgaggcctgctccctcagctatgggaagaaagtagagggttcattttcagagaaaaggcatgggctgggagacacctgcattcatcctgccactagtctctgacacctgctatcatgtaggtgtaagcattgggaagtgcagggcagcagacttgcctaaataggcaccaagcctagtgctctcccttcccctcccaaatagggaatgagttcataaacagcactgttaatattaatgctaagttgggggaaaatagctgaggctggaaggtgagtctattcatccagctaagtcaaacaagagtttactaacaccctgttttcccaggccttgggataagtgcttagcacaggcaccaatctatagtctagagaaggataagacctgcacatcctggatagctggaaaaaatgtaaagaatcatttaatcattcattcatttattcaacaaaagtttgctgtgcacgtagatgtactaggctaggtgatattgcaataaaatatgtagagtcactgtgttcatggggtgagaaaaagaaataagcagataaagagcaaaataacagattataaaatgggctataaaggaaaggaataagtgttgagacagagaatcaggtgtatgaattggcagtggcagtggtggtggtggtaatcagggcttggagtcaggagttagatttagggtgcatgtgagcagtgtggatggagaaatttaagaagtagttggatttaaacctgaggatgggggagaaggtttgggcaggaagtggaatacataaattatgtatttatttgagacaagagtctcactctgtcacccaggctagagtgtttgtttgtttgtttatttgagatggagtcttgctttgttgctcaggctggagtgcaatggcacgatcttggctcaatgcaacctttgcctcctcggttcaagcgattctcctggtacaggcgcccgccaccatgcttggctaatttttatatttttagtagagacgggggtttcaccatgttggccaggctaatctcgaactcctgacctcaggtgatccgcccgccttggcctcccagactgctgggattacaggcgtgagccacggcgcctggccggaaatttgttatttagaacgatggaaacgggtaggaaaaagagcatatagggaaaaaggtgtaagttttaactttatgcatagggaaggacataaacaccgtctacttgtgaataagtagtttagaagaaacaatctataagggcccggaagacttccggccctttccgcctttaactagactacatttcccagagtgctgcaagaactgggtgtgactcggaatccctcccaaccacttccggcgcaagtggcttctgataatcatggcgcccctcggaacaactgtattgctgtggagcctcttgaggagttctccgggcgtggaacgggtctgtttccgggctcgaatccagccctggcacggtggcctgctccaaccgctaccttgctctttcgagatggggctgccacgccgccggttcagctccgaggccggtaagtgaccttccggactttcgctggggcgttcttctgggagacgtagatcctgtttctggcaggcgaaaaccacgcgatagcccccgcgacacgtatcctagcgcttcctcagattcagctgtcttccttctgtacctgtagagtttgtcatcacctgcatatctgttcattcgttcactcactcaactacagtgcctgagttccgctccgtgcagagcactgtgctaagctctgtgggatatggcaaactaagactgacacagacatttccctgtgggaactcatgtccatggggaattggcagtgcagtgtgacccgggttgttataggggacgcacacaggagaggcactcaaactaggttggaaggtcagggaagggttcctggcaaatatgaccaaagctgagatctggttagccatgctaaggagaaagcaagaagcttctcaagcataggggacagtagcagatgtccagaaatgagactgagcacagatatttgggaacccattttggaggtaggattgataaggcttgattaaggctttggatatgagtttaaag

SEQ ID NO: 30688 - DNA, 2300 bp, Homo sapien
ggcagcacctagtatagtgctttgtatatagtacacattcagtatgtaatggttaaaagagtgaatttacagtctacaattgcaggacttaattttggctaattgcagtggaaaacatgagaaaagatatagtccaagtaagaatgacacttgagggttcaggcccgcaacaccagctaggtagacccttaggtggcccagtggtatacaaagatttaagcattcccagctgagccccttgacaatagagatacatcattttattttgtatcacttagtactgtgccaaatccaaaaatactctctcaagtgcaagagtattcaggagttagaaatattgaaagttccactattcaagcaaattaggtatagttcatataattttttcaactcaggatcctcagtcactccatagagtaagcaaagtatgcaattactagaattattagtctcaatttacataagatcacactgctggcactaaactccagttccagactcttttttccactattgaatgccacagaaacataaaaaaaaaaaaaatggaaggatctttagaaaccatgtagctggattttttttaagatgatgaaaactgaggcccatgaagagagtcacattagctcaaggctcctactaaagccaaataatttcgtgcaaaatcatctccctctgattatcattatctacacacacaaatacataatttttctttttgcctttctgaaaatctggaggtctgaaaagactttaagatttctctcaagttaaaaatacacgtttgtacgtgtaaccagagggcaagttttctatggtccacatgttttcttaaaaaaaaaaaaaaaaaggaaatacaggagatgtgcagtgcgtgtgacaggcaaatgttctcgaactttattgtgtagtgtaacccctatggcacaggcccttagaattcagccacattaatgaagagatatttttatgtagtagaaagagcacaaactttgaggtgttttgttttgagacagagtcttgctctgttgcccaggctggagtgcagtggcgcgatctcagctcactgcaacctccacctcctgggttctaagcgattctcctgtcagcctctggaacagcttggattacaggcgcccgccaccacgccaggctaattttgtatttttaatagagacggggtttcaccatgttggccaggctggtctcgaactcctgacctcaggtgatccacccgtttcggcctcccaaagtgctgggattacaggcgtgagccaccgcgcccggcccaactttgaggttttatctgccacttactatgcagtcttggctagaacacttaacttctttgagcccgagtttcctcatcattaaatggagataattcaggtttgatgtgaagatttgagaagaaggtatgtctgacacactgccgaagatcgataaatatttgttgaatgaataacacagccagccgaagctcaacaaaagacacatacacaaacacacccacacggttgggtagttgccgtctcccggggagctccagaagtgtaagctctcagccctccctctgacttcagaagcctgaagctactaagcccgcagcccggtgcgtctcttcgcagccttaatcagtgcccgggcaaaggcctgcagagaattctctgggcctcgcaccaggccccaagaacacactggagactcgtttcgccttctccctcgccgtttcccccctccagggccagagtccgaggaagcccgatagcggttctcggcctccgaaacacaactacaacactggggagcttgccctgcagttagcgtccagcggggattaggcacttcgttttcctcatcgtttcaatctctatcttctggtcggggtccaagctcagcggcaccacgtcacggcccttagtggtctaggccacacccctccttcccgacagcctcaagtccactaccagcggtctggaaggccacgttgcctaggaaactggggcggggcttgggaaacgacggccctgcgcgcagtttgcgcaggcgctccggccctggcctctgactatcgcgagaatcggctcccggaagttccacgtcagtcagtctgacggtcagtggatcggtgggtttatctcaaggcctgagtagccggtaacaaacgagggttcccgggattggaccgacgcagccatggtaggtccagatcccgtagaagggagcggggtcccataggttacggccgattcctggagcttctggactgagggccgcggtaagcagtggtctgggctccc

SEQ ID NO: 30689 - DNA, 2300 bp, Homo sapien
tatagtctgtacctgattttattaattgaaactcctggaaatctaatttcactgtatgtttcttctgatgatgctcttggtgggttacaaagagcatcagtttgtatgtgtttgtcagtgtgtgttacaattttggattatgagctcatatttggcatggctttatcacacagaattctggttgatctggttttgaaggtgtgttcctcttcacagcttttacatttacttcttcctggcagcttaaaaatgttaacaagcacaggacatttattattttaatattttagctaacagaaaggataaattcaaaccccaaaccaaggtcagagcagaacagaacttttttttttaacctatgtagatcccatgccaagtagataaacttttttcttgtctgttgctgcagattttgactaatttacaccctcaatgagggagtagcccttcaagtgcctggctttatatagacatctcagtttcaaatttgcgtcttacaccaagacaaattcctcccccctcaatgcccatgaaaacccaagcccctggcttagtgcaattagcaactcctgtcttgcccccagccccttcccctaccaggccagcttctcattacacattcttacaggagaggcctacggggtaggaggcctcagttgcaggcaggagggacggtggaggccctggaatttgacctgggagggactatctacttctccagcccaggaggctgaatgctcagtctacagcagcttctggctggacttcacaggatgaatctccaaggtttcttatctgtctactccttcctccactcattttccatttgtggtaaagttatttctttctcaccccttacctttccccattggccttttgacaacagctgggccatttttcactctgtcttcctaactccagtgtatttactgaaagataaatgtgctgttttatatccctcgtaccacacacagagtcatttacttagatttcacagcacaaggatacatatatgagagctgcagtgtcatcatcaaaataggtctcactttgggaactcatggtatatctgtctcaggccacacctccattcttcacagtcacttctcagacaccacatcttggaatagagtgtcagagcaataaactaaacccatttccattgggacagcccatttggagaacattcctgaaccaagggtccttgtccagctatgcccccactttgatccaggtgatcctcagctttccccttggatcttaaaacaacattccactacccctctgcctccatctggactccctccaggctcagcttgcttttagcagaatcatgttcccagaaaacacttttctcatgtctcaccctgctgctaggaagtccacagggcaccttgcttccacagggaagcaagagagatttggtctcttaagtcaggctccaaacctctttcaaagctgacctagcacactgttgaagaaaaggatttggagcccaacagatctgagtttgaatcctggctcaaccacttacaagttgtgattagacatgtgatttaacctccatgatcctttctcatctgtaaaataaggatggttaaacataactcacagagctcttgtaagctgaaacaagatgaagtatgcatgctgcctggaacagagtagagtagagctccacaggtgtgaattctgtcttttcagtttcaccagccttgctatgagtgctggattcatggctgatagactccaggcttgaggcctgggtactagtgacccatagtacatgtggggtagaccctggatgtttgttttcttccattactggatgaaatgttctgtgtgggacaaggggcccatggggacccagccagccaaaaatgagctgctctagggccctgcttatggtgcaggacactaggacacccacgcctggccataccaggactttgttcgtgggttacctatagtctcgctgaactttacaaagaaaagttcttttgagttgtgcttctgccctttgaacctcttatcttcagagtcacaaacctggcccactaggctataaaagaagctcattccagtgtattctccctgcagcctgctccttgccatccaccacaaaccctcaccgaaccagtggccaccaccatgacaagggaccagaatggaacctgggagatggagagtaatgaaaactttgagggctacatgaaggccctgggtaaggaggagactggggatggggagggtagctgttgttgggagtactgtggtctggccctccagacagtgctgct

SEQ ID NO: 30690 - DNA, 2300 bp, Homo sapien
catctcaggtgattcagcataaagggagaagtttggggaggatgagaaatccggctagctgggctggaggcatcagagagcagggagaagagtttagactagttggaagtgaccaaggaatggccagttcactgcttaagcctttgaccaatgctccattctggtaagtcaggataacaagaaagcccaaagcatggctggccctggtgggatgccttacagaacctgggccaggccccatccatccttgcgaggtgtcttattgcaccttcaggttggaaggactgggataggttgccctgagtgcccagccaagatgagccctgggctggctagggagggacacagagccagtgcttgtgtgaacaactgatgacctaaccatccagagccagacaaagaagcagtgggaaacaagggcctagagctggctctcaaccagggctggtttacccagcacccacaccccagtgcctttgacaatgtctggcgacatctttgtgtctgggtgccactgggatctaatgggtagaggccagggatgccactaaatatcctacagtacacaggacaggctcctgtaacaaagacttatgtggcctagaatgtcagtagcacagagattaagaaacaaatcctagtctagggaaagagggtgagaagcgctgaaatccaagttgctgcctgggaggaagctgtctctaccctgaggaagaggctccttttcctaattcagcctgcactgtgagaacacatgtgagccccagggaggcaccctggggaaggtggtgctagaggggaagaaaatgttatctgctgtcacttaggctgtgatttgtgcaaaaagcgatttaaaagaggtagtcaaaaagagggtcaaaaagtcagcccatgtgattatgtcatctacttggtggcaaatgcagttaaaccacaatgacatacccacgcaggtgacaaaggagatgtgatcaaagattttcattgcagtactgcttttaatagtgaaagatcagaaacaatatagtttgtccatcaggggacaagctggataagcaatggaatactccgtaaaataatggggatactttctatgtacagctatggaaaagtctccagaatatattaagtgaataaagcaaagtccagaacaccgtggagtacagtgctgccattaggtgaaacgggaggaaacattaataaacagtatattgcttacatttgcataaagcagcagtggatctcaaagttgattgtgcatcagaatcacccagaaggcttttttagccacatgcacttcaaataacatcaactattttacttatttatttatttatttattgagccagagtctcactctgtcgcccaggctggagtgtagtggcacgatctcggctcactacaacctcctcctcccgggttcaagctattctcctgcctcagcctcccgagtagttgggactacaggcgcccgcgaccacgcccggctaattttttgtatttttagtagagacgaggttttaccgtgttgcccaggctggtgtcgaattcctgacctcaggtgatccgcccgcctcggcctcccaaagtgctgggattacaggcgtgagccgccgtgcccggcatcctttcttttattttcgggagagacgtggaaagtgccccaattttctcgcccgtagttgaacctcccagctttcctgaccccagccaccaccggcgcgaggctttagacaaaggcctgtaagtggcctctttccttaatcacgccagcacaaaccccaggagattgtttcccaactcccgagtggctgctgagtgtgagaagttaatggcgtttgaaggaaatccccagcagccgaagagttcggccaacaaagcaaacgtcccgtctccggtctcctcttcctttgtaggggaaacgaactgaacgtctgaaacgaaggtggcgcggcctggacaaacctgacccttcgacatcccccgcccctgcgcccgccctcgctaagcggggaggagcgaccgctacaatggatcctcccgcaggctttgtgcgcgctgggaatccagctgtcgccgccccgcagagccccctgtccccggagggcgctcatttccgggccgcccaccacccgcgtagcaccggcagccgctgtcccggcagtctccagccgtcccgcccgcttgtggccaactggctccagtcactccccgaaatgccagtcgacttcactgggtactggaagatgttggtcaacgagaatttcgaggagtacctgcgcgccctcggtaagcgctgc

SEQ ID NO: 30691 - DNA, 2300 bp, Homo sapien
tctatagaataagctgtcttttttaattgtacaattcctgggttctgtaaacccagacttttatgtgaaatagaaaaaaaagactataaatctagaaacagttactctggattattttttcttctggaatttctatttgtattcagcataagtaataaaactgtttaaaaccccaagccagccctgcatgttagggcagtgggtcactagcttgtgtctgcagactttaagggggaattgccagagaagcaggaagtcccacctctcctggctgttgggattgtgagtatggcctgcctcatcactaatgacaaccagctctgctggaagggattgcaaattgctgtgtcttttgtctatttagaaccactaggattggcaggaaatgggaggcaaagggacaaggtggaatgactgacaggcctgttcataatgtgttttagttttcatttttaacttatcttcaaaatcacttgggagaaaaagatttacctttttagtagaggtaatcatttagtttttatatcctggttcttattacttaccttttactgtggaaagaagcagccagaagcattcagcagttacagtgttgcttcagaacctgttgccaaattaaaaggaaagccattataaaataattgttatgacacatgctcttctttattttttaatgacccattagtataaacaaagacccttatattgaaaattatataaggaataaattgacacctagatcatccttttagaatgagtcatgcagtcatttctcatttatctaggctaagagagggggaatagaagcaagagaatagatcatccaacaagtaatttagctttaatatgtaggcagaaacagacgcttgctcctccacccagtgagaagcactgtagcctaggacacaggttttagagcaaaatttactagctgaattacttgatataagtgatttagcctccctgagtctcaatttctcacctaataaaatggaaatgacatcacccacttcactaggattccgtgtgaattaaatgagatgatgtaggcaaaacacctggtttatggtaggtacttaataatgttagctaccttccctgaatccctaatgctggcccataatttgtcctcaaaacagataagccattcatggataaataggagttgaccatagtactatttacgattacttgtgcttctgctgcaaaatacaggagtgagctaagattgtactgaacgcattcattttctttttaattttttttttttgagatagggtctcaaaaaaagctccatggtgattccaatacatggctagcccaccacttcagctgccaagtttattaattaagctctgttgcccaggctggagtgcagtggcatgatctcggctcactgcaacctccacctcctgggttcaagcaattctcctgcctcagcctcccaagtagctgggattacaggcacacaccaccatgcccagctaattttttgtatttttagtagagacgggggttcaccatgttggccaggctggtctccaactccgacctcaggcgatccacctacctcagcctcccaaagtgctgggattacaggcatgagtcaccacaccaggcctctttttaattttttttaaataactcctttattcttgtgttgctcagtgttagtttgcacacgggaatcacccagggagcttttaaaagtacccatgtcattggtctgggttggggcatcaggatttttaaaagctacctggtgattctaatatatggctagctcacagcttcagctgccaagtatatgaattaagcttatgatcagtaccaagatgcatccaaaccagtggtctcaactctggctgcagaaatcacttaataagcttttttaaatgctcacctcctcccacccaccccagagattttgatttgtcaggggtgggctctaaacattgctattttcataaaggttcccatatgtattttgtgcaaccaaaattgagaatcactgttacagtcaacacagttttatcaaatgctgattaagatttttaaaattattatttggagtaagtttcatctccaaaatgtaccaactgcatttgtgtttgattactaacactttccgaaaattatcaaaatcaaagttttttaagactgaaaatccagttataattgtaaagtcaggtggttttagaagcatggtagaaatccaccccatcttttgctccatttagtgtcctcttgataaagtccgtagtgaatctgcatcatagtgacatagtaacaaacatctc

SEQ ID NO: 30692 - DNA, 2300 bp, Homo sapien
gcctctccaaaatggatttctcagccattgcgtcttcaccgcttaggttaggtaaagcttggctattatatgaggttcttaccttccagcacaaggggacgctacttttttaaaaaaatatttttatttccataggttattagggaactggtggtatttggttacatgagtaagttccttagaggagatttgtaagattttggtatacccatcacccgagcagtatacactgaacccaatttgtagtcttttatctctcactcccttcccattcttcccctctgagtccccaaagtccactgtgtcattcttatgtctttgcatcctcatagcatagctcccacttatgagaatataccatgtttggttttccattcccgagttacttcacttagaataacactctccaatctcatccagttgctgtgaatgccattaattcattccttttttcttgcctaggaaaccaggcttcctcctagaccaagctttagtcttcactacctcaggcagagaaagcttcccttgcatgaggaagtcattgcccagcctcttctctgctctctgtgtgcagcttctccctccctggcctagggccctgacccagaatgactcttcagcccacgattttaatcgaaggcctctaatcaacctgtggtactacatgctacacaagattctcagaaatccctaagctttctcatgagcctcccaccctgctgggaaataagctgacttatcaattaaagaatatccaaagatgttaagccacttaatcctccccaaaactcagtgcggtaggggttgttacctcccattatacgaaaggaaagtgaggcttgggaagtaaagagacttgtccaagatcaccttctggagccacattttacaccacaggtaagagaaaagggatccgagagggcacggacactgtgtcttcagactgagtggggaagtaccatttacctgggtacttattgggtgcaagttgcatgcccccggtgctaatacacaagggacaaatttatgggcctcctaaaactgtggacagtgcacccgtccagccaacttcatgggtgcaccgtgaggctctggtgatgtggacaggcttataaaacactctccatactaagatgaggttgtgttcctgtgtctaggaaacgctggaaattaagtgtacagcaatcaaaaaaccttgacatcatccttgatgtctctctttttcgcacactccaattcactccattaggaaactgtattggcagaatctagtgaatcttgtccttcaaggcctctctctgcaaggctcccatgagccctgggggcttatggagagttctgggtgggcagaggaagccagactgcgttagggaagcaaatttgggacctaaatttcctaagaaggttttaggggatagggaccccaatctctaagaccccaggattctgttaagatttattttctcattccaaataaatgttcactggcaagccctaattctgtcttctctttcttaagcagccctcccttccttctccccacacaactgtgtatgcttcaggccccagaaatccttccctgctttgaggtctggcgtttaccagggcagggcttgagaatagaggtgtaaatttgtcagaaggaaacaggggccgcgcagtaagagagtagatcctcatataacatggcagaaagtcaatggataaatcaagaaatcgctatgtaagtttctttttttatttttttattttatttatttattttttttttgcgacaagcgggtgaccactagaagaaattaacggaggaattgttaaaaagagctgtgatgggagggagaagtggcctgttgctttcattataagcaaatctagataattttattttctaataagtaagtgggcgttactttcatgtatttttttaaaagaaaattaaataaaaatacaaaacaaacagaatacaaaacaggagaataaaaaagcaaacacgcacgcaacacaaaagagccttggcggttgggagccagcgggcgggggcgggggcaggggagagggcggggcttaggaccctgggcggggccagggccgggtctccttagggcccgccccagcgaaggggcggggcgcagatctgtttccctcagactccatctgcccggggccgctaagggagcgcaaggtcaagttcgccttggccccgcctccagctcaggtactaggggatctagacctgaggctgcccgggccggaggcagccttgagtcccgagaccaaacgtcgtttccctctcggacctc

SEQ ID NO: 30693 - DNA, 2300 bp, Homo sapien
gactatcatttgaatcagtagactgagtaaagaaatcaccctcgtgaatgtgggtgagtatcctctaatctactgagggctggaacagaccaaaaatccagaggaagggcaaattatctctcttcttgagctgggacatccatcttctcctgccctcagacatcagagtttctgattcttggacctttagaaacttacactagcatctctcctgcctgccccagttttcaggccttcagcttcaaacctgaagttacaccatcagctgccctggttttcaggtctttggactcagactgaattacaccatgggctttcctggctctccagcttgcagatggcagatgtgggatttcttagcctccataattatgtgagctaattcccttaataaatgtcctcgtctatctatctatctatctatcatctatctatctatccatcctattggttctgtttccctgaagaacccagactaatataacctcaattcaaccataagctccttgaaggcaggaaccatgtctttgtaagcagaacaggaatggtgctgcataggagattgagagaccagaatcctaggactaatttgtattatcagactgtgctagactgaaagttactgataactacagtggtgtggccagataggttttttaattttcttataaaataagaaggctggaagtaggcagttcagagctggtacagcagctccacggtgtatttaacatgtcagactcctattcattcattcagccatctttagtaggtggctttggagttcacgcttggagttcacttctaagattcataatggctccttggcctctgggcttatacccacattctaagccaaaaggaaaaaggaggagagggacagaaagcttgcaaagcaaaatcttcctactaatcccaggtggactcctgtttgcttcttgtggccatctctagctgcacaggagtctaccgctctaaactgaattggggcttcattgtactctagcttctctgcatccctgccttcctcctaacagcattctttgggtttccgtttgggaaattgcccctctccactatgagagtcttagtaggagagtaaattcagatgctttcctttcaacttctgcagttgaaggagtttgccaacacctttcccaggacaaataggagagtgtatactaatgttggccaatctgagggcctctcccaagactttggctagtgtgcaagtgaaacaagggcatagaaagtgtctagagtttaatcatctatctctgcagcagcttcctgaccagaccatttctactaagagattattcccagggttttcactttctagcttttcagagctactttctccctatccgtttctaagcctggatctccaaactttctgtaagttctgaaggcccaatcctgccaataaactcccatctactgggtcacagagactgtttcaattgcttctaacaaaaaagtcctgactaatactccaaacccaccactggtcaggcgtgatctcgagaaaatcctctaacctctctgggtactctctactgatcacaaaaggatgggttattcctaaaggcttttccattatgactttgaccacctccagaaggccctctttgtaccaagtaggcccaaatggacatcaaagcctggattagggttttagcaataggggtaaaatataaaagctccattaggaacggcagctgacagcactgggatgctgctactggagcactccttgggcaattaacccaggtaagcaccaaccaaaacccactccactgcttttggcaccagagtgcaatgttttcattagcaaacaggcactatttagtgtcttcttgccataattataaaggtccacttataattctgtgctttcaactgttcttgattataagacttcttaattgtgccaccataaaacatgttttcagggggaatctgttttccactttaaattctctcctgcagcaatgtatttgccttacaaaacttcagaataaagggtagaggcttctgtaaattcatagtctgtaccttcaaggaaaaattactttgttagaatagcaaagtggccccagtttggccttattttctagcaaaaactcattgcttagctgcatttaataatccatggaacatttctattaacttcagtgtgtgaattgtgtgactgcagaatgggtaaaaaaaaagtgagaatcaggaatacaaaatatgcagaaaatgaaaataagtgagatgttaaatatttgatcaaggcctttattttcaggtaa

SEQ ID NO: 30694 - DNA, 2300 bp, Homo sapien
caattttgtgcctgttggtaactggcccaccccctagtgtttttctttgctgtgttctttcctggctatctctccatggagatgcttcctaataagctacatttccccctgtttctcattatttggtctgaatttgaaacttcacataaaattattaggaccaatcagtgatcttaacaaagcccagtataatgacatcaaagaacagtgcaggtaagtcagtaagataggtctacttattagagaaaatgaagggaggagggcagatatgtagttgggtggagcataaatggaagaaaatgagacaaatttacatttctcttctattttctggcttttttattttccctgggtcagctaccacctttccatgccatcttttctagattctgaaaccaacatctgacaaaggcaaggtcctggtgtcggcctgggacatttactagatttttgaccctgaacaaggaagttacctaacttccctgagcctctatttcatcatgtgtgaaatgagaataatagcgcacatgttgatttgtgggctaaaggagacctgaaggtaaagagccccacatgggtctgagccccatgcagccaccatgattcactgctgtccccaagcacatcctggtgcctgaaatcctgaagagttggctttcaccactgcagaggctctgagtgagctgccagggcagcagagggaggctgagctgcaggagtgctgttaatggattttatggctttgttgagtacctcaaactacagttattaattagaggatgctgtttaggcactcttgcaatatatacattttgttaattgatttgtataggctcatagctagcaacataaagaatgtgcaggaccataacacttacaagggattgtaattgcctttgctgccctctctggctccccaagcagggaacaaaagctttgaggataggacccactctctcctctgtctttggatctccaacgactaatccagtgctcactgtcagggtgatacagcctgtctagatgctcagcaaacgtcttgaatcaatgactaaataaataatattgtttgtttctgtatttccatatctactttatttccaaactattcctcataaaccctgcattgtgtgtgatgttggcatttcatttaggtaaatatggtcaaggatttattctgagtccttactgttttttttttttttttttttgagtacctttgtaattttttcacggcctagagatggttgaggatgcaaagatatgcactggctcctgcactcagggaactgacaatactcaacggcacgagattttacaatgcatgacgtcaagtagcctgttcttagagatgcggagtgacaacataaaggtggcaacttcttgcatggcaccataccgcagggaattttaagtttgacaccccgcccccgccactgcagcctcagcaggcccagcaccccaagttttctgatctagctgttctatcagcctctaagagccgcggctgcccctgcttctcggagatgacgcggagccctgccattgccatccaggtccaaggctatctactctgcccgacaacccctagcaccactaggcgctgctctagtgtgcgcctggcgccctccccagaccagtcgacgcagaacgcccagagacccagccaagggcaagacccttagcgacgcccgtcagtcctctccgcccagatatcagttcaaagggcatggcaggtcagggtccctcgcgccaccccagatgaccctcaggcctcgggtggccactttctgggggagccctccatcccttgcggcagcttttccgagagtcggagtggaggcgcggggctggagggctctccggagccgcccaccagggtcctctgggggcccggtcccgactgggcagggggacctggacagggccccggagcgtggagacggctgaggaaagttgggggtcggggccttggggcggggagcgcggaacccggcgccgatgcccgcgttcatgaatatgcacgagccacctccctccctccgtgacgtcacgggccgtcccggggtgagcgcctgagccgctccgggtccgcgccagtgagcgcggctgctgccggcgagctagcggcgcagcggcgggaacccgaggccgagcgccgcggcggcagcgctagaagcgcacccatcgggcacggcgaggcggcccacggtgcggcaggcaccgggaggcgagagccggcgcggacagtaggcggcggctgcagctcgttggcggctgctgcgaggatgctgcctggg

SEQ ID NO: 30695 - DNA, 2300 bp, Homo sapien
taaggagttagcagcagggggtgagaacaggtaagtgtgatgagaggcgtggagcgtggacaaggggctggatggacccacctaagcattgggtgaatttccaggagcatctcgtgagagcactgagtggcaattataaatattaactgagtgcctactatgtgtcaggtgcagtaacagacaaaatctctaggaaatactcatgtaaatgatgccgtcaactctgcccacacttccctttgatacatacaaactacagcatgagcatgaattgggagattttaatctctaccttcacagacaccacaattccagaagcctctcccagagtgaacctgtcatggtgagaagcagagcatctgggttctaaggatacatgctcttcacatagcataaccttctattgctacccaatggatatagacctgatgatctcctccacagatggagggaaaactggctgagttgaacattttcaaacaagtaaactgatttccagcatggcatcttccttgaggaatcttcaaagggtcattttaatggtaggagattttttttttttttgtagtggctgactttggaacccaaaccctaggtgagatgaggctctgatatacaaaagtcaaaaatccaaaacctgggcaaatggcaggtaatacacacaaccactgtccattaaacccatcagagtttatgactgactggtcagtgccatatgaggaaacagcccccatacccctgcccacccaactcaggtcacactttagactcccattatttgaaaatgactgcaagttcctggccctccttcccgtagtgcttgagccctgtctgtgtatagaacagaaggatggaaagaattctgtatttgagcctctgtggagagtcagcggaggccccagacctacccagcaggacaatccagtcttctctggcaggacagttgtcgcctctcacctcagcacccccctccacaaagttggtgattcttctaaaataaacctgcccccactcctgctgcctcagatgaagtcttcgtgccttagcctgagtactattatagtagcagcagaaataataataatgacaatgataacatgatagctaacactgagtgaaccttcgccatgcagcgagcatgctactgcaagctctaatgcattatctcattcagccctcacaactcgctggaaagaggaaacagagtcaaaaaggtcaacttatttgctcatagtcacaaagctagcaaattttgctgccaggtgtcaaattcaatttctgctgacttcaaaacctgtgttctcaaccactgcatcatttggcctcaacaaatatttgtaaaaaagtgtaatgagtggctcatgctccttcttatgggatcaggatctagaactttccccaatcacagccctgatcacattttgtcaacttgctggctctgaactgtgtctgactcaccttcatagagccagcacctagaaggggtcttggcacatggttagtgctcagtagatggctggcaggttaacagatggataggtgtgtgagtgaatccatccatccaaatcaaatcctggctttctccaggaaccctccctgctagtaagagcccccagggtttttccaactttctaaattcctccgacacttttttcttgcatcctatcttgccacatgcagcacttttgtctgtaagttactgatgcctccccaagaaaaccataaataactcaggggctggaacagcatttagcacttcttttcctaagtcacatagctcatggttaggcacagacgtctctgagtaagtacactgagtagttcaccttgacccaggagcagaaaacagatgaggacaccgcatcatgacctgttatcctttctttcctgaccctctgcaggagcctcctctggcatcattgacctcttgccatcccctagcgctgccaccaactggactgcaggactgctggtggacagcagtgagatgatcttcaagtttgacggcaggcagggtgccaaagtccccgatgggattgtgcccaagaacctgaccgatcagttcaccatcaccatgtggatgaaacacggccccagccctggtgtgagagccgagaaggaaaccatcctctgcaactcagacaaaaccggtgagtctctagcccagcccttccacccctcctaccccagcagctgcccattttgtcacaggtggctggacatggacacagccaaggaggatgtggaagaaaagcaggagcctgagaggaaccctgccaatatatattctggtctctggt

SEQ ID NO: 30696 - DNA, 2300 bp, Homo sapien
cctacacatgtacccctgagtttaaaataaaagttgaaggaaaaaaaagagactttggttagcacccagatcaactttatgccagggcaaagatgttactctcatttgcaaatctattcaagatcttcccaggaggttgcctgcacttccaaactggcagcaagaagcgtagtgtgttttcactggaaggtaatcatgacagctcagaaagcacctgctgggcctcctgtcaaaaagtgactgctgactcagggtgctggagtgcaggggagcaggaaatctgaaaagtagcctgtgtcaaagagaccaccctcgtttgaaatttggttgagcaacatttgggcaaatccccaaaacaatcctgaaaaaccatccttgtaatttgtgcttcgagcatggaaatcaagacttgctttgcacccaggatttaatctcatccccggggagagtaagcacacctttattatgcactgatgatgtgcctagcactctagcaccgtgctgcgacttttgcatacataatcagcaggggtttttttctttctttctcaccactgcccttaagcagtgtcaatcagatctccctttccacacctagatgacaccttggcagatctgttagtgtctcaagtcactgttttcatgtacagatgatccctgacttataattgttcaactttacaatggagcaaaaacaatacgtattcagtagagactgtactttgagtactaatataaccattgtttttgactttcaatatagttttcaataaactacatgagatacttaacactttattataaaatggaagctttgtgttagatgatttgcccaattgtaggctaatgtaagtgttctgagcacatggaaggtagactaggctaagctttgatgttcagtagcttaagtgtattaaatacatttttaatttatggtattttcaacttacgatgggcttattggaaaacaaccccattataagttgaggagcatctatattaaaaagtccacttcaattagtctcttatctaattcaaagcttctccccttacccagcctggggctgatttgcaaattccacaaagccccacagaggtagagctgacggtgttgatgtgagaaccagaggttagggcaggaaatccagtctcaacgaagtgggggttgtgcattccctgtgctgtctcctgcaggagcctggaggaatgggacatgccaggaggagatgaggcccccccattcactattactcagggaaatgttcacctcagaccctttcagacttcctttccccactgaggtgctgattgtcttgccagatataccatgaacaaaggggcccagagtaaaaaatgctttggaaaagcctcatttaacagtccatcaggcttctttcagcaggatgcctcagaacagtggttctcaaagtgtggtctctgaaccacagcatcagtatcagctgggaacttgctataaattcactctccagcctcacctcagacccatggaatcagaaactccaggagcagggcttggccatttgtgtttcaataagccctccaggtggttttggtgtggttaagtttgagaacctctgtctcagagactataatatgctaaggtggggaacagagtagaccgtttaccaaatttttggaccacatttgtcctcctgctatgtacctatggctatctcagggaccaaaaaatcctagatgacacatgctgtgaaattcactcaattcattcacacatatgttccaggtacttcccaagcattggggatgtgacagtgaacaaaacagactgtagccagccccttcccactttccagcaaatgccagtctccctcttgccccaccattcttcctacccccatttcaaagcttccctccctctgctgacatatttcttcctgcttcttattttgagcatgaggactcctcttacctgtgagcccccactcaaaaaaaaaaggggggcaaaaaagcaaaaccctctcttaggcccgccaggctttcttcctcctcccaggtttttgcttgcaggacatgccacagaattcatctagggatattttcctcatgaatttcctgaaccagctgctgtctgtcagggccctgggcacagattcagagctgcagaggcacagcctgcctgttgtcggttgtaagtgcccatgtacagagtgagtttaatatttgagcaggccaggaagcacctgtcttaaatttggcaattaggaaagggaatatttctcctcatgtgttccctctctgaacacaataaactgcacaaa

SEQ ID NO: 30697 - DNA, 2300 bp, Homo sapien
aagtgtccaagcgctattataagtgcctttaaatttttactcctattgttgttggaatggtcattactatggatatcttaaacaagtaggataatggcatttgcccccaggcctcagtgaccggcttcagcatcatctgctgcccccattgacattctctttatgctgtcaataccaaagacaggagattcccccaacatgcacacacacacgcctccctcacactctgttagttcacacctttgctctgctctctggctggaaggtccctttccttccctatcccttgattcctggcaaatatccctgccttcagcacctccccaagaaggctgttccaccaccaccattctgacacttccaactgctggtgcttccctcagcacacattttttagcccttggtggtgatttcctgtttattaaaccagaccaggaggaccccgagggctcatccatggccgatttgcctctgggtccctgaacccagcacgctcccttgtacacagtgggaatcaaggaacctgcagatggaagataatacccatggtgagagagaaccatgagaaaatggcagccgtgacacactccctacctcagggagctctcagtcagccacagcgggaggtaggaacaaggacgatatgaccagacctgacaagaagccggcaaaaaacctggaaactgtgggaaggccattgaaataaagatgcacatacagcattgctaattatagaccctgtcttaagcgtatgttattgtgcttttagattttgctgattatacacgaaaccattgtgattgacaagcatttaaaaattaagataaagaaattatttataataatatataatatatacctagtgagagcaaatatatttttgatatcatttaaaaacttaaaagataattatttaaaataatccatctttagtgaattttttaaatttctgttttaataaatgttttataacacacaaagtatatttagtacactttataaataaataaatatacttatttaaattatctctcttcacaagtttttcaataaaggagtgcaagatcaaagccacttgaagacaactagcctatcatcagtgagatggggatagtaatagtacccccttttaatgtctattaggattatatttgcacatgactggcacatagcacatacttcataaataccagtcgccttcttaagatgggattttaatttaggactgccgaactctgcccagcattcaaatactcagacatttctttgggaaatttggagtcatacaattaggcaaggacaacttgactgaccaacttgctaatgtgctcccctgggagtacattaattatattaatttatcaaatattgattattggttatatcatattgacttgattattaatgattcagctccatttgagcaaggtttattaataacaattccatgctagctcctgggttagacattaaggattcaatcataaaaagatagtgcttctgcccttcaggatctcaggtggtcagggagactacgatcacatggagaaagctatgagagcatggtggaaggccacttacctctacccaaatgagagctattgcttattgagcacctacaatgtgcactggacactgttttcaaccatcccaagacccttgcctgccttatagatgaggaaactgagtggtaggtagttcctctaacactatgcagcttctcagtggcagagctggtattcaaatcacaccttttggctacagtattcctgctgttcccactaattcatgctactaattcatcccactaattcatcctcagggatgcctggacatctgagcggtggatgtggtatttgggatcacacagactctgctcctgacccagccttaacctggggtgcaataacagaggaggaaggtgattagcaagggctgttttctgagctgtccttcatgcctgcatttcccatgtctgtcttcctacagaccccaaatcagaagtcttagaggaaatgcttcataacttagatttctgtgacattttggtgatcggaggggacttggacccaaggcaggagtgcttggagctcaaccacagtgagctccaccaacgacacctggatgccactaattctactgcaggctactccatctacggtaaggccacactcagccccctttgccccaagggtgtcctcttagaatgtccttgtccagggagacatgagtgagattgcacctgtgaaggagcactgtgaagccccagggaccagttggagatccttggcctcaagcat

SEQ ID NO: 30698 - DNA, 2300 bp, Homo sapien
ttataataatatataatatatacctagtgagagcaaatatatttttgatatcatttaaaaacttaaaagataattatttaaaataatccatctttagtgaattttttaaatttctgttttaataaatgttttataacacacaaagtatatttagtacactttataaataaataaatatacttatttaaattatctctcttcacaagtttttcaataaaggagtgcaagatcaaagccacttgaagacaactagcctatcatcagtgagatggggatagtaatagtacccccttttaatgtctattaggattatatttgcacatgactggcacatagcacatacttcataaataccagtcgccttcttaagatgggattttaatttaggactgccgaactctgcccagcattcaaatactcagacatttctttgggaaatttggagtcatacaattaggcaaggacaacttgactgaccaacttgctaatgtgctcccctgggagtacattaattatattaatttatcaaatattgattattggttatatcatattgacttgattattaatgattcagctccatttgagcaaggtttattaataacaattccatgctagctcctgggttagacattaaggattcaatcataaaaagatagtgcttctgcccttcaggatctcaggtggtcagggagactacgatcacatggagaaagctatgagagcatggtggaaggccacttacctctacccaaatgagagctattgcttattgagcacctacaatgtgcactggacactgttttcaaccatcccaagacccttgcctgccttatagatgaggaaactgagtggtaggtagttcctctaacactatgcagcttctcagtggcagagctggtattcaaatcacaccttttggctacagtattcctgctgttcccactaattcatgctactaattcatcccactaattcatcctcagggatgcctggacatctgagcggtggatgtggtatttgggatcacacagactctgctcctgacccagccttaacctggggtgcaataacagaggaggaaggtgattagcaagggctgttttctgagctgtccttcatgcctgcatttcccatgtctgtcttcctacagaccccaaatcagaagtcttagaggaaatgcttcataacttagatttctgtgacattttggtgatcggaggggacttggacccaaggcaggagtgcttggagctcaaccacagtgagctccaccaacgacacctggatgccactaattctactgcaggctactccatctacggtaaggccacactcagccccctttgccccaagggtgtcctcttagaatgtccttgtccagggagacatgagtgagattgcacctgtgaaggagcactgtgaagccccagggaccagttggagatccttggcctcaagcatggatttctagaccctcctttggcaagttactccagcatcttggggaccagtcccacattcccactcctggggagttcttttgtagaagctaggtggatgccttctcttacaatgtttgatctcaacaaatgtcacagaaacatctggaagattaaggcagtctgtatggaaagcttgtgcatcaatgtaattttggctccttagaacttctgcacattgtctgcccaaaatatcttgagctcttaccctcaacaaatttacaagacccatgaggtcttgtaccacaagccctggcttgtctcctctcttctcttcctcctccttttctgccttctgatgacaggtgtggtctcttggcacaggtgtgggctccatgagccgctatgagcaggtgctacatcacatccgctaccgcaactggcgtccggcttcccttgaggcccggcgtttccggattaagtgctcagaactcaatgggcgctacactagcaatgagttcaacttggaggtgagtgggtcctgccattgttagggaagccaaggctcacccattccctcattcattcagaaatgctgtaactggcccacctgccactcctgggtcaatagcacctctccccactcttcccaggtcagcatccttcatgaagaccaagtctcagataaggagcatgtcaatcatctgattgtgcagcctcccttcctccagtctgtccatcatcctgagtcccggagtagcatccagcacagttcaggtagggtgcccaagaggagggaccctcaggacacaggtcgtcattgtgactcaagattatctactcaacagacggttatgt

SEQ ID NO: 30699 - DNA, 2300 bp, Homo sapien
ctatgcagcttctcagtggcagagctggtattcaaatcacaccttttggctacagtattcctgctgttcccactaattcatgctactaattcatcccactaattcatcctcagggatgcctggacatctgagcggtggatgtggtatttgggatcacacagactctgctcctgacccagccttaacctggggtgcaataacagaggaggaaggtgattagcaagggctgttttctgagctgtccttcatgcctgcatttcccatgtctgtcttcctacagaccccaaatcagaagtcttagaggaaatgcttcataacttagatttctgtgacattttggtgatcggaggggacttggacccaaggcaggagtgcttggagctcaaccacagtgagctccaccaacgacacctggatgccactaattctactgcaggctactccatctacggtaaggccacactcagccccctttgccccaagggtgtcctcttagaatgtccttgtccagggagacatgagtgagattgcacctgtgaaggagcactgtgaagccccagggaccagttggagatccttggcctcaagcatggatttctagaccctcctttggcaagttactccagcatcttggggaccagtcccacattcccactcctggggagttcttttgtagaagctaggtggatgccttctcttacaatgtttgatctcaacaaatgtcacagaaacatctggaagattaaggcagtctgtatggaaagcttgtgcatcaatgtaattttggctccttagaacttctgcacattgtctgcccaaaatatcttgagctcttaccctcaacaaatttacaagacccatgaggtcttgtaccacaagccctggcttgtctcctctcttctcttcctcctccttttctgccttctgatgacaggtgtggtctcttggcacaggtgtgggctccatgagccgctatgagcaggtgctacatcacatccgctaccgcaactggcgtccggcttcccttgaggcccggcgtttccggattaagtgctcagaactcaatgggcgctacactagcaatgagttcaacttggaggtgagtgggtcctgccattgttagggaagccaaggctcacccattccctcattcattcagaaatgctgtaactggcccacctgccactcctgggtcaatagcacctctccccactcttcccaggtcagcatccttcatgaagaccaagtctcagataaggagcatgtcaatcatctgattgtgcagcctcccttcctccagtctgtccatcatcctgagtcccggagtagcatccagcacagttcaggtagggtgcccaagaggagggaccctcaggacacaggtcgtcattgtgactcaagattatctactcaacagacggttatgttgtagcaaacgtaggtgcccagaactgagggagggaacccagcaatggagaaaatgtgccctggctttgagatactcacaccctcaataggcagtcgataagtaaacaagaaattacgcaacacacataatagcagaggtcagtacaaagggctgggacaaaatttcaggcccaactcaaaacaatgtcatgtatgaagctttccatgagccctctacacacactcacacacacgtacacaccatattgcaacgtcctctgcccaaatttctatttgagcacttgccatattgtgttaccatctggtgggcacttgtatctgtttctactaaactctacagtgcttggctctgtggaagtttctttataatttgaggggtaaagccaggaataaaagagaatttgcatttaatgaacacctatactgtgcctatgtggaaactcacagattatttaatttacacctaactattactcataggataggaattattatgtccattatagaggtgatgaaagtgaagcccagacagggtaaggtactgctctagagttctacagctgggaagtggtagggcagactttatcctatgcacggatgtttcattcatgctccctcacaagaatgagctaggcctttgttcaccatgtcatgcgagttttttccttgttccagtggtcccaagcattgccacagtggtcatcatcatctccgtgtgcatgcttgtgtttgtcgtggccatgggtgtgtaccgggtccggatcgcccaccagcacttcatccaggagactgaggctgccaaggaatctgagatggactgggacgattctgcgctgactatcacagtcaaccccatggaggtgatcctcatg

SEQ ID NO: 30700 - DNA, 2300 bp, Homo sapien
ctctgacaactcaacaataaaaagatattaactccatttttaaatgggcaaaagatttaaatagacatttctctaaagaaggcatacaaatgtcctataaggacatgaaaagattctcaacatcactagccatcagggaaatccaaatgtaaatcacaaagagatcctactttatacctactataatagctataatcagaagaaaaaaaagacaagaagtttggaaaacgatgtggagaaatggtaattctcatacattgctggtgggaatgtaaaattgtgcagtcactttgaaaaacagcttggcatttcctcaaaaagttaaacatagggttaccatatgatcccacacctaggaacctacccaaaagaactggaaacatatttctacaaaaatgctcacacaaaaaaaatgtatacacaaatgctcacagaaacatttaaacatttaacagctaaaacgtgaaaacaatctaaatgtccattaactgacaatgaatacaatgtggtatatccatgtgaaattattcagccataaaaaaatactgatacatgctataacacagataaaccttgaaaacattatactaaattaaagccagacacaaaagccacacattatatgatagcatttatatgaaatctccagaatagacaaatccataaatacagaaaagtagagtaactgctaagggctgagggaaaggaggaacagggagagactgctaatgagtgttttacgggggtgatgaaaatattttggaattagataatggtgagagttgcacaattttatgaatatactgaaaaccatttaattgtttactctaaaatggtgactttaatggtaagtgaattacatattaataagtttttaataagaccttatagaaaccaatagtgaaaatgtatcataaatctgggaatgaaactctaacctatgtgcctggaggatggagagagagattgataaaactgagttttggcaaacgtgaggaaaaggagtttcacttttttgaatgttgtatgttccttgctggtattaactggcacatttatttgagtaagaaatttagcagtttgccttaaaaaaagataaaggacataccctaagagccgggattttcacttgtagaaatctaatatcaatgtgtggctggcatagttggcactcagtgattttctctattataaaggtgataaccatagggggagatactaaattatgcagtaaattcctgcagctaaactcagctctcacttctgcttctttttctaaaaacaagacagtattcatactataatgtactatgaccatgaaatttctgttcttttaatctttgcaagctgcttaaatgggaaggtgaaattcttccctaaaatatagggtcttttttctaggaatactgagcatatactagcagaacagttaaagatttaatgtagagttccagcctctttttggagtgggggtaggatggggaaaagacagaaagcttgaacctcacccaaacaccatgcagctacaaaaaacccaagaaatattcagagtgacttaagtataaagcttcatgaaaatgagcagcgactatgcattgattgataaaatcaattactactgaaagaagttcctaagtgaacctatatatttttttctttaactctttctctgaatggtgatatctctttaaatatggcattgctattatttgtaaacactgtcctttgttcaaatagaattctatcaattcctctaacatgtggaaaaccatgtgaatctacttttctaattaaccatacccaagcctttcagtctacgaagacataatctgaagtccacttgtccaaattgcaggcagaacaccaaacaaggagaaatagcttcagaaatctactccattatccaaaaggtgacaaatgacaactaaacttccaggatgctcattgcatcaccactcctctacagctggttccatggaagcatggagtttccaccaacataccagctaccacccacaaggccgcatcctgctatctacctagcatggtagagagacagggattgtgacataagcaaataccctcagactgatatatgtaaatgccagcctatgagcttcctggtagggacaccagctgtgaagtcctcataacagccaacttcttgcaactttcaagctgacggcctcaggaatgggaggaaggactcctccactggagaactgatagcagtattctggtagaggaggcatcaagagtcctgggaggccggtggtaatcatgtaggcaccatggaaact

SEQ ID NO: 30701 - DNA, 2300 bp, Homo sapien
gcaaactaccatggcacatgtatacctacataacaaacctccacattctccacatgtatcccagaacttaaagtatattaaaaaaaaaaaaaaaaaaggaactggtaacaaagaaaatctcagaaagtttcttactcttttcagttaagagaaggatggaatatatgtaaatttaaatttatataaacatttttcctaactaaaaaaaaaactatgtatgaatttcaaacttttttgcaccaaaaattcgtactcacttgttataatgtatctgaacaagatctagtttgaggcactaaaaaggataagacatcagcttgaaaacagcccctatcagagcagcatgaattgaagcaagaaaaaacatcaaatttatggtcaagattgggtggaagaatggtgaaatcaaggatgctttacaaaagtttgatggggaaaattcccccaaagaaatctgaagtttacaaatggataacttgtttgcagaagggatgagacaatgttgaagaggaagcctgcagtggcagacaatccacatcgatttttgaggaaaagattattcttcggtgtgccctaattgaagaggacccacaattaacagcacaaataatatacaacaccatagacatttcaactggttctacttacacatttctcactgaaaaactgaagttgagcaaacttttcacccgatgggtgcaaaactgttgcacccagatgagctgcagacaagagcagggctttcaatggaaattgtaaacaagtgggatcatatattgaaacatttctttgaagaattgtaacaggagatcaaacatagctttctcagtatgattctggatcaaagcaatagttaccaagaggtgcaagtggtccagtcaaatcaaaagtagactggtcaagagccgaagtcatagcagcagctttttgggatgctcaaggtattttgcctgttgactttctggagggtggaagagcaataacatccgcttactataggagaaagtgaagcaaagctttagcataaaaacacctacgaaatcttcaccagagagtccttctccatcaggacaatgttcctgctcattcctctctttaaataagggcatttttccagggatttcgatgggaaactatcaggtatccatcttacattcctgacctggctccttctgacatatttttgttttctaatcgtgaaaaatctgtaaatggcacccatttttcttcagttaataacgtaaaaaagcctgcattttcatgattaaattcccagaaccctcaattctttacagatggactaaagagccggtatcatcacttaccaaactgtctttaacttgatggagcttacgttgaaaaacaaagtttatatttttaaattttatcttttaattccatttcccatgaacttttattcttttaaaaacaaacccaagtattttaattctacttgccttttttacttattacacacttcgggagattttttgccatatggaatcacctcatcccttgtcacgattgcataatattccatagtaggaatgtttcatgatttatttcttcattcccccactgatttcaattttctgcaactgcaagcattgttcataattctgtactgtttgtgagcctatataggagtatccgtgcacaaacctttttatgcattgtgcgagggttactctgagatagacaccaagggaactgctgggtcataaatccaattttttcaaagtaaatccgcttgcgaacccggaaccaagtcgatttttcccgccccgccagttccctgttcaggagagtgcagccgtgattggcgcgttcactcaggccaggggcgccccaggtctcaggtgctaggagcgcggtgacctaccaccctccgggcacgcgttctggccacgcctcgcggcccctttcattgaaagagcccgtagggatcacgtgaaagaacactgcagagtgcgtgacgtcacgacgctcacaccaatgggagcctctgtttatgtcgggagccatcaaatagtcatcttccccctaccatcccccgcccactctccgtcgcgctgcgctgcgtcgctttcagcctctggtgaagggcggcgcgcttaggcaggcggtggcgcggctggagtgccgcggggagggctgtgccggttgctttctgcagccgcatctcggccagctctcctcgccgtccccggggcgctgtgcgtctccagtccgggaccgaagccgcctgccgtagcgggcggccagatccgcgtcccgcctcagcggccggaggacatgcg

SEQ ID NO: 30702 - DNA, 2300 bp, Homo sapien
atttagaagctgctgatctcaatctaaagaattttagtagccaggctatcctggcttctccccaaatggcaagttgtttcccttgttatccagaggctggaggatttgggggtctacagggacacaagggggccctgttttggcccactcctttgtgcctggggcataatctcattgggaaaggccagtgtggtgaacctaactggagcccccaagggagggggggagttgttttctcaaattgtggccactgctccctccctcccttatccttgaagctactgtgatgcttcccagcaccgagtggaagcaacgggcatcctccacacacacacccagcctgtcagccagatgggtagagaaaccatcagcatgaacgtctgctttaaactttcctttgcttctgagcttctttccacaaattttcttttcttgctccccaaccacatccataacccccacagtagctcacagtagaggtgctccaggagcttgtcaataggaggtaggaaggaaagacaccaagtgtgaatgtaggtcagcactgccacttagggcagttcaaatcacattcactgtcctcagcatctatcctatgctggtgcagggcatccagagatgtgtgaggtacctatacttgccctccagggggggctcacagttttaggaggggcagacatgcaaacagacagtgatgaaacgttagaataagtacaataaatacgtgtcaatacacacttttgtcacctcatcatggttatcttggttcataaagcatcatcttatgcttagactattacagtagctgccaacctggtttcctccatccatccatccagttggctgctaagaggtctttctggaatgcaaatccgacaaggtcactaccctggttaaaggcctcccaaagtgatggggaaggtcaagctcttgatacagtctccacccaagaccctagacaccgtccatccctccagttccgtcataccccctctgctcatagcacaggctctgtgctgtgataggtagctctccaggtgaccatgttgtacccctgcctccaggagctaattcatgtagacacatttactaggaaacattcccagttgccctttccagtctgacaaattcgccccagaacctctctcaaaacgtttccttcatagagttggattgtctttacttgttttccatgtccttgatgaaatgcgcactctgcatctagactctgtctgcatctagactctgtctgcatctagactctgcctggtacctggcacagagagggattgggttagcaaatgactgcgtaatggacctaaagtcaattctgggagcacagacgagggccaccaaaccaagaactttcaatttccccaaggaagcgcagataccagaagcaccctcgaggcttctgttttggccacgccctttaccccatcgctcagttcaggctcccaatgaggcggcccaccatcagcgctggtagagcaaagagaccgacttcctgcgcctcgggtgggcggggaacgctccttgagcaggtgcggtatgaaattggactttaagagatgagttggagcctgatctcaaaaataaagtgtggacgtgtgtgtctgaggaagggggataataaaccacccttttttcctcctggctgctatttcccacgtgcgttgagtaaaggcaccaaagctgcctagtgactgggtgtctcctccccgtcaggggcacccaccctggcgctccaggagcgcttgaatgaatccgggaggacccgcgcgcaggaatgaatgcgagagctagggagtgagcgggcgagtgggcgggtgagtgaatggcgaccgcgccgccgccttggcacaggggcgcgggcgcgggctccacttccctctcccgccagctggtggcctcgagaaggtggcggcgccggcagcggcccgagctgggacggccggggcgcgggatggtgggggaaggggcgttcccggcgaccgcgccttccgcggctattggattagtggccttcagggatgagctcagccagatcggctttcagctgcagcctccgggccggccgggaaggcggggagcgggcggcggcggcggaggagggggaggcggcggcggctgcagcatccagagctggccgtggcggccggcgcgccccgcgcacaaaagcacccagccccaggggagggcgatgaacacaccacatcccgggcccgggccccagctgctgctaccgctgcgtgcgctcagggcgctggggaagacgcccggcgcgccgggggccagcg

SEQ ID NO: 30703 - DNA, 2300 bp, Homo sapien
gaatgtaggtcagcactgccacttagggcagttcaaatcacattcactgtcctcagcatctatcctatgctggtgcagggcatccagagatgtgtgaggtacctatacttgccctccagggggggctcacagttttaggaggggcagacatgcaaacagacagtgatgaaacgttagaataagtacaataaatacgtgtcaatacacacttttgtcacctcatcatggttatcttggttcataaagcatcatcttatgcttagactattacagtagctgccaacctggtttcctccatccatccatccagttggctgctaagaggtctttctggaatgcaaatccgacaaggtcactaccctggttaaaggcctcccaaagtgatggggaaggtcaagctcttgatacagtctccacccaagaccctagacaccgtccatccctccagttccgtcataccccctctgctcatagcacaggctctgtgctgtgataggtagctctccaggtgaccatgttgtacccctgcctccaggagctaattcatgtagacacatttactaggaaacattcccagttgccctttccagtctgacaaattcgccccagaacctctctcaaaacgtttccttcatagagttggattgtctttacttgttttccatgtccttgatgaaatgcgcactctgcatctagactctgtctgcatctagactctgtctgcatctagactctgcctggtacctggcacagagagggattgggttagcaaatgactgcgtaatggacctaaagtcaattctgggagcacagacgagggccaccaaaccaagaactttcaatttccccaaggaagcgcagataccagaagcaccctcgaggcttctgttttggccacgccctttaccccatcgctcagttcaggctcccaatgaggcggcccaccatcagcgctggtagagcaaagagaccgacttcctgcgcctcgggtgggcggggaacgctccttgagcaggtgcggtatgaaattggactttaagagatgagttggagcctgatctcaaaaataaagtgtggacgtgtgtgtctgaggaagggggataataaaccacccttttttcctcctggctgctatttcccacgtgcgttgagtaaaggcaccaaagctgcctagtgactgggtgtctcctccccgtcaggggcacccaccctggcgctccaggagcgcttgaatgaatccgggaggacccgcgcgcaggaatgaatgcgagagctagggagtgagcgggcgagtgggcgggtgagtgaatggcgaccgcgccgccgccttggcacaggggcgcgggcgcgggctccacttccctctcccgccagctggtggcctcgagaaggtggcggcgccggcagcggcccgagctgggacggccggggcgcgggatggtgggggaaggggcgttcccggcgaccgcgccttccgcggctattggattagtggccttcagggatgagctcagccagatcggctttcagctgcagcctccgggccggccgggaaggcggggagcgggcggcggcggcggaggagggggaggcggcggcggctgcagcatccagagctggccgtggcggccggcgcgccccgcgcacaaaagcacccagccccaggggagggcgatgaacacaccacatcccgggcccgggccccagctgctgctaccgctgcgtgcgctcagggcgctggggaagacgcccggcgcgccgggggccagcggccgaggcgcggcccgtgcgccctgagcgcgggactcgtcgccctccgggtcaggcgccaagcttccaagcggctagagcgcgggccttggagcgcccccaggatcgcttcagtaaggcgcttccccactccaggcccgacccccggcgcctgagcgccaacttcgccaagaacgctcctaactccaggccatcctgcagcgcagagggggcgctgctgccgggcatcagccgtgaggacgcgcccctggccgtgcggagagagccggcatttgcgggtcactcgggcgcccctgagtgggcggcggcggcagcagacccctctccagggagtccaggacctgccagcgctggggattcttcccgaacaggcgcttgccctctcttttatggtaagtactctccagctcctggtgaggggcgcgcgggggccgggagccgagatccggctgcacggactttgtgcgggccagcactcgacacagctggcgctcctgacgtcccagtccctgagaattcctctctgcagg

SEQ ID NO: 30704 - DNA, 2300 bp, Homo sapien
gaaaaacccacaggatacttgtctgtgctgtgtggcagcagagttcttttcgtccctacctggactttggctaggggtgtaccactgtctgggtgggaggttgaggctggggagggcagggcatgaaaaacacccatccatctcctcatctggctcaggagaagttgttctaggcccagcagctctcaggccagggaggggagggcacacgcctctgctctggacagggcttggctctccatctctctccatacccagggcccgtccaagtagtccgagctccttgggttctgtctggtttcctagtgatggtggccaattccttctccatgaaaaccaggatcctgtctcagggaaggcagtctggggtcagtgctgttaatggtatttacctgatcgaacaaagagctcacccatccaaagggaggggatccacatgggatgcccagagaacagagccagagaggaaaacctgtcggcagagttccaggaccctttatattatggtctctcaagttcccccatcaccagagggaggtgttttatcctcatgttttttactggcaagaaatctggagtatccaagaggctaggaggctttcctgtggacccacagtaggagatggagagagggatttggacgcagttctgtctggctccagagcctggacaccggctcccttatccttcctcctcacctctattgacctccattcaccttcccatggagctctcaccccatcttcccacgctgcctgatgtccatgtccctggtgaccctgctgcaccttgttctgtgtcttgccgctcaagcctggctacattttaggaggttatttaggctccccaggactccagggttgggaaccaatgggccacaccctacagccctgtgtcttgagcagctgtgtgccccccagccttggcacaaggcttgtcccctgggatcaaaagcacctgggttctcatccaggctctgaccttgagcaagtcacaactgctctgggctcacgccttatttctaaaatcagactccctatgattgttctaggtccggaacacagaccctgaagccagatgaccttggtttgaatcttggctcagtcacttatttgcagtgggacttcggctaatcgcttatcctctctctgacttcagtgttctcatctgtaaattgtgaataataatgtatatctcttatagggagatgttaaggattaaacaaactaataaacataaataatttagaacactggcatatggcaggtgctagattagtgccagatatgagtgtacgaattattactattattgtgcatgcaaagggctcagccaaggcatggacataaatgaagggattggcaactggctgctgatgctgctgctataacccgtgccctttgcttccttccaggagcttgggcccctgccgcagcccggtagaggctgtggaggtctaccgtccggaagcctggttcccagccccgtggcccattcctggctacggggagtggaggctcccacgaggtagcggtggcctgcagcggcctcctccccgcagtgaagcatgggccagaagctctcggggagcctcaagtcagtggaggtgcgagagccggcgctgcggccggccaagcgggagctgcggggtgcagagcccgggcggccggcgcggctggaccagctgttggacatgccagcggcggggctggctgtgcagctgcggcacgcgtggaaccccgaggaccgctcgctcaacgtcttcgtcaaggacgacgaccggctcaccttccaccggcaccccgtggcccagagcaccgacggcatccgcggcaaggtgggccacgcccgcggcctgcacgcctggcagatcaactggccggctcggcagcgcggcacccacgctgtagttggtgtggccacggcccgtgctcccctgcactccgtgggctacacggcgctggtaggcagtgacgccgagtcgtggggctgggacctgggccgcagccgcctctaccacgacggcaagaaccagcccggcgtggcctacccggcctttctggggcccgacgaggcctttgcgctgcccgactcgctgctcgtggtgctggacatggatgagggcacactcagcttcatcgtggatggccagtacctgggcgtggccttccgaggtctcaagggcaagaagctgtacccggtggtgagtgccgtgtggggccactgtgaagtcaccatgcgctacatcaacggccttgaccgtaagttgtgctgggctggggggcagggctttcagaggc

SEQ ID NO: 30705 - DNA, 2300 bp, Homo sapien
cagaaagggcctgtgtcctatctccaggctgagactctgcccccacagtatgccctgcgctgtcaagcaaagcgctggtgtggcaaattttgcagagaaatggctagagatggtgccctgagttacctttagtccccttgtgacagagaagggatccaagagtgcctacatgctccctgctgagggtgatagtgtgtccacgagtgaacccacctgccatggagtcacagaggctgagagcacagcatggacatgtggcccaatcctgcaaacaaagccaggtccaaggctagttgcaatggctggcagagaagctgattttctgctagaactagagctgtgaggctgtgagcctggatctgccagggtctcatgtgcgcatgaaagcgtagttcatgtggaagacagcaaaactgagacggggagtccctgagaccctgggactaaagccaggcctgaagcagacaggctcttcatgtacacagcggatcaaccctttgtgatttaagttagtgtgaattgggttgtcttttacagcagaaagcaccttgactaacccatgtagagaagagggtgacagtgtgagctaagcagtagagcctgcaatccgtgagaggacaatcagaaggggcagaggagacattgttgggcgggctgcggtgggcttctgtgggggccaggtgggagagttgggggtgatgccaaaggggacagtgaaaagattttgtgctcatggattgggagaggctgtcagtattcagggcagaaaaaaggcccgggatagcgctgcatcgggggaataccagaggcggacaggcagcaaagtccggtactgacgagccattaaggcacctgatgaagaaggcatgacaggtggctgagagaatggcgagaccacggggataaatggagttgggagcttggaagaggtaaaatttagtgccagacgtggtaacttgaggaggaaagttctaagaaaaaaaccggagggtagggggaaatatggctaacatatctgagccaagtgtgtggatttgagagccatcaatcaaggagagaaagcagaagtcaagggatgagatcctcccaaaggtgcacctcaaaggtatatagtagcaaattcgaatccgtatctattttgcctgaggctagttgtgctaggacacacagggttgctgtagacctcgagctgacagcaaagacctctctgataatcgctgttggtcgtttcatctcccacagagaaatctggtggaaatctccaccagctggaacctaacatttgcaataaatgacccacaaatactgatcaaaccaaatacaaccgttcgcctatcagatgtctaacggggcgttacaggcagccctcaagtgctctgaggatcttcagcagcggctccaaggaagccgcgggccgggagcaggtgggaagggcgactgcgcggggccacgacctccccgggtctctgcagaccgttggagacggagcagcagcgaggactagagcaacacaaggccggatgtgttctgagccggaagaggagtgtgggataggccgaaaggggtggggggtggggggtgacagtttgggtctacgtggcagcaggcgcaccccagacgcgcgcgcccacccggcgatagcatcagcggcgccagggcaggcacatggccccaaagcacccacactagggcccgggccggccagggctgtgttcctgggccttggcgcgcctccgcgcagtccctgatcgcaggtcaggagttgtgaggcacgcgagagccctgcgcgtctgtggtcgtggtccctgcgcgctcggcttgtccgtgcccgtggctttgcacgccgagggctctgcagactgaccagtctctccgggctgtgctgggcctcccagaggcagtgtcctctcagcaaccccgcgcggtcgcccccgcccagccgcaccgcaacaccgcctccggggcggagctccagggctcctggtgcagggccggccgaactgagacggggcgcggcggggtcggcagggggcgctgccgggccccgcgagctccccggtggcgggtgcgcgccgccctcgcctcccctcgcgccgggaggagctggcggcgagcgccgagccgggcgcgcagcgacggagctggggccggcctgggaccatgggcggtgagtgcggcgcgggcctgggccggggcggttgccgttggggccgagcagcgcagaggttctaggcgggtgggcgtccagggtccgaggttgggagactgagggggtccccctaactcgccagtgggagagg

SEQ ID NO: 30706 - DNA, 2300 bp, Homo sapien
agaccagtgaaggagagagaattcaagaaccttttggtttatttgcggggagaaattggagaaattaggtggcaggactgggggtgttttagcttatgaggagacgctatctcagataagctgaatgtatttaagggagccagaaaagctgctaaaattggagtggccaagaggagaagggagattggctggttgtgcttttgtgaaggggtggacgcaggggtttgatatcccttccagatcccaagttgaagggagcgccttttaagagcctgcaggaaacaggaataatcacatccaggggatggatgtagaaaatagcattcattcattcattcatttataagatggagtctcactctgtcacccaggctggaatgcagtagtgtgatcagggctcactgcagccccgaactcctgagctcaagcgatcctcctgcctcagtcccctgagtagctggaactctaggcatgtgccaccatatcctgctcactttttaaacattgaaaatagtatttcttgattccttaccagaatccattcacaggtggtatctcaacatcatcattaccaccctgatctgtaggtatcatcaccttcatttgacagatgaaggaaatgaggcacagagaggcagggatacttgccccaggtcacacagctaggaggtaacagagccaggacatgaattcacatctttgtaatactatagctcatttgcagcccccagccccaggctacctccctgcattcagaaccatggtagcaggggcaactgaggacagatgtcagtggagttccaaggaaaaagtgactgtagtcccctaaggaagtgactagcccagtgttgaagtcccaaaaagggcaaggcagaccctggagctaggaaggtaaacagatagtggagctggaccttggccccaagaggttctttgctggtgtagtcagtggggtgacttgtgtggcagctgatcccagagcaatggagacagagctgagccaacactttagcctcatcatgctcacatttcccgggaaactctgggtccctgatacccaactgtaatctgccaggtatctgtgtaatcagaagaaggctgacagccaaatcacacaagcatggggatggcaggagggaggggtttggaagccatctgactcccactgcagaagtgtcttccacatgggacagcctgtctttcctggaaaggtccctttattagcacagctgcctagagtcaggtcctcatccctgggctagttagcaaggcggagacatggtcctggaggagcagcatgacagcccccaccgggccatggggttggcatgagaagaggagctgctcccaaaggaggatgggtctgtcgccacagaaggaagtggggagagatgagctgacccagggttggggcccttcattgtgctccattaaagtcagtttcaaggcacctgcaaggagcttgcatacagcagtttcctaaggcaagaagaaggccacatatgcaggtagatttctgtccttggccctatcccagggccttggtatagggaggtgacctggatatcagggaggttggcttgacaccctaggggaaagaaactggtgtgtccttgtgcaagtcagagtaactcccagataatgaggtggcagcagatactcggttataactttatctgctgcccctatggttgttgagtttcagggataactaaggtgccctgaggttcaaaggctagacaggggtttgtggcctagcaacctgtgctgttatgatctgactctgaccctggccttttccctccttattttctattccatggggaccatcaatggaataaacaaaaaatcaaaatgagcaaatcatcattagatgaaacatgtctctctaaacaagtttctagtgttcgctactaacccaagtctagttgattaagtcgtgttttgcttaaagctgttattgaccactcctgggctctctagagggacagaactaatggaatatatacgtatatatatatttataaaggggagtttattaagtattaactcacatgatcacaaggtcccacaataggctgtcggcaggctggggagcaaggaaagccagtccaagttccaaaactgaggaacttggatccgatgttcaagggcagggcgcatccagcatgggagaaagatgtaggttgggaggctaggccagcctgtctattcatattttttctgcctgcttatattccagctgcattggcagcttattagattgtgcccacccagattgagggtgggtctgcctttcc

SEQ ID NO: 30707 - DNA, 2300 bp, Homo sapien
cagtggggaagacgttattttgatggaatgcttctgggatgccagcctgccccgggagggcgagcctggtggagccatggattacctcactacagccagggctgttctttaaaagtgacactttgtagctcgtcttgcagggcccctgtcacagtgatgccaggaccctctaatggggccatttttggcgctcccatttgagaggttcagttcctagggaccagttggcctggctgcctctgccctcattttcctttgcctagttttattttattgaacattctgtatttttagaagccactttaaatcctttgtgtgaagagggtggagtatgcatagttacttaatgtcatttaattaatttaatctttaaaaacagtaatagttgactcatcattataaacaggtacttaagagtaagagtgagcaggaaccccggtgaaggggaccctctctaggctgctgactcccccaggactgtgggatctgggtcacgagcaatacctgctgtcttcccaggtgctacttcagctttaaaaattactaatgttgtgatctcctaaaaggtggtgtgccctggagcatgcccattattctagtctagtgaaacggaatactgtggccagcaggcagggtgcagtgagctgaaccaagcactagctggcggtccacaagtttgttgccccagggtttccatccacgatgccacaccctgtgactctcaaagcctttgtagtagaagctgcctctttgtgaatgccatgtgctttataaggaaggtgctattttaaccctcatagtattacatttagccagcattaaggttattagttatttatatgccatatttagtaaatgcttttttgcattcataaatatgaattaaatatgcttttctacatccaaggaggagaaaacatccactttgatcagcatttattgcacaaattttagttttatgcttctatcatgtgccaggtaccagaaggcagtacacaagcaggcacctacatgaagtgaaggggccagccctgtgatggtccggggacagagcgttccctatggagtaagcagcaagtgcagggggcccgaggctgaaagaactgggcaggtgtgagccacaataagaccagggtatggctgggctggagcagtgatggagggagtaggcttctgaggagtcgaagaagaaaggccgcttgttggggctgcctctgccctcagggagctcagcacatttacagagacaggcccggtgcccaggacacggcagccctcagtgaatagctggcacaggtggcagcagtggtggcagcattagagaaagaagaggaagaaatggaagaagagcaagaagtagaaatggaagtagtttgggtgccatatttgggggcatgagccagaagaggggcagcctgaccccacctggggcagggaggggacatggggtggcagatcagggaaggccacacagagaaagggaccagaaaggtgtgcaggagcaagtcaggcagaagctggtgctgaatggccccttgggtggtgagaccaacccatgcagtgtgaggtggtggacagcttggcacattggggccctcaaagttagtttcacaggcttgagcagaaagttagtttcacaggctcaagcgtggagtggaaaactgggtaggaactaggttatctgaggcttcgatacccagcaagggagtatgtccaggcatgaaggcagtgagagagccgggcagtgaaagggatgaaaagatgaaggtctctgacagccatagtgtggaagatggattggaagctggtggcagctagtggtgttattattagggtagtgatccagaggagagacttcactcagaatcagaatccacatccttaaagtgccccacaaggcctgagtgcccttcctccacccctaacccgcctgaccttgccctccactctcctcgtgctcactcactgcgcttcagccacaatgctcctagctcttccttccacattcaggcactgtatgctgcctcagggcctttgcacaaactggtttctgtctctagaaggctcttcccacagaaagctttatggccagtcctcttacctcctttaagtctttgctcaaatgtcaccttctcaataaaacctactcagaacactccagttaaaatgacaaggtgctcctccttccaccctggtctcccacagcccccttagcctgctcttctctttgccacagcatctgttactttctaacccagacaaacacacacacacacacacacacacacacacagagtgtt

SEQ ID NO: 30708 - DNA, 2300 bp, Homo sapien
aatttacatactagttctaagtaattaattggaactcactggttaacaatgagaaccatatttttcaagaatactgaactattcatggtagactagtcctaaaaaatctttcccattaggaagagctaagtgaagacaaaaaaaaaaatttaccttggaaggatccttgtgacccttgtcccactgaaagatcacttcctcaggaatgctttctctcagcttcctggggagcattagattgcctctgctctgagatcccaaggaaccttctgtcagaaacctcaacccagttttttaattagttgagtataagcctgcatttttcccattagactgtgagctccaagaggaaagggattgtgtcttacctatcaagttatattaatagtatctagattttaaaaggaggctgagaacagtggcccacacctgtaatcccaccactttgggaggccgagatgggcagatcacttgaggtcaggagttcaagaccagcctgaccaacatggtgaaaccccatcactgctaaaatataaaaattagctaggcatggtggtgtgtgcctgtagtcccagctacttgagagcctgaggcaggagaatcacttaaacctgggaggcgaggttacagtgagccaacatggcaccactgcactccagcctgggcagcagagtgagactccatctcaaaaaaataacataataaaataaaataaacaggagaatgaatgaatgaatgaaattatgatagtccatgtctataggacatggcttccaaatggacagaagatcagtcaatcatccatccatccatcccgccagtgctgatgacacggtgataaatccttattccctagcttttccagactcttcaaggataatcactcttctacagatagttatttgtcctgtacccttctgttttgtctgaattaacaaatagtcttttccctgattgtattcacaaagaggccccttactctcaccacaaaactatcttcaaatcgcaacacagcatgaaaaatttctgggagagccttctagaagaaacgtgttctccataaactatgatgcctgtgatctatagtccctgatctggcctccaggtgtttaacccatctcagttttgggtttgctcacctctgtccactgactgtgcttcctacacattctgaatgggctattacacccccaactccaattcttcaggttagagatttgagtgtggtcatgaagattgatggatatcagttaagcaaaggacattgcgtaaatattgagcctgggaaagccagggacttgagctcaatttttagaggtcaaaaatcataaagaaatctgaaattcaagaagctgattcctaggcaagtgcagacatccaagggtttcatgtttcctgttagggcaggcctggaggcctcagtatagatgagcctgagcctaaagatgtggatgcttatatggtcttgctgagctaagagaaagataaaaaagggacacaacctcagactagttaaaagttgaaggggtaggttctttgggctctggtattccaaagaaactagccaaacttggcagattcaagtttaaacattgtctttttctttgtataatccctatctacattccagttgatttttcaacatgccccctgcatgttgctgaattttaagcttcatgagggcatgttcactgctgtgtccccagcaccatcacctagaacagtggtaatcaacaagcatttgctgaatcgatcatcaacagatgtatatatgggtagatggatgtatgaacaaatctgtttccaatccattgtacagtgcatactcctggtccccatgatgatttgtgattctctctgtgataggtccctttgtccagccatctgcctcttggtagctctgaaggcccttagtcatttggctcaaaatccctagctttggagactagcttcttattaactaagccattgcaccacttgttcttgtagccttaaattaatttgagttaattcttaactgtttcccttctgtacgtgtgtcatttaatggttttcctttatctgattttccccaattcttcctgtgcatttgtggttgtccacagaagccctctagccaaggcctcgggcagccctaccaaatgaatatgggcacttgagttttctaggagggctttcctgctgccctgggtctcatccaactggtatccatctaaacattcccacccagggttattcatgctagaggaagaagaatgccctttccagagccagttcttggggaaaagaggaactgttga

SEQ ID NO: 30709 - DNA, 2300 bp, Homo sapien
gtgcataagaattcttgaatgttttttatttaaaaaattaattcctcaccattacatattgaactatctgcagaaggtgattccaatttattacataccaccaaactagatcccatcaatcttgagcagtgggggtagggaggtggttttgaagatgacatgaaatttggtgtttgagtagatgagatttaattttcggaaaacatttcactcataaaacggatatcaacccagtgtcagcactgacctcctgatgtcaatgtcatcatgcaagcatagctaaaataagcctcaaagtaaaacaaagaaacattgcatctcagcacaacacgatttcttctcttacagtatgtactatctatagccttttggtattcctattaatggcttgttactttaaaatttagcttttggagggggagggagaagataaatcattttgcattttctgtgttctgaacgcatacagtatgctgctgtaagtcttagtattatttaggtcagtatcctaaggatagctttaatcgttcatgatggtcagctatacagccagaggaattcagcatcaatttatttttctgttctgattttattctgcttccaagttttaaaaaatccattcacattttaataaaattctgaggcggtatctgccgctctgtactgcagatacatttagcaggatacatttacactgcttgtggttaaaggttatagcacggatacagacagctgatcatgcatttttctacaagcctgccggcaccatttaggattttgaaaaataatctagaaatgctataccctttatcaaaattattttttactttgcaagagcttaacagttttggttttttcttagcaattctataaaattaacatctataaaatgcatcccggaccagatacatactgtattgaaagctttcttcaggaagagaatatgagagtgttctttccagcttattttcttccttagcaaaaggattgtttgattctcagaagcagaaggacacattcattgtggagcagctctgcttaagtgtatgaaatgccttctgtctggttgcagaatttggagtttactaaacagtgtttagtgattgggctcatcttgcatcaccagttgatgacatttttctttgttccctcctacccagttgaaccaagactctgaggctgatatgcaatgtcacttacaacattaatcagatactgcatttaaggtgagctgtcccttgcctcctccttccccagtgctcgtgtgctgcatgcagtgcgtatcttgcttctgcgagcctaagatggcaggcaggattagccgtgcttgtgctgtgtgtgcatgctgtgtctagaattcattacacgttgcctagtatttcagatgtgagtatgtaaatgctctgtatgccatatcatctggtagcgaagacttgtttttgcctcattacagccttagatatttcaacatcacctttcatttccaattcatttgcttctggatgtttgtttttcatcacattcaaaatatgattttacctttttttttttaacaaaaccaaaaccccccacaaaccctaaaaacaaaaacaacaacaacaaaactctgctaccagatggtgtctctcctttcttcgtgcatttgctgtcttttaaataatgtatgttgtattgttaattaatgtgaatatcaaattaaacacttgaaacttacatgtttattatgcaggtaggaggcaaggtggattctatttttaactcttatgcactccatcatgtgcaagcaacttgggttctcaaatttgtattttcaatgctggtatcagtggtttgattttcagcaaatgtgacagtggcctttgcagtggtcagctccgagctttgaactctcagaggaggaaggggaaaaaaattcaacacaccacctccttggttgcagtctcagaaaaaccttggatgagaaacttcttttttcaatcctgttttcctgttgataaattcagttctgtgatcacagttcattcaagctgttctgcgtatgatttttgtgtgtatgtgacaattgcatctaaaacttgtgagcaagaagacagagaaatcagttggtctccatcgctttacataaaaatggctgagtgtcttgtcatgctagcactgcattaagtgatgcatacaggtaggttgaaatttgcatgtttttatagttttttttgagccatgcagcaagaacattagatgcattagaatatgacttttaaaaaaacaaaaattaaataagacagctgtaatcttttggggga

SEQ ID NO: 30710 - DNA, 2300 bp, Homo sapien
gtactcttgcaaatgcttcatatgtattatctcatttagttcttaaaaagccctacaaggtaggcactaatattaaaattagtcccattttatagatgaagaaggcacgggagttgagctaacttgcctaaagtggccttgtaagcaacaaagctgggctttaaacccaggcaggctgaatccaaagcggaattgccttgccctaccacctcccaccttccagtcacagggaaacacagagagcaatactgcatactagcacttcccaaccctggttcctaatccatgtgcctcagttttcttggaggtctttgagtaattttcagagtttccaaaagtttcagtggaaacatacaaacatgcaattattaatagatcacaaattttttaggttggaatccactattaacaacaggttagctcaggttttgagaaagctctgattggtaattgcatatacaaaaacattgcaggtttttgtttttgttttttttaagtgggaagatgaatcattacttaataaatgcagtttagttgagtagatctttctgaacacatggcatatggaggaagaataaagggtgcttggctttgaggaggttgggaaatgctaatatacatgtgtatgcatgttgcccaaactgtcggccttcaaaactcttccttttatttttaaataacatgattatttaatttgacctggagtcaatatatttttccctcattatttaaaatgttttgttggctttatatttaatattggaatctattcatcaagtgatcacattcttaaaacatggtcaggaactgggatgcagaattgcaagtactgtagattcctggctgaaaacgtaaagaattgactttttaatccttttaagctgtggccttgaattttttttttttttaagaaaatttaagaataagactctactgtcaaaacacagggaacatggacgatttaaaaaaaaaaacacctgtccattattcgtgcattagctccacatggccagcttgtggcaggccctctctgaatactttttcaatgagcagcccctggatcttggaagaaagatgccagcggccagggcccttcatttaaagaagaggactgggtcttttgcgtgaaatagtttctgtgccacgttgggaaaaatctatctaggcctctcttgacggccatggaaaaaacacaggtgactccttattcctgagaatttgatgcaattgaaacagcgactttctgcgaatccagtgtgcatagtctcgaacaggagcccacggacccttctgcggcccgaggccttgttctgacagtcaccaggctctgtggcccagagtcctaactgcgttgtccttcggcaggttctgaattgtgtcctccctgaggaggctgaggccgctgcctccttggtggggggccccggctggccactgggtcgggcatggggccttacggggccctcacgggtcccgccgccgccctcctgaggcctggtccttggcgccgcagttaccccagccccgggcccgcggggctgcgggtcgggccgacctcctcccggacgggctgcgtcctctgccccgcgccgggggcgggccgggccggcagagccgagccgccggcgtccattttctgggcggtgctgtgcagcgctgcggccggactcacgggtccggaagcaccatggacccccggggaaacgcgccggcggcgaaggagccgagccccgtaagtgcccctcgcagggtcttcgcggggccgggggcggggcggggcgaggcgcggcctgcgggcgcggcgcccgtggcgccgccagcccgatcgctcctcgcttctggagggagccgggaagccgggctggggaaaccctcgcaagggttgagctctgcaaacgcagcagaaccgagctgcccgcggggaggaagcgcccgcaggtgcccggactccggggcccgcgcccggagcggggcggggcggggtgggttcggctggagagtgcgggcaggttgcgccgcatcccgtggcccaactgcgcggctgtgctagagggcgggggccgaggaggaatgcgctcccggggctggggacgtggtgggctcgagtccagcgggctcgggcactgctttgacagtcacacctcccgtctcctggattgggaatcggaccctagtcctgaccctatgggaacttgatgatttccttgatgcaacaccaagcccctggaattgaaagggacgtgcaaaggcagggacctgcccccaggggtttgcagtctcagccgcctacttctgcagta

SEQ ID NO: 30711 - DNA, 2300 bp, Homo sapien
ggatcttgacaataacttttattcaactgaggtgtcagtttcttccactgaaaatgctgtcagttctgacctccgggcaggggatgtacctgttttatctttgagtaatagcagtgagaatgccgcctctgtgatcagctacagtggctctgcaccctcggtcattgtacacagcagccagttttcatcggtgatcatgcacagcaatgccattgctgccatgaccagcagcaaccacagagccttttcagacccagctgtcagtcagtccctgaaagatgacagtaagcccgagccagataaagtgggtaggtttgcaagcagacccaaaagcattaaggagaaaaagaaaactacatcacataccaggggagaaataccggaggagtcaaactatgttgctgatcctggaggatcactgagcaaaaccacaaatattgctgaagaaaccagcaaaattgaaacctacattgcaaaacctgctctgccgggaacctccacaaatagtaatgttgcacccctttgccaaataacagtgaaaattggaaacgaagccattgtgaaaaggcacattctaggatctaaattgttttataaaagagggagaagacccaagtatcagatgcaggaggagcctttgccacaggggaatgacccagaacccagtggagacagcccactcgggctttgccaatccgagtgcatggagatgagtgaagtgttcgatgacgcaagtgaccaggattccactgacaaaccgtggcgcccttactacaactacaaacccaaaaagaaatccagacagttgaaaaaaatgaggaaagtcaactggaggaaggagcacggaaacaggagcccgagccataaatgtaaatacccagcagaactggattgcgccgtggggaaggctcctcaggataaaccctttgaggaagaagaaactaaagagatgcccaagctgcagtgtgaactctgtgatggagacaaagcagtgggggctggaaaccaaggaaggccccaccgacatcttacttctcggccatatgcctgcgagctctgcgccaagcagttccagagcccttccacactcaaaatgcacatgagatgtcacaccggggagaagccataccagtgcaagacctgcggacggtgcttttcggtgcaaggaaacttacagaaacatgaacgcatccacctgggcttgaaggagttcgtctgtcagtattgcaacaaggcattcaccttgaatgagaccctcaaaatccatgaaagaatccatactggagaaaagcgttaccactgtcagttctgctttcagagatttttgtatctctccaccaaaaggaatcacgagcagaggcatattcgggagcataatgggaagggctatgcctgcttccagtgccccaaaatttgcaaaacagctgctgcccttggaatgcaccaaaagaaacacttattcaaaagcccaagtcagcaggagaaaataggtgacgtgtgccacgaaaactcaaatcccttggagaatcaacatttcattggttcagaagacaatgaccaaaaggataacatacaaaccggtgtggaaaatgttgtcctttgagtggcaagaattagaaaaatcttcaaaaatatagttggtggtttttttagttatgatttaagtttagtttcattttgtccatgtgacagtcatgaaggagtgaaattaaaaaaaaaaaaaactcatttgtgaaaattccagaaaaaggatcctaatatctactttgggttttagcattaactttatgcaaagtgcacaaaaacaaaatagctgactcctccaatatcccaagtttcttgtgaaagttaataaaattcttagctgtggtatttctaccagtgaaaaaaggagtttaattttagcctagtttaaaactttctaataattgctaataagaactggctgctgaactgtctttagtcactggagaaaataagggtcagatatcctgaagatggcatcttcgtaaatatgttacgtggtaataagctgtgtgacggtctttattcccatctggcttctgcactattaaaatttgtttaaattaatggatacacatgaaatacttaaacaatataactgaaattatgtgcataatgagtaacctaaagtaggacattcatacattatgtagaactacttttctgcaacacaaaccttgtaaaatacatatataaatcactataacttttaactgtccatatcccctgtagagaattatgaggagcaatagatctgcaaataatgaggactgatg

SEQ ID NO: 30712 - DNA, 2300 bp, Homo sapien
gcattccactagacacttaacaccctgctcccaatacttatttaatcttaataacaacccttcaaagaagaaagtttagcatttccactttactgttaaagaaacaggttcaaccgggcgcagtggcttacacccagcactttgggaggctgacgcggatggatcacttgagcccagaagttcaagaccagcctgggcaacatggcaaaaccccatctctaccaaaaatacaaaaattaactggacatggtggcgcgcacctgtagtcccagctacttaggaggctgacatgggaggatagcttgagcccaggaagttgaagctgcagtgagctgagatcgtgccactgcactccagcctaggcaacagagcaagactgtcaaaaaaaaaaagaaagaaagaaagagaagaaacagaaacaggtttaggaaggttgagtaacttgcccaaatgtaaaaggggtagaaacaggctctatgtctgattctaaaaagggatgcctttaaaaataagggggaaaaaaccctgtaacacgttgatactctttaaatgagaataattttaacaagggcaatgacagagaatggaaaggaaggaagagatttcagcagagtcagaaggatgtggcaactgaaaacagcattgggacaagggataagaaaaagtcaaagtttctggcctgagtaacagtataagatgtgaactcagatttggaaagggagacaggaaattaagttttggacttatgtttgaaatgacagcaaaacattcatataagaggaagtggttcactttatccaacaagtgtaaagatcacatggggaaatagaagtcacctgcaacacaggcagaactggaagcttcgctggccaggtccatgttaaactctgaccattctctggggctgtccagcctttgcacaggcggcgcgtttgtcttcagttttcaggtttccccgtcctatttcttatctcccagtgcctctggccttttctgtgtctccctccagaatgagctggagctctcttcatcttgacctttgtgtagtctctgaggtctgaggccatcactatgtctgaccctcaaaaaatatttgttgactgactggcttattcctgttgttgccctggaaaagaattaccctgcccgattaagtcacagtttcttccttcttagggcagcgtagttaacaacctcaacaccaggaaattgtcttcctcatcacataccagggtattattcatgcagtttactcactgtaaagagttcccttgaaataaagctaacaattagtcaaagatttacacatttcctagggtcagtcaactttttaacaaagccaacttttagtagtggtggcggtggcgggggggagcccttctttgctttttctgttcctgaaatacaaaagtgatggtaaatgcttcagaatttctctatgagagggtctcaggcactgcactcacgctggagttgggggtggctggtccttttcttgaaccaggttttgcagagaattggtcctagtaaagagtatttgtgtgggaggagtttggcttgctggcggggagtatttggataatactggaagagcctcaaatgcatctcttgcctccttttgaataagatacttttgaggtccacccacctgccaaattccattctattttcttcccacagggagtttccctgattgggaagggcctgtatttcccgcgagcgttaggagatgtgcaggtctattcattgggggagcccaattcccgggaggatttagggatcacgggagggccggggcgttctcctggtggggattttaaggccgctcagagccacgactgggagctacccttagccagcgccccaagccgggagtacggttctctgcagggtagcccggctcgggggtggcgaaggcggtgaatggagacccggggggggcgggggcggggccgcggcgggcggggcggggcggggcgagtcgggccgaggcccgggggcggggccaggcgcgcggctggcctgggcctaggccgctgctgggctccgcctcgcccggctacgcaggcggcagggctgcggcacgggccgggcggcaccatggcggcggcggcgcctgctgctgcggcggcttcttccgaggcgccagcggcgagtgcgactgcagagcccgaggccggggaccaggacagtcgcgaggttcgagtgttgcagagcctgcggggcaagatctgtaagcgggggctgggctgaggggacgccctggcggcgctgggcgcgaggctgagggggcggcgggt

SEQ ID NO: 30713 - DNA, 2300 bp, Homo sapien
ttacattcagttgtaattcatttcttgaatacttagtagctcttcgttttgtttttgtttttactgatcctccttctacagtacataataagaattcacaaaactcacccccaaaaaaattaagctgtaaaagtgctagaattattttatagttgattttttggaccacttcaggtgtagatggatactgcaatggataacaacagcaacaactcgcatttattgggaacttactccagcaaggggcactgtgcttatagtactttacagcttatgtagattgcttttagaagcaagttaatgaagtcccaattgaggtggcttaaacaataaaactatttactcttgcaaattaagtagttaacttctacagttggttaattcagcagctcagcactgtcatcaaggaacacctgccactcagccaacctcaacaaggtgatttctctcctcctcaagcttgttcccccatggtcacagatgagctgcaataattcagagccccacatttttatatgatagcatccagaggcagaaaaggctgttttctccgtactaggagaaaggaaccttctctagagttacccccagctttccctgaaacacatggctacccagtggtagagcagaatcagggtctgttacaaagaagtggatagggcggggatgggtcttgggccagcaaggaacagtgtttgccacagtgaacactcattgatcctcaaatcagcccaacttggttttatcctcattttacagctagagaaacggaggcttagggaagctaagtgccttgcccaaggtcacacagctgacaagtcacactgctgactagggctctgaatcctggccctaccactttaaatgttctttgaaaaatatgtgaattaataattatattttttattcatgtacaataaaaatcaatttgacaagtataaatatttatatgttcttcctagatagatgcctcaattagaaaggttattagaagcatcctaatcctgtcttttctgtattaatgtaattggttctcttccaacagtagtaatccagtttccttggagccctgggaagtttccatatgagatcccagacattctttcttaaatagtacctctccactcatacccatacacaccataccacttcccagctttatttttctctattaaaaaatatcaacctctaccatactaaatatcttattaattttatttaccctataccagagtgtaagttccatgatggcaagggttttcttggtctgttttgtttactactttatctttaagttctacactagggtctaagattgaataggtggtcagtaagtactcattgaattaatgaaacaacatttggcatgagagattatccagggaaaattctaaatacttaatggattatatatttgtcaccctttaaatttttgtatttcttaaattttgaaaaatgactttttttcttctctagggaaaatccaattgttgggaaagcatcttagagtttaacagattggttcagaagaactggaaaatattatttttcttggagcttttcaattcatcatgtattttgttcatggtatttaagaatgagcatccgcttcaatgtcatctgcctccacattgtatttaatatttaataattgaaattaattgtttgggaatcctggtattgatgtattactagagaatttaaagcccaagattcccttcatacctgtgtgaccaaatccatgtttctgcaacttctttttaatcgaaagaatcttcctagaaaagctttgtaacaaagggagaactcctccgtagcaagaaaccatctcttcttgtaacactctgttctgtggacttgttttcactaccatcagtgcctgctctatactgccaacattgtgttttactagaaaattccaattcatgacagttcagagcttttcatttagttcatgtagaccctcccactttaaaaaagaaaaaaaataagaagtgtttttcctttggtccatcagtcattacaggttccattcaagacagtgatagaaactttagaaaactgccagagcatacttgaaagttggtagatccttttgcctaaagatgtaaacaaaactcaagacagaaggaatcagggaatatgtgctattgtgtgcatcttgtttacatttgggatcagtgatggcaaaagaagtaatgagaccactgaaattgttttcattgttttaaataccaggtactcattttcttgatttgaaagtttaacatgacttctaaggacatctcttcaaaaagaaa

SEQ ID NO: 30714 - DNA, 2300 bp, Homo sapien
cagggacgcctgacttggcgattatctcctctattccagacaagttccacgggaaaggggatgccctctcctgccatccttgtcaccagcagtctctttttcctctaccccagcccccttccattcactgtgagagcctctcagtctaccccttccaagactacccttcttaggtgtctcctccgcagtctcaaagctcttggcctccgttcagaaatccgccctaaaaggcttattttttactgtaatactgcatggcctcaatacaaattggaccgtggctcctaatgtcccgaaaatggcactttctattccgacgtgctcaaaaacttagacaacttttgccattgcaatgggaaatggtctgaaattccttatgttcaggatttcttcaccctccatagctgcccttccctcgtcagtcctgttctgctttccaaattctccttgccctctccaaacctgactcgcctcctgcccccactcccacagccccagccgatgattcctcttcctttgaccccaccgatattccccctccccaacagcatcataaccctccaccgtaagtccccgctccagctctccccctctctccccctctctctaaccaccccgcttctgactctgagtcctctccgtctccgcccctcacccgttctcaggcccaacatgctcggcaaccagctcccttgcttcctctctgggaagtagcaagagctgaaggtattgataaaattcatgctcccttttccctcactgatctctctctaattaacaaaggagttcatttccagaggactctgcctcttatattagggagtttcagtaccttacccagtcttatgaactaacctggcatgacctctatgttatcctctcttccacccccaccccagaagacctggactgtatctggaccctagctcaggcacatgctgataccatatcaccaggctcctgcccagcctactggtgcaaaggcagtccccagccaaaaccaccaatattcagcacaagattcagaaggttgacaatggccctcaaaccccaccttcttaatttagccttcaaagtctttaacaatcatgatgaggaaaaaaaggcaaaaacaggcagagtttcaaatgcttacctctgtcatctggggccctgcaggcccatggggccgcagctccacacggaaacctcctagcaatccacctccacctggcacctgtttcaagtgtggcagtgaaggccgctagtccagacaatgccctaacccaggtaagcccaccaggctgtgccccctctgtgaaggaccccactggaagttggactgtgagcaacccccacaaggaccgcccccatcccttcctgagctggccaaaacctgctacttggatctcatcggccttgccgctgaagactgatggtgtcctggaacagacaccctggcaactaccatcacttcatccgagtcaagggtagccctgatggtggcaggtaggcgagtatgttttttctaattaataccgggacaacctactctgctttacctaatttttcaggacccactgagtcctcccagctctctgttacaggaattgatggacaagtctccaaaccccgagccccccaccacccttctgctccctgcacaccttttccttcactcactctttcttagtcctgccctcatgcccaactccattcctaggcagagacatcctttcaaaactccacactactctccacctccatggtgacctacttagaaattcaactttcccctgaggcctgggctatgaggccagcccaagcagcattaatagatcatctacccgctccctcctccaaaagcaaaatcctttccttcttaggattagcagccttctttaaaatatggattcccaactgtgcttcctagttcgccccctctataaagcggccaaaggccctctcaataaacccctaaatccctcacataacatactccccagcttccacaaactccaaaccgctcttgtcactacaccagctctgtccttacctgatatctcccaacctttcactatctgtactgccaaaagctgaggaacagccctcggtgtcttaggacaacaaaaaagaaatccccctttcttcgctccctgtagcctacctctccaaacgattaaacaacacagttggaggacggccaacctgtcttaaaaggctagcagcagcggccactttaactctaaaaagcaaaaaactaatatgcagtcaaaatatcactgtttacagtcctcataatatacaggatctcctctccc

SEQ ID NO: 30715 - DNA, 2300 bp, Homo sapien
cagcctgaactttctgcctcactcctgctttcctttctccccatgcatgcttgcttgttgcactgaactctggcgcatcactcattcctgttctttttgtcaggagaaaaagttctcctgacatgcagtgtgtcaaaactgtactcatctcctccacctgccttcccacttcccgcccctatgctccctcctggcttctattttaaatttcattgcagcagacacctctctccagatttcatgcctcagcaagggcacataccattcctccagcgaaaccattcttttccttttcaccatttcatccttttgactttcaaacttctcaccaactgggtgcgttttatcctcctctggtgccagccttccttctttgttagatacctagcatttacagccatctctaggcagatgtgtggtcgttcagtaagaagagaacacatgttttgtgtgctcactccaatgggtgtctggcttataaagtaggtgtggtccaattcctgtctgctgccaccattgtgccctgctctggccaacagctcagagaggtttgctctctccactggccctgaagacctcccatgttcccccagttcaaacttcacctctctcatgaggctttccctcactgcatcctctacctctctcatgaggctttccctcactgcatcctctactctctcatgaggctttccctcactgcatcctctacctctctcatgaggctttccctcactgcatcctgtaccctcacagcccttaacacaccactcaacaaatacgcatttgcatctaaccaaatgtgaccctgtgtccatatttatgtttctgtatattaatgcattcttgtttcccctgccaggctccattagtctggttagcttttgcccaggtatcaggaaatgaggggatggggagaggctcagaatccaaacttgacagagtagctgtccaccactaggtgatggtggggtcaggcatctccttaggctggctgtgcttctgttttcttttcaatggagataccggctttcttggaaacacatgtgatggtgggctagccgtagaagcactactataataacgatgtgatctttgtcatttcacttcttcagacctcattagtcctacatataaaaagaggaagttaaactagctcaaatgtactgagcagaaggaatggagactgtgcagctgagggagcggggcctgaaaaataagtgtgggttgtgtcgccacacaccgggactcctgggatcccgacctcttttagcggtcaaaagagggcaaactagttgcctaacaatatttagagctatttctctcttttcactctcattctacgagtgtacaccggagtttctagcaactacatggtatgtgaagtcatccctctaatgataacctgtaatgaggttactactgtgatttttaatgaatacattttaaaatgttttaatttcttcaaaagcaaacattaatctctacatatgtgtgtatacatatacaggaaatgtatgtatatatgaatatacatatattcattgtatatgtgtatatatattcatacataatatgtgtgtgtgtatatatatatatatttacacatttcctacataaataaaagttctttaaggtcctaataatttttaagtgaaaaggagtcctgggaccaaaaagttttgagaatcactgaaccagatttctagatctttaagatcatttattcactcaacaaataattgtgcctcctgtggccaggcattttgcagatacggaggataatgtggtgatagcaacatgtttcctgctctgatagagttttacatttgggagggaagagacaaacgaataaattaacaagataatttctgagagcagtaggtttaatgaagccgtaaagcaggacacatatccctgcacaatctgtgcgcctgctcagacgtaacaccccgcagcgcagcaggcagattcagcggcgtcgccccataagggcccgagccctctcagttggcctaggacggcgagggcggggcctgcccgcccccctggcgctggcgtcaggtgacgtcactgtgccgcgccagccaatcgtgggcagccggggtctaggcaccacggtggctggcggcctgcgggcggcgctgtggcccgtcgggcggctccacagagccgccctagccttccgccttccccaagccaacgtctccgccgtcggctccgcggcgccgccatggccgacgtggaagacggagaggaaacctgcgccctggcctctcactccgggagctcaggctcca

SEQ ID NO: 30716 - DNA, 2300 bp, Homo sapien
gccgagacgggcagatcatgaggtcaggagatcgagaccatcatggctatcacagtgaaaccccatctctactaaacaaaatacaaaaaattagccgggcgcggtggcgggcacctgtagtcctagctacttgggaggctgaggcaggagaatggcgtgaacccaggaggcggagtttgcagtgagccgagatcacgccactgcactccagcctgggtgatagagcgagactccgtctcaaaataaaaattaaaaaaaataaaaaatatatataaatatgtatatatctgtgatatcaatgctaccgttttctcaaggttctaccttgctaggctgccactacattcctaagaaccacgggaaaaggcatttgctcctccgaagaaattatcagaccaatttctcactactgaacaatgtggaccggggtaacatataaagaacagaaaagtatccaacatttcccgtgttggtttcaaagcagacagcatggttcagagcagcgggcaccggtgcagatcgcccatctccacggcagaggtgatcgtttccagcgcagcggtgcaaagccaaagggcacccacgagttcattacataattcctggtagcatgaggccaagtgtgtatgtgctctaggggaacagtcggaggctctgacaggcagagcaaggcgatcatgactatgttttcacaaagtgtatgctagcagttgtttggaaaaagactgaccagcttttttccccctccttctccctctctcttttttttgcttgtaaacactttggcataatactgaatgacttgtttttaagctgccttagccttgctttgtgaagaaaaagcctgagtatcctttccctgtggggcacaggttgttatttttggagcagaagttcttagcctgatctctgtctagatcaatttctgtcttgatgaggccgaggtctgtgacagctccgagcgtcctccgtggaaggaagcttcctcgcttggtggggcgcatgggcaaagatgttgaggggccacgtctgaaacttcactgctcttggctccacgcgaaggctccttggcattcagagtctgctcgttagattgtgcccttggaacagtcgcgaccgcatgccgtgagtggcgtgctttctgtctttgggatcatggaaaattcttgtctcattcagagcccagacactccaggccaagtcccttcatttcaggaatatggctttttctgcttatactgcttcatggtatgttttgggtggagatggcccctcttttttttttttttttttttgagacggagtctcgctctgtggcccagacgggagtgcagtggcgcaatctcggctcactgcaagctccgcctcccgggttcacgccattctcctgcctcagcctcccgagtagctgggactacaggcgcccgccatcaagcccggctaatttttttttttttttgtattttttttagtagagacggggtttcaccgtgttagccaggatggtctcgatctcctgacctcgtgatccgcccggagatggcccctcttttaacccaaggtactccaggtcacagactcctcagagctaagacagctgcaggatttctgcaagctattcagggtgcatctgccctggccaacactggagtccttagggcctctgggaacacatctcgggactcaaagctcacaacatcccctctgtaacctgctcttcgtgtcaggctgctagaacctgggaggaaactgctctgacttctcacagttcctctgcctgacctgctattcctaggagtttacatagcttgaggctgataggaaacaagtaaaattagaaacagattaaactactgcatcagcaacaaattagatgacaacggtatgatcacttccttggaacacagttctagctagatattcagggtacagggctatgtggagaaagaccctaagatgaagggaccagtgggggaggtggccccggcaggtgtcccagcagctttcgccttggcaggtgggagcatgacctatcgtgtgcagttcctggcgggctatacatagccagtcaaagcttcttacaagagaaacctctttcacaccctccacgggtcccacccacaggccacaggactcactgtaaatcccttggacgttgtctcacccgggaagggaaagcagccagcagccctccagccctcttgtgctttccctgggagtgcgccccgtgctcagccatggtggacatgggggccctggacaacctgatcgccaacaccgcctacctgcaggcccggaag

SEQ ID NO: 30717 - DNA, 2300 bp, Homo sapien
ataatattcttgtttaccacgttttctttgtgtgccaggtgattagttatcaaagcacgcttattattagcgcacacacacatacatgcacacacacaatgtaaatgaagcggacaggttttgtttcattctaaatatctttctttcttacctaaatgaaaaagcctgttatcaactctaccagtattttaggtttcctctaacctgtagttatatttgtaatgagttgaaaatagttaactacttccattcttttttttttttttttttttttttttttttttttttgagacggagtcttgctctgtcgcccaggctggagtacagtggcgggatctcggctcactgcaagctccgcttcctgggttcaccccattctcctgcctcagcctcccgagcagccgggactacaggcgcccgctaccacgcccggctaatttttttgtatttttagtagagacggggtttcaccgcgttagccaggatggtctcgatcctgacctcctgatccgcctgcctcggcctcccaaagtgctgggattataggcgtgagccaccgcgcccggcaggtaacattctttagttctttcaatcttgcctatgatttaaagaagtgcattccagtctgcttgcatggtgctttgctatttctaatactcatttcatgccaaactctccaacatgcttctacaaatcttttggtgtcattagctcaaaacgtaaatggattttggttattttcaatgtcataattataaatttagcttttttaagcgtgaaaaaagcactttataggaatatattttaccacttttccatttgtgggaggtataattcattatttcttgctttggtaagaaaagtgaggaaaaaggaaaattcatccatttgcaggctgtttaaacttccagacagattataattcatcactccaaacaataagatggctattacatttctccataatttttatttgctaataaaacggaggcagagcttttttctaaaaataaataaataaacaacaacaacaacaacctcccccaccccgcaccttctgtgcaaattcctataaagtcttttatcctgtcgctgagtctgagggcaccccccctcccgtactcgtcagctccatctcgcggaggaaaacgctaccggcaccctcagctccgcccaagggccgcgatctctacaggggagatgaaaagccggcgacactacacaggcgtggaccctccaacgagtgttcctttcctgtgggttaagagtaggagcgtctgggcaaaagctgggagctttcagttgccaggacccttgggaaagcacgtatttagatttcattgataaattcaactgaatcccgagaaaaattatactccattcactggcatatttagaacggaattcccattgacccgaggctcccggttgaacccttcaagggagccaagcgaggacgttctcagaacagcagtgcaccgtgtacattgtgggagccccgcgcgatcccccgcagagcgtcctgtaggaacgtcacagagcccagagagcgtcctgtaggaacgtcacagagcccagagagcgtcctgtaggaacgtcacagagcccagagagcgtcctgtaggaacgtcacagagcccagagaacgcctggggacggtcggggaggcagttcggggaggggacgattaagttccctcagagaggaagccgcgggccgactggagtcgttttcgtgctctccgcacccgcccgccgcgggtagcatcttctcagcgccccggcgcccaggaacgcccaggaaacccagtcctcctcctaagcaacctgcggcgcggggacgcccgccttttgctattattataaacgtgcgtgcgactaaaccttcggatttttagactttcttctcgcttcctctgacccaggctgagggagcccccgaggctactgcggggcggggccggggcggggtggggcgccctcgccgcctcaggcagcgccccggccgctggcgggaggcggcagcggcgcgggccgagcggcgcggggattggctgcggcgggcggagacgtcaggctcccgcggcccaagcggccgcccggcgcggcgcggcgcagtcggctcgagtactccccgtaacgaggaggtgttctcggccgtcccacccttcactgccgtctccgggctgcgccgccggagccgggacgcgcctccgcagccctcgccgcctccatccccgcggccgcagctcctctcgccgtccgcgcgcacaccatgacgaagaacgagaagaagtccct

SEQ ID NO: 30718 - DNA, 2300 bp, Homo sapien
gacgacaccgccagcttccccagtttcttgccagatgaaggctccatctgccggtcttactgtggacggctgccaaatgcccgggggctccctgatcactgccagctcagccttctctctgagaggcctttccagcctcttgctgaaacttgctttcaggagagcatctcagtggaaaatgcacagtggtgaaggaagtcctgtagttggggagggtgtgggtggtgggggcacaaccaatccggttagtgtagagcagcatttgtcatatccactttctcactttcatccaaattgcttcaggacatttttgccactggggcacagtgattcatccaaccatttccttattgccttcttatctcccgccttggctaaggggcctaaagtactgtgacacattatgctaaggtcaggagatttgttttcttctttcatgccctacctaccacttggtcatggctctcaaaagccgaaactcaatcatgagaagtttgtgcactaaaatccaaaaatgacaataccgaaaaggtcccatctccacaggaaggactttctggttctgctaatacatcatagatttgctttcaaacctccagcaaaggttttcctcagtctgagtacaacaaaaagtaattttacaggatgatttttttccttgcagagacaaggtcttgctctgtcacaggctggaatgcagtgacaccatcacagctcactgtaacttcgaattcctgggctcaagtggtcctcccacctcagtctccacagtagccgtggtgtgcaccaccacacctggcttgtttttttattttgtgtagagacagggtctcactatgttgcccatgctggcctccagagatcctcccgcttcagcctcccagagtgctggaattatgggcatgatgtatttttaaaactttaaaacatctacaggatttattttaaaaattttaaaacatctaggttttgtctgctttttttttttttttttttttttttttgagacggagtctggctctgtcgccaggctggagtgcagtggcaagatcccagctcactgcaacccccgcctcccaggttcaagagattctcctgcctcagcctcctgagtagctgagactacaggcatgcaccaccacacccagctaatttttgtatttttagtacagacggggttccaccatgttggcctggatggtctcgatctcttgacctcgtgatccgccttcctcggcctcccaaagtgctgggattacaggcataagccaccgtgcctggctcactgcagcctccgcctcccaggttcaagcaattctcctgcctcagcctcccaagtagctaggactacaggcatgtgccaacacacctggctaatttttgtatttttagtagagactcttttgccatggtagtcaggctggtctcgagctcctgacctcaagtgatctgcccacctcggcctcccaaagtactgggattacaggagtgagccaccgtgcctggccatgtctgctttttgtgacaggtcactggagtagcgacaaggccattttgacaatagaacagtggtggctcttctgcatgaaagactctggcccatcttacgatcagctaaataacactttcctcaagtattaccaaaattcagtttataagtcatgactaagagtggaagaaggggctgggatgcacctgtaatcccagctacttgggaggctgaggcaagagaatagcttgaacctgggaggtggaggctgcaatgagccgatttcgtgccactgcactcccacatgggcaaaagagggagactccatctcaaaaaaaaaaaaaaaaagaaaaaaagaaaaaaaaggagtggaaggacacaagaatgacatacttttatttcaataaatgcttttggaaatgatttttaagaacaaaaactagagacctcctgaaagtcggattaaaggttgtgcaggccgggtgcagtggctcaggcctgtaatcccagcacttcgggatgccgacgggggcagatcacctgaggtcgggagtttgagacccgcctgaccaatgtgatgaaccccatctctactaaaaatacaaaaattagcagggcgtggtggcgggcacctgtaatcccagctactcgggaggctgaggcaggagaaccgcttgaacccaggaggcagagattgcagtgagctgagatcccgcccttgcactccagcctgggcaacaacagtgaaactccgtctcaaaaaaaaaaaaaaaaaaaagcgtgcaaagatgcatatgatgaactgcatttt

SEQ ID NO: 30719 - DNA, 2300 bp, Homo sapien
ccccgctgtcagtctgtgtcctccacgtgcttatttcctgtggtgagagcagttgtggtgtttgtataccttgtgccttatgatcaaggtgggccttggaggagggcgggaaaggagcgaccaacatggcggtcctccacccctcagcgacacccaccgcccgagaaactacagacaatggccacaagtttggcgtccttcaatttaattctttaaagaagtgctgggaagaaaaagctatgtggtttctaccattttagcaggataaagaggataactccttccattagcaaattttacagttgttaacagtactctgccatatttgaaaaataatgccagagtcagtccttgaaaacaaggtagctcctatcagaattcaaatggaaattttttttttttttttttttttttttgagactgagtctcgctctgttgcccaggctggagtgcagtggtgatctcggctcactgcaagctccgcctcccgggttcacgccattctcctgcctcagctgggaccatgcctggctaattttttttgtatttttagtagagacggggtttcaccgtgttagccaggatggtctcgatctcctgaccttatgatccacccctctcggcctcccaaagtgctgggattacaggcgtgagccaccgcacccggcctcaaatggaaatatttcacagaggagtggttcagtttagccctgcaagacatctataacttgactgtttgctaaaccacaactctttttggctacttgggtcatagagacagcagagttgctccaagtataaatgtgacttaggctccctccagcacacagtgtgtatgttggagggagtgtggattagcagagaatgagaactacctcagctattcctgccataaccacactgagagaggggggcacggtggggagcctatttagcttttttttttttttgagacggagtcttgctctgtcgccaggctggagtgtagtggcgcaatcccggctcactgcaacctctgcctcccgggttcaagcgattctcctgcctcagcctcccaagtagctgggattataggcgcatgccgccacacccgactaattttttgtatttttagtagagtcagggtttcaccgtgttgcccaggctggtgtcgaactcctgacctcaggtgatctgcccacctcagcctcccgaagtgctgggattacaggtgtgagccaccgcacccggctctatttagctttttaaaaattatttcctttcaagggccctttaatatctatcaagctccctcccctaacaaaatgggctgtccctgcccaacaagtctgaaatagaccttaaaactgtgctgccttagtggtaagtaaggggtgggggttggacagtgaatcttaagatttcatccttcattcagtaagcatttgagtacctactgtgagcaggcattggggcggagcagcgagagccctgccgatgttgggttctcctcctattggggaaacttgatcacagatggaacacgtgcagattgattgatgagtgctgtggagaaagcagcagcgtagcgggaccgtttgggaaaggctactttggctgggggtggctgggaaaggcccctctgggaaagagacagttttactgagtcagatggtggaaagacagatgtctctatactttcttaacaagccactctgtcccataacatgcacttggaatctctcctaagttccagaggccccactgttccagtttcaagccttcattttggagtctgtttgggaacttttaagacttcaaagcaaagttagctaccagcaatttctgtaaaccaagagaagattgtcacaaagattcactactttccaactgaatctatgcagtagaaaaatcattagaaaatacaaaaattagccgggcgtggtggcacatgcctgtagtcccagctactcgggaggctgaggcaggagaatcacttgaacccaggaggcggaggttgcagtgagccaagatcccgccactgcactccagcccaggtgacagagcaggactctgtctcaaaaaaagaaaaaagaaagaaagaaaaatgattagaaattgagaactattttacgtgtttctaagttgttggctacatcaaagagatcatctgtattctgcatatgggctggctttggtgaagctgatgactggacttctaagaaccgttttcccaaatgggttcccatattcatgcacccaaagcaatggtccccaagcactgatgaaaactaatatgcatttcccaaagacccacacta

SEQ ID NO: 30720 - DNA, 2300 bp, Homo sapien
agttcctggccccaaacagtcaccagtccagcagtgcggcctctcactgctccgagtcccgaggcgagaccccctgttcgttcaatgatgaagatgaggaagatgatgaggaggattcctcctccccagaataaagacaagagaaagcctacgtttcaatatgtgatgctcatgtgtgtttgtagtgtgagctcttgtttttgaaatgattgcttcagtctttgcctttgtttgcactgtgtgttcagtgaaaactagagaaacacaataagcaaatcacatgaaggctgagatgattgagatgaaagttaacatagtgtgaatgaaagtctggccaacagagcagtagatgatataacaaagaaagcatgctttctgaggagatagtggggataatccctgaagagttggcagtgtgagtgcaactcatttatcttctgtgaggtgggatttttgtgttcctcacacccatgtaattattcttagaattgagattgctacacggagcagtccttgacgatcgtgtttctgacgtttctcttccttgcctggactgcctttgacaaggcagaaatgaacatgaaaagtccccaggagaggggagctgtgtagtgagggatactgagggcagtcctgtggctgaggggcacagattgaactgctgaactagttggaggtctagatgaggtgctttacgcatcagctgccttagacagcttctagaaaggagcgagcgctacttcttaagtacttaagtgacatttagataatttatagtaaaactgaaattattattagccaatgcattggtgcatagaatttactagggctacttctggaagccaaaatagaatagcatttccatgtgcattaaatactttgccagcactgcctttgccagcatcctaaatctggagttttacaaagaaggaaactgtatctttaggttaatcaaagctatgcatttcatatagctttttcatttaaaacaagacaaagaaacaaattcctatgaccaaattgcttgcctacagttccctgcagtaattgtatgatctcacccagtgtgcaatttgtgaaaatgaaccaaatgtcattacttttgtcttaaagaaaagtctatttcaagaatatgaacagcagtgtttccttgtacatgtcaccttttttcacattttcattaatcagaatgaccttattgagcctactcctggggtcaattgcatttcaaactaatccaatatttagtgtttcacagaaacactagaaaacgttgaacactcctactgcctggatatatggtagtgcagttatgttgtttatggctcaagatgtcattagaaatactgcagtggtgtattcacagctgctccttctctgaatgaaagagtgtagggacacctgccaccatggccagaccctgactgaatttcacattaaggctttggaaaggagcaaataataatgggagaattaactccaaaactttgacctgaatcatgtggatttgtcccaagattatgctagatgcaccaagcatggcccaaattggttcttttttaaatcccatgggggaagtgcaggctccttcctgtggtgcctctttatagcctcaccaccatgctaacactgagcatggtgaggaggaggaagctttggctagctaaacatgtttaataaggccataaaaactgagaaagaaaaacattcaactttagctgaagctcctttgatacaaaagtttcattctgtcagaaataagccatagtacagactcagagatagaggcagtttctagagaactcggtcttatcgtgggttctggagcacacctctcagaccagtcaggaacactggggaggtgacagcaggtccccaggggcctgcagggaatctttcagctgcacggattgggatttccctccaaaccaaactgtcctttaaggggcagcctcctcttttactaactccaccctttctcatctctgggacccagcagggacctggagaggccaacagccactgctacctttgtagtcttcaaaatattgaactgcaggtcccaagatgcatttcaggatttaagacaggtgcactaatgataaccattccttcaccaagtagcaacattcttgccagagttcttgggaaacctgtttttttctctactctccatctctgctgctctcatgctttaaattgataaaatatgggctcaaaaaaagaaagccgccaaagactcttatccttattggtgccccatcattggccaccccagccataggtgtgtgctgttggtg

SEQ ID NO: 30721 - DNA, 2300 bp, Homo sapien
gtggctcattcctgtaatcccaacattttgtgaggccaaggcagaaggatttcctgagcccaggagttcaagaccagcctgagcaacatagtgagacctcatctttatcaaaaaaaaaaaaaaaaaaaaacactaaaaataaaaaattagctaggccgggtgcagtggcttatacctgtaatcccagcactttgggaggccaaggctggcagatcacttgaggtcaggagttcgagaacagcctggcccacatggtgaaaccctgtctctactaaaaatacaaaaattagccggacatggtggcgggtgcctgtaatcccagctacttgggaggctgaggcaggaagatcactcgaatctgggaggctgaggttgcagtgagcagagattgcaccactgcactccagcctgggcaacagagcgagactttgtctcagacaaaaaaaaaaaaaaaaaaccaggcatggtggcacctagccactcaggagactaaggagagaggatcacttgggcccaagagtccaaggctgtagtgaccctgacagagtaagactctatctcaaaaaaataaaagaactaaacaacaaccaaaaaagtggcaagggacttcactgaattgttttcctgttttaatgttttgtggaaggaggaacttaggagccgtgaaattggatatttggtcaaagaaatctctaagcaaagtgtttagggatcaacatggcttctcttggctgtttatagtaaaatgtgagaagagagaaatgaattaaagatataatttatcatcagaagtgaagatttgggaaattctcagcttggccatgtaaagaataaaaaagcatgttttggagagaacaccaaaagagtggcctagtcaccttttgataaggagattagcgtgcatgggtggaagcttggtgttgttcatcaaaacaatggaagaataaacccatagcatttcagtgattaccggtgctgctcctcccatcacaggcccagagtgccaaggcatgggggacagaactatcaaaagaggggcttcaggcgctaatgaaaccctggcaatcccttcctggcactgtgtcaagtctgctccccgaattttggcacagtgctccttagccattccaggtgtggctccagtaggcccaagtatagtggctgctcctctagagggcacaggtggtgaaccttggcagtgtctgagtgatgccatctccagtgggtgcagagtgtacaagctgcggggtatgataacttccacctagatttcaaaagatgccctggagagccttagcagatcctggcagagaattgctacagaggtgaggccaccattgggaaccctcaccagggcaaagcttggtggagctgaggtgcgcggggttgctccctgaggccctagtctagtagagcttccagcatgcaactccagcctgggagagccacatgcagaagactcaaactctaacccaggagaactgcagcatgggctgcccccaataaagtcatgggggtgggggcccctggtaccctgggggcccaactcctgctccagtgtgtccagaaggcaggatatcaagtcgaagattattctgaagccttaaaagttaatgtttgccctgttgggttttgtattggttgggacctattatccctttcttcttttctattttctcccttttggaatgggaatgcatgttctgtgcctgtcccatcattgcattttggaaacaggttggatttcacagactcacagctggaggggaatttgcctcaggatgaattgcacctttgagtcttacccatatctgattttgggaaggagttaagacttgtgagactattggaatgaaatgaatgtattttgcctgtgaaatagacatgaattttagagggccaggaactggatgctgtggtttgaatgggttcctccaaaaattcatgttgaaacctaatccctactgtggtggtattaagaggcggggccttttgggaagtgatgaagtcatgagggcttcacccttatgagtggaattagtgcccttataaaagaggttgaagggagcaccctggaccctttctgctattaggatgcaaccagaaggcatcatctttgaagcagagaataaaccctcaccaggcactgaatctgccggcactttcattttggacctctcagcaacctccagaacagtgagcaataaatttctgtggtttgtaaattacccagttttgtactccttgcagaagactttaaagaaaattaattaattacccagtctaaggtggtttgttat

SEQ ID NO: 30722 - DNA, 2300 bp, Homo sapien
gatttgtataactaattcattatatactacagtgtaataataatagaaataaagtgcacaataaatgtaatattctggaatcattgcaaaaccatacctcccttcacccctgtctgtggaaaaactgtcttccacgaaaccagttcctggtgctaaaacggttggggaccactagcataaaggaactagaataaggaaataacaaatatggtggtcagttgaatgaggaggagatggagtgaagatctgaagatcatttctagattagatcactgggtggattcgatgatcgtataagagggctcagtcatatatcgagtgagaacaggaaggagaagcagatttgggtactaggacttgctgagtgggtacaagaaatagaatttgatttttatatgtggaattagggggaaaattaactctataatgccaaatgggcagaaaaactgaagggaaagggccaatggaatagttgaaaattccggagacagagtagataattgatgggtgagatccctgaagaggcagaaagtgcagagcagagatgaaagaagtcatttagggccaggcgtggtggctcacgcctgtaatccagaactttgggaggctgaggcaggcgattacccaaggtcaggagttccagatcagcctggccaacatggtgaaaccccatctttactaaaacacaaaaattagccaggcatgatggcaggtgcctggagttccagctacccaggaggctgagacgagagaaccacttgaacctgggaagcggaggttgcagtgagccaagattgtgccactgaactccagcctgggtgacagagcaagactctcaaaaaaaaagaaaaagaaaaagaagtcatttaggctgggtgccgtggctcaagcctttaatcccagcactttgggaggctaagggggagaactgcttgaagcccaggagtttgagaccaggctgggcaacatggcaagaccccatctctacaaaataaaaaagttagccaggtgtggtgatgcatgcctgtggtgtcagccactttggaggctgaggtgggaggatcacttaagccctggagtttgagcctgtagtgacctgtgattgcatcactgtcctctagcctgggtgtcagagcgagacccccatctcaaaaaaaaaaaaaaaatagtaagggaattaaagagtgtggtcaagttttggaagatgggggtcatctgaggaaggcaactaagaaggaaatgtctttgttgtcctacccttaaatgttgcttgtccccagggttttagtgttggccttctttcacatacttcatggatgatctcctttgatatattttgttacactgttaacttctgagagaaacattgataagctgaagtttgttgggggaattaagtagttgatgttatagttcagaaaataataggttggcttttccttttggggggaattttcttggtagcagtttgctatgttaatttgaaatttaaaatactgaaatcacttgaaaacacggtacagatcccactgtttctagtattaataactagttagcaccatgttttttctctagttataaaaccctaaagcattaccaatttgacagtttgaaaatatgttagcttttagtctcagtgttttatactataaagaaatctgaatagttattttacttttcatgttatgtttcatcatcaagtatattatttgttctgttatgtctattaaagatctctttctcaattctgatataaactgtgatttgcgttacatattctctaaaaattttttcttctaaaagactaactgaaagtttcgtagttaattgtcagataattggaactatttattttatagagtttcagtaaaatataaataagattagttatgcagcaaaattaattgtattccttacaacaaagcagtcattagtatgacttttcagtaaggtgtattttgttcataatatgcttcctaagataattataaattacctcaacataatgaattaggaccatgggtgtgtatatagctagaaaatggccttggtatggcagaatactaacttaatgttttgatatcatttcaggcaacatttcatttgttgcatttccagtttccaataccaactcacctacaaagattttaccaaaaaccttaggaccaataaatgtgaatgttggaccccaaatggtaagaaaattatcaaatcttagaattgaaactttgtttagccaagactaatttaaagaataattgcattaaatatatttgatcagatattccagttaaaccagg

SEQ ID NO: 30723 - DNA, 2300 bp, Homo sapien
cttggatgtttaatttccttttgttttaagactataacagagtaggtgtgaccatatctagcccctgaatattctggccttgggtgacacaggtgagcacttctagctgatctgacaggttaaaggtgtacacttattttctctgtaagaagcgtcatctggtaagatgatcaagaatggtgcaaagcaggatggggagtttaaaattgtttccaaatgtgggaatgtaaatgaatataaacatgtaagattttaatataccaaactgatcagattctgtgtaatttccaagtttcttttttctttcaaaactcctctgaaatctgactgtccacaaaaacttactttatagaattttatgtgatttatttactcagatattatactgacctcacatccagtagtgaaaacagattttattgtagaatctggaaagatagagggccatataggttgtattttcagttttgtttatactaacacgtgtttacaacccagtttaatttacaccctgtattgtattattgttgtcatatctctgtatgcatgtaagtataatatgtgttggcaaaggaaaattttgagtaagaagaagctctctgatctatttgattcaatatgtatttgagtgtctaacagacactgttttagacactggtgatacaacactgaacggagcaccaaatactttacagcgtctcctggagctgttgtcaagacatactttccaaggggaatatttcagaataggtgataactagtcaacgaaggaaaagtaccttagtcatctaggagagttgtacttagagtgaactgaaataaactaagctcacgaaagacagagattttttgtttggcttttgtctgttgcattcactactgtatctccagggcccaaaatagtgctcggctcataataagtattcagcaaatatatgttgttgattggagtgtttgttttgaatttctgtaatcaaacacataccttggtaaattatctttacatcttgctagttgaaaattttatctcagttgctttgtttttaatgttaccttgctttttgtttctacttgtgccatacatcaggatgctggaaaagcttattaatattgacagtcatatggttatctgatattgaaaagaatagatttggaaaggaacctaagaggtcatcttttgttcagcttcctgcctaggaaaactaagtaagatgattaggtatgtatatttaattagtcatttaaaaaaaaaccaggacaacataattgagttccctcttgagaaaatggagaaaggtacttaaccctagctataaagggactaacctggaaattttagaacttctgtgtgggaaagtggaaaaaaaaaaaaagcacaactaagctgctctttgttgatatcagaaatgggcctgtcattcattttggcattgaagcatagcctcctatctcggggcaggactgggacatttttttcctcccacaagagctggacagttattacaggttcaaaaagccccgaccagtttttcaagagtttctcctcctcttttccccctgaaactcgtggtgcttttgctctgctttcaagatgcattaagtctcctgctttgtgactgctttggagccagcagatactctgatatgtataattcaaattatgcaggtttcacgagtaagtttaatcttattttttaagttagttaaaaggcaagtgatatttagaaaaatgttaacttgtagttatttcaccctttttactttaagcatttttattgcttctcggccttttggctaagatcaagtgtgtactttaagcattttttaaaataaaaatatccttttaatttaataagaaaacaaggttctacatagaaaagccccttcatctaagacctgcacttttcaatttcttttgagatgtctttgttgtaaacagtattcatatgtcttttgaaagccagttaactaaacagttttcttgagcatctttttagttttactgagaagtattttaaattgagcttttctgagctcgattgcttacgtctgacacagtctcaagtttccactgaatggtaacaaagactgtagaatgttgttggtactgcagtgagaggcatgcttccttagaccaggtaagagagatcagtttgtttctcactgctgggtgagtttttacagctcttattttatattctttaagcagcagcaatattaaattgataaatagccaggagcacgctgatttcaagacgtccttgcttgttgcagacagaaaaactacagggttatgtatg

SEQ ID NO: 30724 - DNA, 2300 bp, Homo sapien
ttagagtagttaggaactgtcttttatcttcatgttcatattgagctttcatttcctccagttcattgataaatttattaaatgcccattttgcacaagatatcaatgcttgttttacttgagccatcggaagagaatttttcttaataaaaatgcctgaagcaaaaaggtaatgtacatctatttctctccattcctcctattgttaatattaccgtagtctgccaccattccttctttagtgtactgcagtaatagcttcctgttaaccttccttcttccagtccttttctgtctctggtccttatgtatggcagccaaagttatctttgttttaaaaatgcatgtatgttttaaaagtcgtttctgggaggtgcagtgactcacgcctataatcccagtgctttgggaggccgaggtgggcggattgctgagcccaggagctcaagaccagcctgggcaacatggtgaaacctgtctctactaaaaatacaaaaagtagtcaggcttggtggcatgtgcctatagtcccaggtactcaggaggctgaggtgggaggatctcttgagcccaggaagtcaaggctgcattgagctgtgatcgtgccactgcactccagcctgggcaacagagtgagaccctatctctaaataaataaataaataaataggaataaataaataactaagtattttctttcctagtggcataagctgtaatctaattagaatttgatttctgagcatagtactttccaactccctttttctgtttcctctttactgtccttttaaattcaaacccctccacccctgctgccccgctttttttttttttgagacagagccttgctctattgcccaggctggcagtggtgcaatctcggctcactgcaacctccacctcctgggttcaagtgattcttgtgcctcaacctcccaagtagctgggattataggcatgtgccaccacacctggctaatttttgtatttttaatagagacagggttttgccattttggccaggatggtcttgaactcctaacctcaagcaatccacctctcttggcctcccaaagtgctgggattacagatgtgagccatcgtgcctggccatagatctcattcttttttatggccaaatagtacttcattgtatgtatgtaccacattttctttattcattcatctgttaacgaacacttaggttgcttccaaatcttagctattgtaaacagtgctgcaacaaacataggaatgcagatatctcttcaatatactgatttcctttcttttggctatatacccagcagtgggattgctggatcatatggtagctcaatttttagtgttttgaggaacgtccaaattgttctctgtagtggttgtactaatttacgttcccatcaacagtttgagaaggttcccttctctgcacatccccaccagtatttgttactgtctgtcttttggatataagccattttaactggggtgaaatgatagctcattgtagttttgatatgcatttcttcgatgatcagcaatgttgagcaccttttcgaatgactatttgccatttgtatgtcttctattgagaaatgtctattcagatcttttgctcattttttaatgggattatttgatttttttcctagagttgcttgagctctttatatattctggttataaatctcttgtcagataggtagtttgcaaatgttttctcccattctttgggttgtctcttcactttgttgattgtatcctttgctgtgcagaaactttttacttgatgtgatcccatttgtttatttttgctttggttgcctgtgcttgtggggtactgctcaagaaattcttgcccagaccaatgtcctggagattttccccaatattttcttctagtagtttcacagtttaaggtcttagatttaagtctttaatccattttgatttgatttttttttttagacagggtcttgctctgttgcccaggctggagtgcagtggcttgataccagctcactgcaacctcagcctcccaggttcaagcagttcttgtgcctcagccacccaagtagctgggactacaggcatgtgccaccatgcctggctaatttttgtatttttagtagagatggggtttcaccatgttggccagactggtcttgaactcctgacctcaagtgatctgctcgccttggcctcccaaagtgctgggattacaggcgtgagccaccttgcccaggctgatttgatttttgtgtatggcaagtgatatgggtctggtttttttc

SEQ ID NO: 30725 - DNA, 2300 bp, Homo sapien
atctttattttcaaaagctatattatacgatgaatataataattgccatcatttattgaacacttactacatgcattacatagcaaaatcctcatactacctctgcaagagagtaagttgaaccatatgaaaattgcccaatatcagcaatttcatgtggttcaacctagtatcttcagactctgacctataaagaggttagggaatccctcatagccataacttcactccaaatttagtactgaatcttttagtactatcttttatagataaagagatcctaagatagttacagctcctctatgacagcgacccctttccctacattagcccaagcactttgtgtgtgtacttccatcatggttatttacgcattgaattgaggtggtttacaatccatttcctctgctacactgagttccttgagggtggatgttttgtctgtcttgctcatttttgtatacgtagtacctagagtgaaaagtatttgttgaatataactttaagttttcttaaagttatattttttgtggaaactaaatttttattgatttgttactggagaatgtgaagtaatcactggggtttttgcattttagaatcagtcagtggagtactgcatttgacattcttggactctcaggactagttacatgcaattatgcatacaattgtctctccaccctgccccagagaaagatctgaaagtgctctcttacctatctcatctcctttaggcatttgcttaaataccaccttctccgtgctaccttcccagatcactctatttaggactgaagccattcctccaacacctctgcttatatttttttcccatagcacacataccagcatgtaatatagtttttgttttacgtattcttttgcatattatctttcccatcctgctagaatgtaagctccatgaaggcaggagtttttgtctctattttgtccactgatgtctccccatatcaagaatagtgtttggggccgggcgtggtggctcacgcctgtaatcccaccactttgggaggcccaggcgggaggatctcttgagtccaggagttccaaaccagcctgggaaacatggcgaaacagccgggtgtggtggcgcgggcctgtagtcccagctactcgggaggctgtggtggtaggatcacctgagactgggaagtcagggctccaatgagccgtgatcctgccaccgcactccagcctcggtgagagcaagaccccgtctcaaaaacaaacaaagtggcatatagaagatctataagatttgactggagtaaaatgagaaagatctaatcgttttaatgcgctgttcacacggggtttttaacttcggcacgaacgaatgaacaaaatcttttcatatggaaccaagtgtacgggtatttggggtgtgtgcagtttccgcgggacagaatgacctgtcctggtttgggtattaacttgccttgatattgaagaacctccacattcccagtggtctctaactcattgtctgaataatttcaaggtgtcccacagttggccccacgcatagcctcaatcacgatcactcgcccccctgtcccttattgatgctcccccagggcgaccccgcaaaggcctggggaccgaatggaactgccccagtccccctccttccaagagagctggggttttctggcttcggggtcagttggaaaagagattcccacccaagtcgcagggtgggagtaggggggatgagataggagtgatgaaggaagtgtgtctaaaattctaggcctcaggcccgcagctgtccctggaggcggcggggaagcggggtggtcgggtcctgcggagggctcccagggaggccacagggggaaccaaggggcggtggctgagtgcacgagtcccgcccctccatctgttggccccctactctcaaagggaagcctgggggcggggtttgtttactccgtgcacgcactgccggcccggccaatccgtggggagcggcgccaggcgtcgcacattctgagggccaatcggcgcgcactgtgctgctccgccgccaaagctcgcgcgggggaagcggggctgtagctgggcagggagagggcggacgaaatcggtagcgatctcggctgcggcgctgccgcagctgcccggcccgcggggcgcgccctgacccttcatctttgggcaggctcgagggcgcgcgcacggttggcgttctggggcctcaaactcctgggccttgaccgggcaggccgcgtctccccgggtgtgagtccaccgggacccggccgccgcctaag

SEQ ID NO: 30726 - DNA, 2300 bp, Homo sapien
tgctgggactacaggcatgagtcactgtgccaagcctgtttttgatttttaagagtcctttcacattgcctttgatttcctgtggcagcttaagcaggaggtagagaccacctgttgcaagatgtgcagtctccacagtagctgggggagcagctgagggaaagggaatttaatttccaagttacaaaatcattatcatttagagaggatcggtcttattcaatctaggcataggtgcagggttagattaaggtatggctggaagagttaccaattagtgacagagggttctttaaatgagttgttgttgttgttgttgtttttgagatggagtttcactcttgtctcccagactggagtgcaatggcatgatctcaccgatggctcactgtgacctccgcctctcgggttcaagtgactcttctgcctcagcctcctgagtagctaggactataggtgtgcaccaccatgcttgactaatttttgtatttttcctagagatggggtttcacgatgttggccaggctggtcttgaacttctgacctcaggtctcccaaagtgctggaattataggcatgagccagcaggcccagcctttagatgagttttgatccttaaaatgttgctgtttgtatatctacatttgactatattaacaaaatgttacaatttttattttaacaaaaatgtatggttgggaaatagatggtttttacttacatctatttatatcaaaacatttacctatgttttatattgtttaataaaataaataaatttgtgagggttggttattttgactaatgaatgaaacaaatgttagttgaaaatgaaaaaaatcttagtttttttttggttatcatttttattcttattttcttttttttttttttttttttttttttgagacagagtctcactctgtcgcccaggctagagtgcagtggtgcgatctcggctcactgcaagctccgccttccaggctcatgccattctcctgcctcagcctcccgagtagctgggactacaggcacctgccaccacgcctggctaattttttgtattttttttagtagagatggggtttcaccgtgttagccaggatggtcttgatctcctgacctcgtgatttgcccacctcggcctcccaaagtgttgggattacaggcgtgagtcaccgcgcctggcctcttaccttcatttctaagattattcatagataattaaaagtcgtgaagtaggttacccattaaaaattcctaaggcaggccgggcatggtggttcatgcttgtaatcccaacattctgggagaccaatgtgagaggatcgctttaggccaggagtttgagactagcctgggtaatagagtgaaaccccatctctacaaaaaaatttttaaagaaatggccaggtgcagtggctcacacctgcaatcccagcactttgggaggccggggcaggtggatcaagagatcgagaccacctggctaacatggtgaaactccatgtctactaaaaatacaaaaattagcttggcgtggtggcgcgcatctgtagtcccagttacttgggaggctgaggcaggagaatggcatgaacccaggaggtggaggttgcagtgagcccagatcacgccactgcactccagcctggcgacagagtaagactccgtctcaatgaaaaagaattagctggatgtggtggtgtgcgcctgtagtcctagctgccttgtagtcctagctacttgggaggctgaggtgggaggatcacttgagtccagaagtttgaggctgcagtgagctgtgatcttactgcactctagcctgggtgacagagcaagaccctgtctctaaaaaacaaaacaaaacaacaacaaaccaaaataaaaacaattcctgaggcatgtcagttatctgcagagtattagtcctagggagactcctatcctatggttgttgctccctattctctttgggatttttttttttaattttaaggaaaaggaaaaagaaacgaagatgtttaatcatgagagtacaataagtgagacaatgctctataataaaattggccactgttaagggcaatgggtttacatttgaacatttttggtaggttgctgaccagcaatcagccatgtttggagagtgctgcttccagacaggtgatgtgaaattaaccatgggaactgggacatttttggatattaacactggaaatagccttcaacagactactggaggtaagtagttaggatttatcctatttattaataaaatatcacttctgttcatattt

SEQ ID NO: 30727 - DNA, 2300 bp, Homo sapien
gaccagcctggccaatatggcgaaacagagtctctacaaaaaaatgcaaaaattaggcgggcgtggtggttgtagtcccagctacatgggaggctaaggcagttggatcgcctgagcccgggaggtcgaggctgcagtgagctgagatggcaccacagcactccagcctgggcgacagagcaagaccctgtctaaaaaaagttttgattcaaaatgagtatgtatgtatgtatgtatgtaagtatgtatgtatgtatgtatgtatgtatgtatgtatgtatgtatgtattttgaggcagagtcttgctctgtcgcccaggctggagtgcagtggcatgatctcggctcactgcaacctccgcctcccggcttcaagtaattctcctgcctcagcctcccccgtagctgggattgcaggagcccgctaccacgcccggctaagttttgtatttttgtagagacggggtttcaccatgttgcccaggctgctctcaaactcctgacctcaagtgatccgcccgcctcggcctccgaaagtgctgggattacagtcgtgagcccccgcgcccagccaaaatgattatcttttaccttttaattgacataccagttggcactgttaaacgttttcacacaaaacatatattcatatgtttgctaattttacaaaaagaagataaggaatattttcaggccccggcttcacagattgctggtggcagtggagaggtgggtggcgcaggtggaaccacctccccactacttgcagatcaggaccctccccgggaaagctccaggcccaggaacctaagccgcaagaatctcgaaatttccacaggacaccttgttccttttggccaagtgtctggatgagcccatccccttgggcagcaacaaaaggtaaagggtctctgtgaggctttcagattccaaaaaaaagcaaccgctggagtggagtgtgatggtcaaagcagccaccttaagctttctcctttctttcccactagagggctgagaaaagtcttcttccttgcgttgtatttcatttggcaaatatttaccgctttgtattgtgtgcaaactttaccaggttttctgggaagagaagtcgtggggagctctcagtttgttaataaatattaatacttttggccaaattttgaattttttatgtcacttgttttatttcatttttgaaaaacagcactttatttcatttaactctagcatattcaatggctgtgcatttaataatactgaaataaagtcgcacccaaaatgttagcaaaaaaatggaaactatatatggtagtgacctctacaaatgttttaagcttgaaaaattctgcacgaacgcagacacaggttagtctgccaaagttactcagataaaaatttctccaaccctcaagtcataatcatagttgagaaatgaataaatgtgccttatggcacctccaaactttttgagatttttatataaactagcctatacttctctccttacgattagcatatggggtagctatttttctttaacagagattcttcaaatgtagctagggttaagagaaacgctggcgctgcctctcaggaagctggagaagcaaaagaaaaaattaagagttaagggccgccgggctcggtggctcacgcctgcaatcgcagcaatttgggaagccgaggcgagcggatcacgagatcaggagatcgagaccagcctgatcaacatggtgaaaccccttctctactaaaaatacaaaaatagccgggcgtggtggagcgcgcctgtaatcccagctactcgggaggctgaggcaagagaatcgcttgaacccgggaggcggaggttgcagtgagccgagatcgcgccaccgcactccagccggggcgacagagtgagactccgtctcaaaaagaaaaaaaacaagagttaagggccaagtcaatccaaccgcggccggcgactggaggctgagcatggctggcgatctggggctgcagatcacggcgcaaacccgctcacctccacccctcccgcgcggccgccggcgcgcgcccgtggcgtcacggcgtcggggtggagccggcggcaggggccaggcctctctaggctctccggctgagccgggttggggcccgggttgggccgcccggggactctggagcattgggatttgtagcgcgccctctgggtaggcggctgtagcggagaggcgtgcgggatcgggatgtcggggctgctcacggacccggagcagagagcgcaggagccgcggtaccccggcttcgtgctgggg

SEQ ID NO: 30728 - DNA, 2300 bp, Homo sapien
taaatgtttttaggaaacacaaagatagatatttcaattttataattgcatttttatataatcttagggataattttaatgatcttaaatgtatacattaaatgatgattaagatcattaaatgtcattatcattagatgtagtatatataatgaacatttaaagctatacttttgatcttatttttagaatgaatttgccatatatttgtgacaataattattttatgtttttaacattctgttaaaatgttctacttctgtattcctaatccgaaaaattcaatttttttttttttaaatgagacagagactcactgtgtcacacagcctggagtgcagtgggtacaatcatcactcattgcaatcttgagctcctgggctcaagggatccttttgcctcagcctcccaactagctgagactataggcacatgcccctgtacctggctaataattttttttatttttgtagagatgggatcttgctttgttgcccaagctggtcttgaactcctagactcaattgttcttcccaccttggcctcccaaaatattgagattacaggcatgagccactgcacctggcctgaaaaattcaattctttaaataaacaaaacagacaagtctggggctcatttttatcaatcataatcatttcaaaacttgtatgttttgaacgttaaaactggtgaattactattttagttataaaggcacctacatagcagtttatataaagatcttcactttttttcagaaaacttaaggtacttttttcccttaacctttaaggtcagcaaaggaggcagaagacaaaattaaaaaggcaatagagaagggagaaactcttcctacagaggccagatttgattccaactgtatcacaccaggtaaattcactgagagacaaattatgacagaattgaaatataaattgaaaacttggtttttaaatgtattttattttctatgctctatttattttggccttagggttccatttactgtattttcccacttatgtttgctcatgagacgatttggtcaccttggtcataaatactcctacaaaaactgtagggattttcagatgtagataaattagagcagatatggacaggaatctcccaggtggacagaattgcagaccttgaagaaacttatgtttatatatctttctgtcctattcctgccatttatttatgttaaaacagactcagtgaggttgtagcttatcaagttgatgtagctagattgtggtagtcagagtaagaaactgattctcctagtccagggcacttactactctgcttctcaaaattagttaagatttttatgactttaaggaaaatgaatttatcagtattatgtttaattttgtatgcagcagcatactctatatacttctacaacctttgtctaacatcatataattctttactttgaatgaaaatcttaaaatctaactttctcatcagttctttactaacagtggtaatttgccctttctttaagtgcattggtcacacattgctcagtttaacaaccggttttatcctgattgtggttttagactgtattgcttttgactgttgaccatctgagcctttcccaaaatgtaatcattgtagactcaggttccaaattaataataatttttcagaataataatttcagtagtaatattattattattattgacaatctgatttaagctgcaagccttaaaaaaaaaaaccttcagaattcagcagaagaaatagaaggttgaggttcattagagatctcaaactctgcccttacatgaaaattcctgaagcacagtgctgagacactagtaaaattccttgactttccctgtgtgacactgattctatttagggggactagtgacattagaaacagttgtgatatttgcaagggaaaagtacattacttgtttttcaggataagcaagagagcttttgaccttctttggagatcctatacctacctagctattcccggcgtactcagattcagttatgtgttgtcactgagaacttaatgtttttatgtctttcttagattaacctttttaaaacattatttttaggaactgaatttatggccaggttacatgaacatctgaagtattttgtaaatatgaaaatttccacagacaagtcatggcaaggagttaccatctacttctcaggccatgaggttattatctttttttatttaaagagtttaaaaaaagtatttaatattctcaagcatataccatattactgcatttttaaaaacaattttatt

SEQ ID NO: 30729 - DNA, 2300 bp, Homo sapien
agcaacagtctccaccccgtggccctcctctttgtgctcgtgggctgcagcgcagcccaccagcccacccagcaccacctctgagaattattcttctaataacgttattcttccttttgcattcagatatgcttaagaaattgtacagttccaagtagctcacttagaacacccatttgcatgtactaacataatgtaaatattaggcagtacagcattgttatttgaatattcattgaaatgtttaagtcctaaacacttccaaagcagatttaaaaaattatttttctagaattgtaatgtgtaaataattccctggtatttcacgtagtccagaaacatgtccaagcagttgatgttgaatcaatcttgcgagcctccaaatcagtatcacaagctaactgtatttgtttaatttcttcttttcctgtatttgctcttacaaaaggggtattggtcagtaaaatggtattaacatttattaaatgtcaaaatataaagaaaggtagtaattccaaattattaacatctgtttttggttttatgtttcttctttttaggccaagacccatgttcttgacattgagcagcgactacaaggtgtaatcaagactcgaaatagagtgacaggactgccgttatctattgaaggacatgtgcattaccttatacaggaagctactgatgaaaacttactatgccagatgtatcttggttggactccatatatgtgaaatgaaattatgtaaaagaatatgttaataatctaaaagtaatgcatttggtatgaatctgtggttgtatctgttcaattctaaagtacaacataaatttacgttctcagcaactgttatttctctctgatcattaattatatgtaaaataatatacattcagttattaagaaataaactgctttcttaatacatactgtgcattataattggagaaatagaatatcatgtgttcttatggtcaaaaactatatttgcaagaaacaagcaagtctaatttcattttacaacttctattgatttccttttaaaagtcctagctattgtaaggattcacttgaagaacaaaattatatggaataaatactgtgggcaaggcgttgtgccagacttgtgcatagagctaccctctcctgccctccaggaagtgacagtctagtaagagagatatataaatataaatagcatatcattaagttcacttaataaaactttgttttaaagtgtgatagggaaaaaatataagccaagaagcgtgaatgtgaaaacgaaataaacattctgtaatttgtgtgatgctgccatactgcagtcccagaatgcagaatccagtggtcatgaaagacagcgatacttaacatttcctgagatcttaaaatccaaaaagtattaaatgtttaaggtttttctgtaagttttcatccagaagacttaaatacaaagtaacgggttaatacattcaaataagtggaaaactcttacatttaaaactgataatttcacttaagttgatagaactctcctttgctgtgcggttgaaagtgtgatggggaaaaatatgataaacccggatgcaagaatgtcaaaactaaacattaaatgatttcgtatccaaggtcttatgttaacagttgcggggggcgggtacatgggaaatttttttgaacaatttggaaaagaacgtttttaaacgtatgtattaagaaacgtaagtttaaattcctcagagaaaaaaaattattgacaaaacaacaaactaagccaagtaaatcaccagatctttcgaaatctgaatgaaaaatactgagattagcaaccctaggagacaagcggaacaaaaatcagtgttcgatacccttcccacaccttcgtacggttttcatgccacttccaaatccacttagaaagcacaactctatcatggggcattttcgcccctaagttgcaacacaccagcaaacctccgcagattccctgaccgccactggacagtaccgcggccccggccgcgcgaggcccggagggctaagccccgcccctcggacggcctcggatcctgccgctctaggcccgccgggcgctctctatggtcggccgggcggtgtgttgtcatccgcggagcgacgaccggaggctgcggcggagccccggcggggcgtttggtttcggtttggccctgactgggattagtgttgacgatcgaaatgggagtccccaagttttacagatggatctcagagcggtatccctgtctcagcgaagtggtgaaagagcatcaggtgggtg

SEQ ID NO: 30730 - DNA, 2300 bp, Homo sapien
cttacaagacgggaaggagctattttttttaatacatgttggaatatcctggctatgcagatacaaatagtaatataacatccacccaaatataacattaaattttgattaaataataattaattcaaatcctactaaaagaaaacccttagggatacattgaagcttcatcatttcattcccttctctcccttccacaggtgcaactatcctggagttgatatctatctttgccaaacatgttttcatacttttatcaaacatatttgtatacataactcacacaacgcattgttttgtggttttaagattgtatataaatgatatgacactattatgtatacctttgaatttgctttttcaatcaatgtagttttcaggattcatcgttggtataggtagtataattcattcattttaactatgaaattatattccactttatgactttaccccctcttatttaatctttgctgtaatcttgtgaggtagacattattaatcccattttataaatgaaaaaatggaagtattaagagattaagtaactttactgaggtcatatagtttctagcagatggaatgagaacttgtgtagggcctgtaactcccaatcccatgtcctttctcctaaaacattcagtgattcattcaacaaatgtttactgaacaccacctatgtgccaggcacagttttaggtcctgggtatctgagagtgaacaaaatagacaagaccttgctctccaagagcttacactctaactggagagagacaataatatagtatgtccgggtgtggtggctctcacctctaattctagtactttggaaggctgaggtgggaggagcgtgtgaggccaagagtttgagaccagcctgggcaacatagcaagaccttgtctctacaaaaaataattagccaggcgtggtggcatgtctgtagtcccagctactcaggaggctgaggcaggaggatcaattgagcccaggctgaggtgagaggatcgcttgagcctgggagattgaggctgcagtgagctatgattgcaacattcattgcactagaacctgaacaacagagtaagacaatgtatctaacaaaaaaaagagggtgagacagaatgtgtatatatgttagtctatatgaggctctttggtgttaatttggcaaacacctgaaggaaaaagggcaatgacagagtggtgttcaaggcagagagtacagcaaatgcaaagttcttgaggcaagagcatatttggctgtcattccatcacttttttctttaagatactgtatcggttaactatcctcatgtaccaaagaacaaatgtaaacatactgcatgactttgagtgattaactacataactttgacatgtcaacaatctcttatggtggtcatctttccaataaattgagttgagctagaaaatgtgtattgccaaaatccattgatttactttaaaaattaaatcacaggttgcggatgcccgtaatggtggcatttccacacacagtactgttgctgatttgatgagacacaaatatattccaaccccattttcaaatattaaaagttggtagggtcctcaacgaaacctaacagtgacttcaagttgaaaaaaaatgcttaaaaggaaaaaaacagggagagcccaccttttggcctgtatctctcagaaagagggacaagagcggtgggaacgtgaggaacttttaaaatgtgagagcgttactctggggaaacctggagtttactcttggcctttactcgctggactgtcatagttctcacatttgtgaagcgagtctgggctggcggccctcaagccctatcctcccccgatgcggaagtcttgcttctctgtgcctcccaggcttgagaacagcagagtctggccgctcaaaacgaaagcttcacgaacgtcgctcgctcggtgctgagaaagaagcctgacgcgacccgggaaacttgaccgacgcacgcccgcccgcttgccccgccccctaacggcttcccggcttcccccgggtcctatgcagaaaagacgctgggcctggcaagcggggccagtagcggcttccgggaggagttttggcctccacacggctccgtcgggcgccgcgctcttccggcagcggtagctttggagacgccgggaacccgcgttggcgtggttgactagtgcctcgcagcctcagcatgggggaacatggcctggagctggcttccatgatccccgccctgcgggagctgggcaggtagggctaggcccagcctgggtcctgcatcctcct

SEQ ID NO: 30731 - DNA, 2300 bp, Homo sapien
gaagcattatttctaaaagtaaaacataggaaaccaccttagttagcaatatgaatgcttaaataaatcatggtatagtcatacatggactattatgaagcatgaaaggcatactttcaaaaactgaaaactttaaataatattaagtaaaactatatatagcaaatatcaattttgtttggaaaattgtatattcatacacatgtgcatagaagaaagattgaaaatttataacattttggccttggttatttctgaatggtgtgcttgagagcaatttagattttattattttccaaatacttttaatgctgcatattgcttttcaacaatcagaaaataaccacacaggatccattttttaaaaggacacatagggcagataattggtttttcctgtgaagtgaagtcctgggggaaatcagagcaaatatatgttttagtcaagaggttagcagaactccatgcaacagcagcaggactacagccatccgtaagtggtctccttgaaataatggaattttcaatgcaaaaaacattaatgccaccgcatccaactttctatgtaggaattcccaaagacaacagcctgtgtgcctccaaaattgactctgagcttttggacacacaggtccagtgttccaggtgtagaacctcactgttgcagtccgggttgtctctggaccacgtggacagaatatttccttacattcgtgcagaatttgtctcctggtatttcttctgccagtggtcctaattctaccagcttgtggccataaagagcaagaataagccttcttcaatacagatgtcctttaaaatatttaaatgtgagtgtgtatttttaacattcattgaggtataatttagatatgctagactgtacccatttaaagtggacagccggcagtgttttgacaggtatatacatccacaaaatcaccaccacaatcaagacgtagaacacttttttcctccaaagcctcctcatgtattttgctttccatccctcctttcaccctgttccaagcaacctttgttctgctgtcactataggttagtttttattttctagaatttccataaatgggatcatacagtactgtatgtacttaaaaaaaaaactggcttataaaagtccttaactttttctttcactttatgaagcagttttataacatctattctttacctttatggagccatcataaaagatgttttagactttcccttcagataattaaccagacagtgaaaatgcattatacattttataagtgaaactgttcttgcctcacttaaatggtagtattggactataacccgtggggcatcttctggttttaacgctgtataatactataacatgttttcagttactattcaaagataattttggatatttgcttgaaattagtccagtgactctaattgaaattcagtaagatgttagggtttgtttgtttgtttttggttttacaatttcctaattatttctgggaattaattcttcatgattttttacatgatgaaaacaatattgccgttttcttttcttttttaagagatagggtcttgctgtattgcccagactggagtgcagtggctattcacaggagttatcatagcacgctacagccttgtactcctgggctcaggtggtcctcctgcctcagccttccaagtagctgagattataagcacataccactgtgcccagctcaacattgccattttaaaattaaagtggcaaaggaacatttatgaaaagaatatggaagctcatagggtagtcccattccataggaagaaaacctgcttgggtaaaatctaaggggtaaggtgaataccacaatgtattttaagctccccagctataatcaaatagaatgatgatgacatccacatttttgcctcttgatttttttatggttctgaaccacacccatgttgcagattggcctttctactgagagtaagttccatcaagattaatatctgtagtaataggcagaacacttcagtgtggaattgcttcttttctttggtcaaacactaactttggcagaggatagacacagcttaggaagactgaattttaagtcttctgaattgtttttctggacttccaaatctcaagtgataagaccagcagaagcaggtatacaaaaatttatctctgtcaatagcagtaagacagcctcggattccaggctgctttttcatataattgttaaattgagataaacaccctcatagtatttcttttttaaatgcattcttgctttgggactctagat

SEQ ID NO: 30732 - DNA, 2300 bp, Homo sapien
ttgttgaataaataaatgggtaagtgaatgaagagaactggttattgacgtatagaaactcttcatctcctcttgtcagttggtggcacatttcccataaactgttgttttatttggccctttgttatctagtactccttatgctctgtgaagagaaatattagagaaatattacctttaatgaattttactaacctttccccacatatacaacacaaggccagtgggaatataaaaatataaaatatcctttacctgcaaggagcaaacaatgataggaaggtgggatgaaaataaaatagcaaaataagaccattacaacacaacacataaccaagaataaattaatgtacatgaacggaataatacataagaaatgaagacactgagcaaaggaaaagacagaggtgatgaagtcttatgccaatgggaaggcgttaaggatatgggggaatcggccttccaagctgtcaagttgagagtggagaacagagaccgcattaatttggcaatgtggggtataatgaaatggtaaatacttgggaagactgaagcagaaaaaagtcccaatgttaaaataacagtgtattgttattttttgtttttgtaggagattgtcaggcctccctttaagagatcacaagccgggcaccgtggctcatgcctgtaatcccagcactttgggaggctgaggtgggtggatcggctgaggtcaggagttcgagaccagcctggccaacatagtgaaactccgtctctactaaaaatacaaaaaattagctgggcgtggtggcgggcgcctgcaatcccagctaccagggaggctgaggcaggaaaatcgcttgaacctgggaggtggaggttgcagtgagctgagatcatgccattgcactccagcctgggcaacaagaacaaaattccgtctcaaaaaaaaaaaaaaaaaaaagatcacaaaagagttagtcagtttggaaccagtgtcactttacccccggtgcgctgttcctggcttaacacttcataatggtgcataattgaagttctcgaggtctctaggattgtctaagcatgtgggaaattattttatgtgtttgaaaataaaattgtctttttaaaatagcccaggatttggcaaatccaggctgttggcaatcaaattaattacttttttttgtttgtttttgagatagagtctcactccgtcacccaggctggagtgcagtggtgcaatctcagttcactgcaacctccacctccctggttcaagcaatacttgtgcctcaaccccccaagtagctgggattataggtgcatgccatcaggcctggctaatttttgcatttttagtagagacaggatttcaccatgttggccaggctggtctcgaactcctgacctcaagtgatctgcctgccttggcctcccaaaatgctgggattacaggcatgagccactgcactcgaccaatttttaagaaaagttttctatcatagctgtcccttgtgaatgaatgaaaaagttgagctcagttattttagtgctgaaggatgctcaggaaatctttgaattatattgcaccattttcatatattttaccctttgtccaaaggacagtcaaggctgttatgtagagtaggagactaatatttaacaaaataaatgatatcccaattcatacttatattcaacagtcagtagacattccagttaaagaaaatctgataaaaaatggacaggttgatatggaatatgaatacttactttttccaaaatgaatgatacagctccctgttgtgaaatgttgttgaataaggagattgctagacatatagatgaaaatattttccaggttttcctttaaactagaaggaaaattcttcaactatttcatagctgttttttttcacatagtgatttatttcagtgaccttgtgatctgtaaacttgtaatggagggctgaaaatgggaagtaacataggaaaagggaagggctgtggtgagagagacaataatttgcaaagaagaagaggacatggggtaccagtagaacttctactcaccagagatactgaaatattctagaacctctgatctcagtcaattctccataggaacactatcaagtctttttccataaaagtcagataaaagaaagatcacatttcttgatattctttgaagcaactttatttttattgtcatgcttcatcctgcccgaatactgccaagtctttctcaggcacctggaatctgctcctcagcctctgttgtcctgggtctaatgtagagcaaaaggctg

SEQ ID NO: 30733 - DNA, 2300 bp, Homo sapien
acaaatggtgctgggataattggcaagccacacgtaggagaataaaactggatctgcatctctcaccttatacaaaaataaactcaagatggatcaagaacttaaatctaagacctgaaactataaaaattctagaagataacatcggaaaaccccttgtagacattggcttaggcaaggatttcatgaccaagaacccaaaagcaaatgcaatgaaaagaaagataaatagctgggacttgattaaatgaaagagcttttgcatggcaaagggaagagttagcagagtaaacagacaacccacagagtgggagaaaatcttcataatctatgcatctgacaaaggactactatccagaatctacaatgaattcaaacaaataatcaagaaaaaaaaaatcctaacaaaaactgggctaaaaacatgaaaagggctgggggcagtggctcatgcttgtaatcccagcactttgggaggctgaggcaggcagatcacctgaggtctggagttcgagaccagcctgaccaacagggagaaacactgtctctactaaaaatacaaaattagccgggtgtggtggcacatgccggtaataccagctggtcggaaggctgaggcaggagaatcacttgaacctgggaggcggaagttgcggtgagccaagatcacgccattgcactccagcctgggcaacaagagcaaaactctgtctcaagaaaaaacaaaaaaacatgaatagacaattctcaaaagaagatacacaaatggccaacaaacatatgaaaaaatgctcaagatcactaatgatcagggaattccaagtcaaaactgctatgccgtatgtaccaccctacttccgcaagaatggccataatcaaaaaaatcaaaaaataatagctgttggtgtggatgcggtgaaaagggaacacttctacattactggtgggactgtaaactagtacaccactatggaaaacagtgtggagattccttagagaactaaaagtagaactaccatttgatccagtaatcccactactgggtatctacccagaggaaaagaagtcattacacgaaaaagatacttgcccatgcatatttatagcagcacaattcgcaattgcaaaaatgtggagccaacccaaatgcccatgaatcaatgagtggataaagaaactgtgatatatatatatatatatatatatgtggtatatatatatgtgatatatatataatgatggaatactactcagccataaaaaggaatgaataaatggcattcgcagaaacctggatgggactggagactattattcttattctaaatgaagtaactcaggaatggaaaaccaaacatcgtatgttctcactcacaagtgagagctaagctttgaggatgcaaaggcataggaatgacacaatggactttcgggactcggggaaaggttgggaagggggagagggataaaagactacaaaattaggttcagtgtatactgctcgatgatgggtacatcaaaatctcacaaatcatcactaaagaacttactcatgtaaccaaacaccacctgttcctcaaaaacctatggaaataatatggaaataaaaatttatatatttgtataaattatttaaacataatataattatatatctatatatcctttataaatgagagttcatttccagcctaaaatgagtacaacatacaaacccacgagtctggctctccattgtgctttaaagcatagtgcaccagaatatgaaatagctggacaattccacaaaggatttcgactaaacattaagtcgtcagagactcaattaacatactgctccatatttgcttaattaccttaaaccagtaccctgggtgtggaaagggacgattgagcgaagtcttcctcagactgcggttcacctcaccagagcgaaggaagctgcagcgggctccaggagcccagtgcgtccccaccgcaggccccacccacccacgccccgcttgccgcaggccccgcccacccaagcccgcccttgccgcaggctcctccctagtgtcgtcgctacagaggagcagaggatgacgtgaggacagagtcgcgaacatctcctcggagcgcagctgggccagcggttcccacagccctggagcccaacgtgcgcagaagcgcctcttggagctcctctcccacagatctctcgtcctcttcctgggctaggccgccccaggcgcggcccctgcgactcctggcacggccccgtgctcggctgccgccctggcgcgcgccacactgtcgtc

SEQ ID NO: 30734 - DNA, 2300 bp, Homo sapien
cggcgtgagaacaaactaataaaagtctctcaattttaacacatcaacttctcaggacatttaaggtttataattttggtcagaactgtagttccaagtcaaatatgtgtttttaagagccaataatatgggttttagtaaattctaaaatcacatggtaaaatcaatgtcttatgagtgtcaacaacagaatgattggtgttaaaatcctaactctttagtgagcatatgaacacagtcatcaatctataaattaagaaatggctgtgtattttagttcaaatagtttcctatttaggcacatttaatactttgttatttattttaaattttgaaaacttagcttagtcctgaatgaagtattttctggtttacgaggactgcaaatcattaccagaaagtgaattgagcaatatttccctttataatttaaaactatgactttcaaataaacaattatctaaaaacacttatgctattagatagcatattcttgaaatgcgtgcaaaatcaacaaccatttattctcctcttccctgttttaaagacatttttattgggttgagagtgtttcaggatataaagcagtttgccaaattctgtcacccttttttttaatgtcataaagggtgtggtgcctgtagagaagttttgaaagttgtactttatgatgtttttgccttcactttttaaaaaaatggtaagataatctaagtcctgtccgtatattctggttcctagtataggcttcagggtgcactcactatgaaaagtcagaatatttcctgtagccagttttacttacttccttgccaggagtgtttaggttcttttttttttttttttcttttttgagatggagtctcactctgtcgcccggggctggagtgcaatggcgtgatctcggctcactgcaacctccgcctcccgggttcacgcgatacttctgcctcagcttcccgagtacccgggattacagacgcacaccgcaacacctggctaattttttgtatttttagtcgaggcggggtttcaccatcttggccagactggtttcgaactcctgacctcgtgatccgcccgcctcggcctccaaaagtgctgggattacaggcgtgggccatcgcgcccacccgtgtttagattcttaacagctcattattagaaataaagtctcgataagaactactttaatacttaattttcttgcttagaaaggtgaaaacaatttagaaggaacaacgtgaggcatcaaagttaagctgtatctcccatagctggtgattattaaaaatctctatgaatctagtctgttcctgtcattcttttattaatccctggttattgggaagctcttaacaaaataaatgtttaaaattatatttctgtaattaagtaaaagagagtattgattccacaaggctagaattgttcgtctaagaaaaacgaattctccgtaaattttaacccgttaataccacagaaagatgctgttggaaaggtctaagaacagagagatgcaagcagagaaacaccattttcagaacatgacatgggatggtgagatttgctgatttggttccgtcttcattatctgacatttaatgacagttcacacagaaatcgctcgcctgaaaacccgtgtttaaatcccggcacagagactgtcttccttgtcattgtcataccagtaaaaaaaagaaaagtatctagagagagagagaggagaataagcacagaagttaaaatacaataaaatcccttttccctttctttccttggatctgggttttgaaggagacaaagaaggacccccaggctttccagcagccagcaagcgctattactttttatttaaaagcaactgggaaaaacattccccaaagcaaaaccagaagccctccctgagaatcgtctctgggcgtcggggcccgggccgctggggtgccactccgcaaggggttcctcttctccccggggtccctgagggctggacgagagaggacccgtcggtcccggggtgccgggaggagacgttcgcccgccccacgagagggggcggctctggcctcggagccgcccctcctgccgccggagaacaaacgggatattcagcagtggcctgtggctgccagagcagctcctcaggggaaactaagcgtcgagtcagacggcaccataatcgcctttaaaagtgcctccgccctgccggccgcgtatcccccggctacctgggccgccccgcggcggtgcgcgcgtgagagggagcgcgcgggcagccgagcgccggtgtgagccag

SEQ ID NO: 30735 - DNA, 2300 bp, Homo sapien
cgctttggcctcccaaagtgctgggattacaggcatgagccaccatgcccagcctacatttttcaattctattgcaatgtttttgatctgtagcatttctttttggttctttcttagaatttccatttctctgcttaccttgcccatctgttcttgcatgctgtcctctttatccattaaagctgagcacattaatcatagtggttttaaatttctggtttgataatttcaacatctttgccatatctgaatctggttctgatacttgttctgtctcttcaaactgtgggtttttttttcttttttgtatgtcttgtttttgtttttgtttttcttttttggatagcaggaatgatacgtgtcctgggtaaaaggaactgctgtcaacaggcctttagttaggtggtggtaagatctgtggggagaggaagtgttctcctcagtctttcagtgagcccattactctggattgtgaacttcatgtgcctctaggtcccttcccccacctcaccttaggtgggacaggatggctggaatggacttgagttggatatttaaccccagcaggtcaggctctggttacatagtttctcctgaggacagaccttgttaagaacataatgctctagcatatttcaaaatggctccttttcccctcccactgctggaagcaggaggggatttttttccctaatattcactgtgagacctggtagtgctcctggaggtaaaacccacaaaagtgtggggacctctctatgattcagttcccctggatttttatctctcagacttgttcacacttgtctgagaactggctccagcaattcacagttacaagttcagacttttctgtgccagcactggttcccatggaggtttctgctcttgaagttgtgattctctgtatttgcctgttggtcttcccaattttgggggaagcaatttgtcctgtgccatcacttctcttatagagctaagaagagttgttgatttttcactgcttttttttttttttttttgagacaagaatatcgctctgtcacccaggctggagtgcaatggtgcaatctcggctctctacaacctccacctcccaggctcaagcaattctcatgcctcagcctcccgagtagctgggaccacaggtgtgcaccaccatgcctggctaatttggtttttcagtttgttcagctttttactcattaggacagagtggcaacttccaaatttcttacatgctgaaccagaaactgttttgttagttttttaggattcactttaagtcttttcctccagggagacttccccaactttcaggtctgcattagggacccctatgatgtgctcctgtagatgctttttgtttcccatagcttttatacatattgtgattgtcaattcacttgtcagattcccccgttagactgttggctctgtgtggaaaggacggtttgccttactcattcctgtattctcagcaccatccatcaatgcctgacatataataggtattgaataaatatgtgttgggtgaataaatgaatgaatggaagagcttattctctgtaattacaaataaattagaagcagctgttaaatataattcattcattcaatcaatcactatttactaaaagcctatcatgtgccaggcactaggttaagaaactgatgatgaaaaagccacataaatatggaaacatgtttgtaacacaatctaatgaaaaaaaaccagaatacatgtatgtacaccataatttaaactctttaaaatatgtaggaggcaggctggtattgcacagtggttttaagattttctatttttagttaaagtctctttcttcaaatgaaatcttagaaggacaatgtataaaacataaaaagcaagattttctgcttgatgcgggggcagaggccagagcctgcctacccttttcctagtctgctctcctgtctgtcctctgtgctactgccaccttcccaagccagaagtaagccactgtggcaccttcacagaggattatttgaaaattcccaaaatagacttctggttaaacattgcagtttaaaaacctgtgtttttctttcatctctttcaaaatgctactaaaatgacagcaaagaagccaaaaaggcccaagtccacaagacagaaagaataggtgaaaagtccatgtcatctcatttttggagatggacatggacaggggctgaaactgcagtaccagcagatggggagcttaagaaggaagctagttcatggcacagcacccgtaaagtccccagaattggaggca

SEQ ID NO: 30736 - DNA, 2300 bp, Homo sapien
tcaaagacatcacctgaattttttccaggggcaagaacaagtgactatctccctcccgcttgaccacccctgccaacctccctacttcaaagcctccagtgggttgggatccctttgtagcagtgaactttttccctatggttttgcagcaccttccttgagcaaagaagaaaacacaatgaaatttgaaaacaaaccaacaatagcaacaacagaaactccaaacagatgggcgaaccagtagtctcctccaaggcggaggctcactttttactgcagaattcggagctgtttaggaacttcctgattaccagccccaggcagaccaccagcagcagcatgtagcccacagtacccgagaaagtgggtgcggcaggcggcgcctggaggaactggcgcaggccctcttctacgtagtacacctggtcgtagatgctgaggaaggtgaagatgtggaagagctggtggctgtggccgataatgtcgaaaagacccggctggatgcgctcggggatcttgctcacgttgaagaaggcggccaccaccagccagaagtagcggcggtagaagtgcacgaagagtgtggggttctccccacgcaggtcgaagagccagctctcgagcataatggggcaggccatgctgagcggcatgacgaagacgaaggtgcgcagcgcgaacgggtaggtacaccagtcggtacggctcttgcagcaggccacagtgcaagccaccgccagcacgaaggccacaggcagcaccagggcgcggtaggcggcgataaggcgcgtgcagtccacgtgccagcccaggcgctgctgcaagtatggagtcatgactctggcatccagcaagctgaggcctggcaacaggtagtagtagtaggccaccgtgctgccgaagccgtagtagctgatggacgcgtagtccaggtagaagaaggcggcgcgcagacgcagcgacaggcagctgaacacgtgcgccgtgcagctcatggcgaaggtcagcagcactcccgacgcgtagcaccacaacggtagcagccacgggtggtggaagggcacgtcgccgccgctcaggaagaacagacggcagaacttgctcaggaacagcagcagcgggatgaagtgcgtccagaagttgagcgtctcgttggtaggcttcagcaccgaggctaggcactcctgggccgtgcacggcagacgccggtagcccgacaggatgaagcactccacgaagtcgtcgggcacctcgtcccagcgcagcagcggcttggcagacgctggggggtcccgggaggcggcagagtgggagttccgggcggcccccgaagctgccggggccggggccggagggccttttgtgcccgcgccccggggctgcaggcgccgcggcatggtgcccggggctcggctagggcgcgcgcaggcgacctctggcgccggctcccgggcgctgggcagcccccgccggccgccgtcggagcctttgtgcccacgccgggggcgtcgctgcaggtttaggagaagacccgtgcctccgagcagccgctcctaaaaattaaataaatcaataagagaatcaattaataggcagcgctgcgaccgccaggagcgcggagcgcgcgaggctcagcggcttcctcgccaagcccctgctaccggcgcgcggccgcccgcgctgcggcagcggcggcggcgcggctgactgcggcggcagcgcggcagcggtgactgggcatcgcgcggtgcgggtgcctccgccgccgccgcccccggagcgggaggtggggatgtgcgagccgaggcgcggagggagggacgggcgcaccgaggaagggcgggggcctcccaggctagggtttcgcggccgcttcgggggatagagttgtcccctgtctcgagttccgtaccatccccctcctcgggccgccgcagcccgggccgccccgttaatgattgatgcgggggccgcaggctggtcggcgacgcggcggcgcgcgcgccgagtactagagtcggccctggggttcgaaacccgacagccacgcgggcgttctggaggacactggggagccgcgttcgcggggggcggggagctgcggctgcggggggaggggagggcgccggagccgggcagggcggagagatgcgccagcggtaatctccggaggtcgccggggaggggggcactccggaagtcggggggctttaagcccgcgtccggatcggggccgtgtcattgtcagctacctggggatgcgcctctcgctccctcactgtctttgcgtgtgtgttagt

SEQ ID NO: 30737 - DNA, 2300 bp, Homo sapien
aacactaaaataagacactggctaaataactacaacaaaatctcacttcttaaaaatccacgcctaaaaaaaaaaatccactagacaggaatgtgtggcagtgcagaaaggcagaagactgaagcgcacgtttgatctaattgtgtaagagcttgctaaatcagttactacttgaaagtatacttcagagagaagactgaaacttctagactgtttctagcatccttaagtaactgcagacacttataatactgaatgatatcctagttataaataattcttatccataacttaaatccatcttgaggctctactaagtaaatcttccttaacctacttagaggatgtgcagtagcgatgaaagtagcctttcttttctttttctttttttttttttttttgagacggagtctcgctctgtcgccaggctggagtacagtggcgcgatctcggctcactgtaacctcctccgcctcctgggttccagcgattctcctgcctcagcctcccgagtagctgggactacaggcgtgcgccaccactcccacataattttttgtatttttagtagagacggggtttcaccgtgttggccaggatggtctcaaatctcttgacctcgtgatctgtgtgctgggagtacaggcgtgagccaccgcgcccggccttaagcccctttctttaaggctcaagggcatattttcacactgcagtgcatcacaaccgttttcattcttccagtgttcctttcttctggtctccagccacctgccaggtacttctgattaattacatataagatttatccaagccaccccctccgtttctaccaactggacttcattctcttcagttcctgctagaatgcacctcctacctgaagtcttccctcatcaatgccctccatgatcagcctttgactctggaatcccttaatatattcctcagatcattagaggttttctgagtcatcatctgagatttttcattaaattgtggagtttgagcagccagtcctgagctgtcggactcagttccaaatagaagtcctagttaaagacacaaaaacaagaagatgggttagctgcggctcgaagagctggtgagcgcgaccacagggcagcttgcggacggttctttcggacaggacaagggcgagggaaacggcagaatggtgacgcacctgagtgcgcccactagacgaaagaagaccaactaagccttcgtgtagtgcgtagacaggccgacacacacacacacacacacacacacacactaacacacacgcaaagacagtgagggagcgagaggcgcatccccaggtagctgacaatgacacggccccgatccggacgcgggcttaaagccccccgacttccggagtgcccccctccccggcgacctccggagattaccgctggcgcatctctccgccctgcccggctccggcgccctcccctccccccgcagccgcagctccccgccccccgcgaacgcggctccccagtgtcctccagaacgcccgcgtggctgtcgggtttcgaaccccagggccgactctagtactcggcgcgcgcgccgccgcgtcgccgaccagcctgcggcccccgcatcaatcattaacggggcggcccgggctgcggcggcccgaggagggggatggtacggaactcgagacaggggacaactctatcccccgaagcggccgcgaaaccctagcctgggaggcccccgcccttcctcggtgcgcccgtccctccctccgcgcctcggctcgcacatccccacctcccgctccgggggcggcggcggcggaggcacccgcaccgcgcgatgcccagtcaccgctgccgcgctgccgccgcagtcagccgcgccgccgccgctgccgcagcgcgggcggccgcgcgccggtagcaggggcttggcgaggaagccgctgagcctcgcgcgctccgcgctcctggcggtcgcagcgctgcctattaattgattctcttattgatttatttaatttttaggagcggctgctcggaggcacgggtcttctcctaaacctgcagcgacgcccccggcgtgggcacaaaggctccgacggcggccggcgggggctgcccagcgcccgggagccggcgccagaggtcgcctgcgcgcgccctagccgagccccgggcaccatgccgcggcgcctgcagccccggggcgcgggcacaaaaggccctccggccccggccccggcagcttcgggggccgcccggaactcccactctgccgcctcccgggaccccccagcgtctgcc

SEQ ID NO: 30738 - DNA, 2300 bp, Homo sapien
cagctactcgggaggctgtggcaggagaatggcatgaacccaggaggcggagcttgcagtgagccgagatcacgccactgcactccagcctaggcgacagagcgagacgtctcaaaacaaacaaaacaaaacaaaaccctgttaagatctagtgtgctgagctcttcaaagtggtaaagtataggttccttggaaacagaagggtctctgatttaggattggtggggagggaggactgtaagccttcctggaggaagggacatcttcacccagagtagaattggattagacttcaatgagagggcagggcaaggttgagggaagaggcccagaactgaaaaagtatgacagaatccagcagtagaagtaaattgaattgggttggagggtgcaagtcattctaatttcatgtgtagcacttgtcactttcagatcatttcttgtttactgtctgttcttctaccctcataccctcacagagaataggaggcctggcctgctgattccttagtggctggcatatatgtctgttaatctttcttgagagccagccttgtgtcagatcctgttctaagtgcttccctcgctccccacccccgccattcaacaaaattctacttcttcagagctggttcaaatgctttcttctctatgaccacccccccccctgccccgccccgtctcttttcctcactcctactctcagaattaattacttctttcagaggtccctcagctattgatccttccttgcagcatcaatttaattatgcatagtgtcagtttgcggtttccttgtctcctccatttctcattaagttttaaatcatatgaagacagtgcatgtttgtctgtctctgtaagccctacaacactttgggcaggcttttacacacaaaacggggctcaaaaatattttgaataaatgatttagggagaggtccacaaacgccctccactcccaccctagtcctcagagcaatactttaaaataaaaatctgaccatttcaaccttgttaaaggccgatcttcattctgagaacagaattctaactcctaagcacgatggtgacctcagggcgctgtgtgaacctgcacccgcacccctgtccaaccacgtccctccccacacctggtctaataaaacgactgctttaggtgacctgcacgatcggctgtactgattcatgccacaggcttttacctcaattactccctctgtctggaatgtcctttctttccttgcctggcctgattcgggcatggccttctcaagcaagctttccgtctttgaatctaggccctgattaagaactttttaaaaaagtactaagttcagaaaagtttaatatggtgttcccccatttatgtgattaaaaatgaaaacaatactaaagtgtaaaatgtaatctttaaaatgtcacacaactttacatgcatgctagatttagaataccatctgtatttacgattttctcttattgactgtctccacgcgcacccactctgcagacgccctaaagagtgtctatcggatcaccctcaagttgggtcaaacggctcctcttctcggcttttcgggagcaaccctatctcaacattcaccatcttaagatgagcagactgcaagtttgcctctcccaccagtatgggagctgccgaagcggcaagaacagcgtttccgtccatcgagcgccaggtcaccagtcagctccagtcctattttgagttgaagtaaaagctcctccctagatggccagtgcacgtctttaaaaagcgactcctttcccacaaaggaaatacgactggttcgcatctatcaagggttggcgttgggataagagggtgaagtatcagctggccctgattctctgaattcccggacccaataacgcgaccaagcaccgtgactcccaggaaaactagcggagtgagcgcggctgaggaaattactgacaccggaagtcacgtgagcggctgcccctaaggtcgctatctcgacagtcgactattcagccttgcaggcgcctctggcgggcttcactgagatccgctctttcggtgctcgactcgcccgtgctgctgccgccgccgaaggaggggcaaagctcaagatggcggacaaaacgccaggcggatctcagaaggccagttcaaaggtaatttctgacaaaatttcgtaagtcagcggatctaccactgtcgtttggggcccacagacgcttctggcctgtgagaggcgattgggattggggtctgcattctagtcgcgacggtaggcccgggcgccgccgcaccg

SEQ ID NO: 30739 - DNA, 2300 bp, Homo sapien
tgctgtaaacattcatgtgtgggctttttttgtgtgaacttatgttttcagttctcttggatacatgtatatacacacaccgagaagtggaattgctgggtcacatggtaactatgtttagccttttgagaaactgccagtttttccaaagtggttgtatcactttacagttccaccagtaatgtatgagggttccagttttctcacgtcgtacactaacactttgagaccagcctgaccaacatggagaaaccccgtctctactaaaaatacaaaattagccgggcatggtggtgcatgcctgtaatcccagctactcgggaggctgaggcaggagaatcgcttgaactcgggaggcagaggttgtggtgagccaagatcacagcattgcactccagcctgggcaacaagagcgaaactccatctcaaaaacaaacaaacaaacaaacaaaactattttgtttgaaaagtttattttagtcattttagtgtgtgtgaagttgtacttcattgtggttttgatttgcatgtacttgattatattgagcatcttttcatgtgtttattgtccatttataagtttcttttggagaaatgtctgttcagatacttggcccactttttaattgggttatttgtatttttgttgttgaatcgtaagagtattttacatcttcttgagtcaaggttcttatcagctatatgatttggaaatgttttctgttctctgggttgtctttgcattttcttgatggaagcatggaggttttaaactttaatggagtccaatttatcagtttttttcttttgtttacgcttttggtgtcatatctaagaaaccatcacctaattcaagattatgaatattcattcctgtggttttctcccaaaagtgttatagttttagctcttacttttatgtccatgaaccattttgagttaatttttgtacatttagtatatggtgtaaagtagaagtccaacttcatttttctgtatgtagatattcagttgtccaagcaccatttgttgaaaagattattcttccctattaaattatgttggcacttctaaaagaaggattccaaaagtagattaagaagcagttttaaaagaggattccaaagatgttacttactgttccagtaactcatgtcctccagaggtgatttttgaagagtgcgtatttttggcagttactttccatggcagttcagttacttcatgttcattaatttccctgactactggttgtcattttaattgtttaattgtagtaataatttaattgtttgttattttgaaggaaggggaagggaggttcaatgataagaaaagcattcttcctttttaatttaaataattagaacatacaatttgtactgaaatgatgtaaaaaggctcttattattgaatcattggttttgcttatccttttgtttgaagtataacttgtcatatcctttatagccacttaaaaaaggagagaaagaaaagaaaaaaagcaatttggaactcttcaaagaagaattaaagcagtaagttttatagtgtggagaataactatcataggtgtattgagctgatacataaacagatgcaagtataaagaatatactgtaccagttagttattactaaccagtttgctatgagattgttttagatattataatatttggtgggctatctttgaaaataaattagcatttagtccagcacctgggttgcttgcattacgaggattcagttcaattgatttacttaatgtccagagtcctgtttgcagtggaaacagtatactcactgggatgggagtgaggggcagttagacttagcaagaaacaaattcagtggttttagtgtttaatttcctcctcacctttaaagtaggctttgtgttccattggtagtatgatatatcagaaatttgctcgtggttgtattatagctgagggaccctctaatcttggttatcagtaccagtatttaattacagatatttctagttatttgatgatagtaatttgataagcgctattctgaaatgtgaatgaacaaattttggctcattataagtgattgtaaatattttcaacagaattcaagaggaacgtgatgagagacataaaacaaaaggcagattaagtcgatttgaacctcctcagtcagattctgatggtcagcgtcgttctagtaagtggcatttattttaatgtgtatgcttgtgattaattacagtagttcccaccttatccgtggcgggttacattccaaggatcaccagtggatgtctgaaac

SEQ ID NO: 30740 - DNA, 2300 bp, Homo sapien
attaaaatctttatctgataattctcagtgtagtacctatttcagtgcattgatgtgcattctggcaggaatgttctgattctttgcatttggtgaacgtttattgttcactgaacacatccatttgcatttatgtaattgcttagtgtataatgacttcaaatgcagtgattgcctgcaaaacttgtgattagatatgtagtattttcaatgcatatgtatatttttgcttgttacttgttaacaatactcacatattctatgtttattatctgatgtgacttcatatacagactctgtcgcaagccatagtcaaagtggttatcccaacagaaaggtacatgtttttctttattattactgatctaaatatagacaatatccccttctgaatttaaaaagaaatggtgttgaggaaaaggtagtatcttgactgagcaatggttccttcccagtactttttgcggggggatgtgtgaaatttaactaacttttgtatactttgcaattttatgtcagtatctttttttgtttttattgttatcactgtagggaatgtttatagtttgactagttagagtgtatttattagctctgatttggagtcagacaatagactattgtcatgggaaaatagatgttttaagtgtgtcgtaaatttcagataacgttacagtttgacccaatctgttgttatttttttcttgttttctgaattatctgcatttaatatataaccttggtttgagttctccttactgaaggcatagctttgttttttgttttttcaattgattttaagaagaaattcctattattgtcatgaacactggacatactagaaactttcttttcatggtaacaaaggtatttggaattcttttattttcctttcttcctttttttctctttcaacacactattaaagcagaagaattcatgctgtaggtatgctcttgctcagtcaagctaagccttttcccaaacacaggaacacaacactggttgaataataaatgaacacaaaagaataccaaattctctttgacattggccttggtgagcaacaccagctgaactgtctgcggcagcgggggaccaggaaaacatcatgggatggattgggaaagtatacagtttttgaccagacattggtacgatcgactccaataaatgtggttttattataactgagagacaattttttgtttttgttttttttttggttattgttgcccagaataagataattaccattttaaaattaaataatgcactttaaatatatcatctttttgtactacactgttttattctaatagaaaagtcaccatttttaaaataaacacaatccttaaggaagaagaatgtgattacagttctttagtaatcttgacatcaagttaataacaattaattgtcagattttgattttaaataatcatgaaacattttaaaaatacttataaacttttaattttctaaaaatagatttatcagttacaagcctgtttaaaactatagtgggtttttcaccactgataaaagcattcacaggatagtatttttgtagcattcaaaaaaagcacatatctagtggtagctttacatgtatgtggctcagcttatttctaaacaaaattttgagtgtgcgttttgccgaaagtcttcactcaccattaggatgaatcctttgtttttaaacttgctaaacaattttcctctatcttaaatgctaaagtcaagttgcttttgacttaattcacacaagtttctggatgtataacatttgtccacctagtaattagtcttatacataaaatttcccttagctttaatttggctcctatcagtggggagttttggaattgaatcataactttacattatcgcccttccttcaaaataatgtcattaaccatatgaatgctgaagaactgcatatttgcagagcaattacttctgtgaaagagaaataatttttaaatagaaaattaagcaatgtttttagttttttgttttgacaatttgaggttgaattagtagttttaaatgcatgatttcccctttgtaaagatttaaactgtgatgcaattttttttacttcctttaggcttaaatttttttcactatggagagatttcattttaagtaggtttgtttgaaagctatgagaaaataattatagtcaccttgagatagattattttattgttcatgtactctgaaatagggcattatagagccacaaaagtctgtcttgttctataactatatatttatttacattctagcagtta

SEQ ID NO: 30741 - DNA, 2300 bp, Homo sapien
tgagccaggatgagccaggagaaggaatttcacaaggtaatgtcatcagttaaggcaggacctgccattttcacttcttttgtagtggaatgtcatcagttaaggcaaggaccagccatctggatgtgtacatgcaggtcacaggggatatgatggcttagctttggctcagaggcctgacagtttccaatagaacataacaggcagcagagaagacagagactgaaagagcatcctgggggagatggaattgtgacaaactaaaccagtgagccgaaattaaggctagccctgtggcatgactggctcttgtgcaagtgacattattatgtgacatattatatgtctgggtcattactatgctaaaataagtagattaaaatgaaaggaatttccaaacaaatgcgggaaggaaggcattatgaagttttcagatgtcattagctataacaaagttcagaattaatcatgacaccatgcaaaatgggaaaaatttgcaagcaaggagagggtggagatgccagaacccgtaaatttatgccagctgagcactgtgggggcacctggcaaatggatttactattttgccaacaccagtaaagtgttacaaaattgcaaacggaattatttctatgcaaacaattgtttttaaaaagggtccctacatcgactaatgcaattcagtttttttctgggtaagcacaaagccagaaactaaatgaaaaatattagaaattatttttcttggaatcatgttgaatattaaaattgagatttactttcctccccaattccctctctctcccatcagtcttttcatgcaccaatgtcattttagttttcgtggtaaaagaggtggtgaaaaaggggcaggggcatttgagagagtaggcgaagggaggctggggattccagaaaaggaaaagatggggagtcgctcaattaaactctaccaccttcatctgttaacagggattcttgcctgtctcgacccacttccagaggcaatgccatattatttgagaaagctggatataaaatttgagctctgctgtccttgtcccaatccccctccccaggagaaaaaataagctgaactgtactcgtgacattatgggtttttctggaaaacaaggataaataagttttttgaacatttttctcccctgaaactaaatccgtaagagagttaaaaacccgtggaaagcgagttaagtcacttttcaagtctttgtactcaggggattctgtaagactcatggaagaataatggcgcaaacagcaatattttaatgttagaacggtcctctgaaaagtctgcccgaaacgctacaaagataattgtgcagtaacttctaaaaactctactgggacaggaggcaacaaaactccggatcagcgagagctctgtttatccgagggtgctgagcctcaggccccacggagattcccttttcggcacttggaggcctgaactcaggtctaacctttcgtgtgcgcgctctgatactcaaccaccgttcagtctccggaggctgttacaactgtccccattctacagatgaagttgaggctacagcttagtgttcttggggagggagggagttggggggagagagagacgcttttcctcataaccttaaacaaaagtacttaaacctaaagcaactgaaaaatgattttctttcaacaacggtgtttcctttggggtcaagttctttgatctcatctacaaaaccaagaagcgggacaagtatttttctgcaaattagaacggggcgttcccctcccccatcaccccaattccagaggacgtcaatcacagtggacgcagcaccgcgagcggaaatgcggagagcatcggggctccgcatgtggggcacaatgaaacaagagcagccccggccagaggtccagtaaagcggaaagacggtcccgcccgcacacccctccggaaaactgaagcgtctcctctgacccccaaggtcagaaagatttattacttccttcgagagggcgcagccacagacccactagagagggcgggcagggtgtcggaagccagagaacggcgctccgcgtcctcccaccgctccagggcgcagaggtgtcctcagtgcccggagaggttggcagtgtcggccccgagggaagcgtggagcggacggccgacaggggatttctgcccaaacttcatcaccaactctttctgagagcaaaaacatggggccgagtccggcagctgcacgcagaatccaactctctggcagctctcggcaccgacgagctccagatcccgc

SEQ ID NO: 30742 - DNA, 2300 bp, Homo sapien
aggtcaaggataattaagcctttcccttcagttaagtcaaatatcacaggaagggtacaaagtttggcgaacaaagtgatcataccctgttgagtgggaaggaagagaacatttcccaaagtgcagactacagatcagtgggcacacccagatgattttaggtgacatacaggtgaactttctttttctaaattacctatttttacatatattaaaaagaaatataattagcacatcgaacttatgatttcatagatattctttaataaaatctcctgaatttgaataaaaatgatttaaagaaaaacgtacataaataatggtacagggtatggccaaatgatgtgatgggagcgctcagaattccagaagcaccaggccagggaaacacttctggaagttatggaggtggagagaaggataaagccgtgcttgttctatgggtcagatctactagtggcaaccacaggttaatagaattacttctaaagctgtgctactgtgcaaaaacctttgtctgaagggcagaatgcaaatggaatgctttctcatcactcttgtttcttcactggaaggaagaaacatgctggagaatgtcaactcaaacacatcaagcatcacagccttgggcaccaggtttcctaacaaccagtggagttttataccttttcccaggacttgcagatacaaaggacccagatgtgggtttacttttccttttttcctgcaaagcacaacactttacaaaaaagaaaaacacttcaaaggcagtccttttctcgcatacatttcaaggcttcattcaagatccacattcatcttccttatccaattacaggatcaaagcagaagtgtttggcctactttgggggtttaaagacatccaggaaaaaactaagaccatttaaaactaccttttttgatgccacacatcttcctgtagaagcattggagttggttccccttgctctctcttaagtcatctctggataccaaaagtcaggtcagagagctaacatgctctaatcattggcaagataaaagattcagttacatctctgtaaaatccaatctaatctcagtcaatgtgtctagtgtacttttgctctccacactgctacttttggagtttcttccaaaacccactgctaaactcttgatttttcctgattagtttttaaaatcctgtattaaaataaaaaactgcaaaaaaaaatctgaaatgtcatttcattagtctccctaaagctagtggatctagcacatatgttcattttaatgctcaatatggagttcatatttcctaaaataggacatgccttatccttcatattcacactctgggatctgaggccctggttttaaaaaaaatagcttatatgacatcctcaataatatttaagtgaacagactgcctattggtggattgatttttctctatggaaataaatctgttggcagccgccagaattggggtataaaagatgaccttgggcagctgttgccatttgttttggtgggaaaatgagggttttgtctctccatgggggttagtactgtgatgttctgagcaccatcagtgctctgtttctgaagggttacactggagaggaggaatgctttgtggtttatgacaagatcatggcagaatattttgtgcacacggtgatttgtatcacccatttgtgcacaggccataaaagtgcactttttatcaggaacatctgtgaatatataacagcactgaagacatatggccactaaataattcacagttatctatcttctcagcagattccttatacacctaccatgttttaatgcctagtttgctcagaaacaatattctttatgacccttccaatataaaaatgtttactgactggcagcaatatatagatcccatgggatggggctataaggaagcagaaagatttctgcattctccaactctccccttctgtatctgttttcccctaactcttccaaccagcacccaacattacagggaaagatacctctccccaaagtgggtgcgaaatcctatctgggctatgagatgaaagtcactaactaacctccaccctcttctcttttcagttctatatccatttacagtcccaaggagaatccaaatgcatttgatgccgcagcattcttccagtctgtggggaatttcctgggaatcttcgctggctcatttgcaatggggtctgcgtatgccatcatcacagcactgatatcctttgtctgtatgtggaaagctgggactgtcaagaacagtcagtatccatggaata

SEQ ID NO: 30743 - DNA, 2300 bp, Homo sapien
aacagattgtggccatgtaagaagggcccagtgtgccagatcttacaagtttttcttgcaaaaagccatatgattttttaaatgttaaatatactgatttgaatgtgttgacatcaaacctaaaactttttaaaaagacgtgtaagccaatcaaaacattctatgggccattaatcttttgtcaagttgcttcattggttaaaagagtgaaactggatgtcacggatcaaccagagaatgtttattctactcagatggaataattgtgataaaagaaaaccaaagtaattcaataatgacaaaaaacaaaaggacaggaagtttctgaatttgtgttatcttgtatatctgacaactcgactgaacctgtggagttgcaaaatcataaaggtagaacctgctagcaaagctccatgaaatgcttgcaagcattagctgataggtttcaaaacagtatgaatattagtcatcacagatattcctgccaaaaagggtagcgtgtcagaagaacatctgcagcacacataaataccctctgctaagttaaactcagagaggaaataagcttccaaagttgcacaaagcaaagatgctgaaacagcagagctttgtattaaggggttgatagacttgctctcatggtgaaactgtttgttgaggaggtagttagctcccaataatattacatgcttgacctttagcttttagtgacaaaaattgtttcaggacgcatttgggctcagcctactcaataagaaatcacattgtataaattgagcattaattgtgtcaaaatggggatcataagtgattaatactcccaaattacaatgatatggtaaaatgaaaaaaaaaatcagctaaccccaggatatacccaaatgtgttataggatcaagtgttaaaagcaagcaggtcataatatttgctaagaaaaaagaaagaaaaggaaaaaaaagctgcagaacccatggtattatcttgaactattttaaagtagaaaaatatgaaatcagacaggagcaacctgccacatggaagatgatctgaagaatcatcactcttatgatcagaatcctgtgaatacagagctttcatttctggtggcagaaccatttctcagtgagcaacattgttttgccataggacagaggaggttgtgatctattgcagatttctgtgggtcctggatgccgagaccaggaaccctacaaagagaaatccatgcatgtggcgttgctgaggatggctgcgtgagtttctctttcgaagtaatgtgttttgttttttttcttttttgtctcaacgtatccaaacagtacagttgtagagatggggatggaattttatttgtcttttgctttcattgttttctcttgttaaaagaaaaacaattgatttagagtttaaaggctgctctgcaactatcaattatataaagccaaatagagtcatatactaaatcctttcttgcttctcaactaaaaaaaaaaaaaaaaaatcctgtgaaatcactttaggtttgcttaaccaatgtacagtcatgatttgagagcataagaaaccctataagaaaccctatgccttaagtgaatcccattgtgagatacttgagctatgaggcggaagtttcaggctaagcagtgtaatatcttttcaggaggctaatatgctgatccatttagagcacagaggctgattgataactgtgctatcaatccccatcactttggcaggtcttggttagagaggaaagatcttgcatttaggtgaagttgagtcaggaattggctttttgaacttagaaaacgttgctagtgtaaggctaccttttttattattaatctacagttcatatttatgcagcttaagaagacttatttggaataataagaccgtgattcaagatcttagcatcattgcttgcagatttgtccagtatgaaagatattttcatgagatgaatcacttaaagacattaagagtcagtgatgaaaccacacactctcgagtttgaaaagagacagggctgctttaagagagaaacaggaagttgtaactagaagccatctgaatactaagccagggcagaatgcttgtgaagtagcaactaaagtggcagtgtttcttctgaaattctcaggcagtcagactgtcttaggcaaatcttgataaaatagcctttatccaggtttttatctaaggaatcccaagaagactggggaatggagagacagtcaagggttatgtcagaaaaggatgagtatcagtttcaacatcagggagcggtggagctgctt

SEQ ID NO: 30744 - DNA, 2300 bp, Homo sapien
cctattcgatacaaagaagcagtacaggtacctccttaatcctgttactagttacctaaatagtctcactatgccccggttctctcagcttaatcagtttaatggcaacttatgtagtacttttattgttttaaaccaattctaaatagattgtctactattaatcgaacaaatttatgaggcatatagaaaagatgtcagaaagaagaaatttgtagttaagtaataacttgctttgtttacaattcagcagcagcagcagcctcacagctgaactacagcacaggtctccagaaccatcacaccaaactccttttcctaagaaaatctcacttgagcttttaactctatattatatggagtttggggatatttgaaagcaagttaaataaaattcccaccaaaggcggcataaggcactaggcagaagtagccaaacttaagtacagtaagtcaatttctagaaagctttgaatattatttcaatttgtctgtccgtattcaatgcaaatcgttacaaaatcacgtctattttgaatttattaaatttctcaaagtttttttttcaaaatctgagttcttataagaatttgtaacaaatacctgttacaattaaacaatactgaaagtattgttacttttgataacctggtatagatgtttcttattaacccgctgtagagttgatctacacatgccagttaccatggtcttctaaaagcactgttcaagccctaaaattaactcagttaagactcagttgtttaataacgtatcaggaaccacctgtccctcagactaaaaatcacttctcattttaactactctagcactaaaagtgaatagcataataatgtatctactagcgctactgctaaacagtccgggtcccctgaaacttatccctaaacacagtgctttcgtgcggcatctgcgccttacttttgcagtctggggtgactgagtcaacgtgaccgtgcggagcaccaagcagccccgggtccccatggctaccgccagggcaacgcttcgcggcccgctcctcagggaccctcaggggcggcaccgggaaatcagctttgcggagaggaaccgcagggctccggggacgggctagggcagccggcgggcagcagaggcaagcctggcaaactcttcccggcttcttcgcggcgcttggggcagacgtcctggcgacaccaggccgcgtcggttccccttcatcctattttccctttaacacggtggcttgagaactttattttgtgctcactcaagaaaattttaaatgattttacagatacaaccccaaagatgaagctccaacaaacccgccactactcgagcctttctcaccgtcttcctcacaggccccaccccctaccgcgaggagcacgagctgaggggaacacaagcccccgtcgggcactccccggcctcgccccaccccccaggcgcgcacccaacccatataaggcgaggggaggcaatcgcgccagctctgcctccgcctcgcgcgccgtccagagggaaggatttgcaatagacttcctcagttcatttcttcttattccctcctcccttaaagggccgtttccacaatagtgaaaggaacgcaccagtaaaccacaataatcataaaagatgactgtaattaagactctttctgaaaccagaaaccgcgagttcatgcccccacctcaagagcccgagcttccccctctctgaaccgcccccacacccgctcccgcgagctcccgcttacgctttccgggcggcgcgcgacgcgctcgctccgcccctctggccccgcccccggctccccttcttggtctcaggagagccagcgcgcacaagcaagggtgtgcggctctgagacgtgcgttgctgcttgtgggtgtgagacatcctagctcctcttccccttccgtgagtccctcctttcctcgcagaccccacttgtcgtggctggctgccgccgcagctcttgtgcgaagccagcagtgcgcgtgcgcgcgggcacgggcgcgcgaccgtcgggtccccgcgctccctccccctcccgctcctctataacttggctggcgtggaggaggcgccgccggagtcggagggcggggagctaggaggagggagctcgagagttgtggagactagtgactgggagaagtcgcagcccgctcaggcccgcgccttcccgctccccgtcttcctctctcacacacctactccgccctccgccccagcccgcgcgctagctccttctctcgcccggggttcctgccggtagctctccgggt

SEQ ID NO: 30745 - DNA, 2300 bp, Homo sapien
tattaacccgctgtagagttgatctacacatgccagttaccatggtcttctaaaagcactgttcaagccctaaaattaactcagttaagactcagttgtttaataacgtatcaggaaccacctgtccctcagactaaaaatcacttctcattttaactactctagcactaaaagtgaatagcataataatgtatctactagcgctactgctaaacagtccgggtcccctgaaacttatccctaaacacagtgctttcgtgcggcatctgcgccttacttttgcagtctggggtgactgagtcaacgtgaccgtgcggagcaccaagcagccccgggtccccatggctaccgccagggcaacgcttcgcggcccgctcctcagggaccctcaggggcggcaccgggaaatcagctttgcggagaggaaccgcagggctccggggacgggctagggcagccggcgggcagcagaggcaagcctggcaaactcttcccggcttcttcgcggcgcttggggcagacgtcctggcgacaccaggccgcgtcggttccccttcatcctattttccctttaacacggtggcttgagaactttattttgtgctcactcaagaaaattttaaatgattttacagatacaaccccaaagatgaagctccaacaaacccgccactactcgagcctttctcaccgtcttcctcacaggccccaccccctaccgcgaggagcacgagctgaggggaacacaagcccccgtcgggcactccccggcctcgccccaccccccaggcgcgcacccaacccatataaggcgaggggaggcaatcgcgccagctctgcctccgcctcgcgcgccgtccagagggaaggatttgcaatagacttcctcagttcatttcttcttattccctcctcccttaaagggccgtttccacaatagtgaaaggaacgcaccagtaaaccacaataatcataaaagatgactgtaattaagactctttctgaaaccagaaaccgcgagttcatgcccccacctcaagagcccgagcttccccctctctgaaccgcccccacacccgctcccgcgagctcccgcttacgctttccgggcggcgcgcgacgcgctcgctccgcccctctggccccgcccccggctccccttcttggtctcaggagagccagcgcgcacaagcaagggtgtgcggctctgagacgtgcgttgctgcttgtgggtgtgagacatcctagctcctcttccccttccgtgagtccctcctttcctcgcagaccccacttgtcgtggctggctgccgccgcagctcttgtgcgaagccagcagtgcgcgtgcgcgcgggcacgggcgcgcgaccgtcgggtccccgcgctccctccccctcccgctcctctataacttggctggcgtggaggaggcgccgccggagtcggagggcggggagctaggaggagggagctcgagagttgtggagactagtgactgggagaagtcgcagcccgctcaggcccgcgccttcccgctccccgtcttcctctctcacacacctactccgccctccgccccagcccgcgcgctagctccttctctcgcccggggttcctgccggtagctctccgggtcttggcgcggcgggggcgccccgggggtgccctcgccctcccgttgcgggcgggcgggcggtatgtggcgcctggtgcccccgaagctgggccgcctgtcccgctcgctgaagctggcggcgctgggcagcctgttggtgctgatggtgctgcactcgccgtcgctgctcgcctcttggcagcgcaacgaactgaccgaccggcgcttcctgcagctcaataagtgcccggcgtgcttcggcacgagctggtgccgccgcttcctcaacgggcaggtggtattcgaggcgtggggccgcttgcgcctgctggacttcctcaacgtgaagaacgtgtacttcgcgcagtacggcgagccccgcgagggcggccgccgccgagtggtgctcaagcgcctcggctcgcagcgcgagctggcgcagctcgaccagagcatctgcaagcgggccaccggccggccccgctgcgacctgctgcaggccatgccccggaccgagttcgcgcgcctcaacggcgacgtgcgtctgctcacgcccgaggcggtggagggctggtcggacctggtgcactgcccctcgcagcgccttctcgaccgcctggtgcgccgctacgcggagaccaaggactcgggcagcttcctgcttcgcaacctcaaggactcggag

SEQ ID NO: 30746 - DNA, 2300 bp, Homo sapien
ttgcaatagacttcctcagttcatttcttcttattccctcctcccttaaagggccgtttccacaatagtgaaaggaacgcaccagtaaaccacaataatcataaaagatgactgtaattaagactctttctgaaaccagaaaccgcgagttcatgcccccacctcaagagcccgagcttccccctctctgaaccgcccccacacccgctcccgcgagctcccgcttacgctttccgggcggcgcgcgacgcgctcgctccgcccctctggccccgcccccggctccccttcttggtctcaggagagccagcgcgcacaagcaagggtgtgcggctctgagacgtgcgttgctgcttgtgggtgtgagacatcctagctcctcttccccttccgtgagtccctcctttcctcgcagaccccacttgtcgtggctggctgccgccgcagctcttgtgcgaagccagcagtgcgcgtgcgcgcgggcacgggcgcgcgaccgtcgggtccccgcgctccctccccctcccgctcctctataacttggctggcgtggaggaggcgccgccggagtcggagggcggggagctaggaggagggagctcgagagttgtggagactagtgactgggagaagtcgcagcccgctcaggcccgcgccttcccgctccccgtcttcctctctcacacacctactccgccctccgccccagcccgcgcgctagctccttctctcgcccggggttcctgccggtagctctccgggtcttggcgcggcgggggcgccccgggggtgccctcgccctcccgttgcgggcgggcgggcggtatgtggcgcctggtgcccccgaagctgggccgcctgtcccgctcgctgaagctggcggcgctgggcagcctgttggtgctgatggtgctgcactcgccgtcgctgctcgcctcttggcagcgcaacgaactgaccgaccggcgcttcctgcagctcaataagtgcccggcgtgcttcggcacgagctggtgccgccgcttcctcaacgggcaggtggtattcgaggcgtggggccgcttgcgcctgctggacttcctcaacgtgaagaacgtgtacttcgcgcagtacggcgagccccgcgagggcggccgccgccgagtggtgctcaagcgcctcggctcgcagcgcgagctggcgcagctcgaccagagcatctgcaagcgggccaccggccggccccgctgcgacctgctgcaggccatgccccggaccgagttcgcgcgcctcaacggcgacgtgcgtctgctcacgcccgaggcggtggagggctggtcggacctggtgcactgcccctcgcagcgccttctcgaccgcctggtgcgccgctacgcggagaccaaggactcgggcagcttcctgcttcgcaacctcaaggactcggagcgcatgcagctgctgctgaccctggccttcaaccccgagccgctggtgctacaggtaggcgcggagccagggcagggggcgtcctgggaggggccgcgcgtgggaatcagagtcgggagaagtggctcagccagcgcttgccgccagttcggactcggccgggctgggccaggctgcaggcgtgggaaggggcgtctccgggggagccccggggctgtgcagggaggccgagggcgaccccgctgatggagagtctgctcttgttacctagattcgggcgcatttcggatttgactgtggatctttcaacgccagagggagtgcgtctcttaacactccccaaaatgtctctactgcgagtttccttccgctctctaccctgcctttctgcttttatctgccggggcttgcaggtccgcggcgcagactgttcacgagcccttggacctttcctagttcttctgaagtgttctacaccgcgttcgctcttccttttctggcgctggtggctggcctaacttcggtctcagagtctttgttttcgctcatttacctggcagtcatttggacacctaattcgaggacaagttggggaggatgaagtcggagaacgggacagtggtcggggtgggtttaatctgtgagccgagctttgggtgggattagaatcagaaacaggaaaagtaaggcagcgttggacttggggctgggagggcttaaggccagacagacgttttcatcctgatcctgtgacctgccctattcatctggtaatctagttgaagggagatgaaatattaggccagggcgagtatcagggaaggagattcttgcctttcgccagttgcgttgtttgctctcgtctgactgtt

SEQ ID NO: 30747 - DNA, 2300 bp, Homo sapien
gtttttgtgctcgggctaattcataggcaaccgagttggatttcagtaataaagatgtatttgttacaaatcagctttgctcttttaagaatacatctttaatttgaaattctatagtgaaaacttgacctaattaaaattaattagataagcttcgatgaaacaatatttccagatttaagaatatttttgttctaaaattaatgtccacattttctctaactaggtaaaattttaaaattattattaacttcacattcttagaaagcaggattattaccaccaaactagtagaagtgttgagatacatagtgtatttactctaaataaaatactaatgataccttgctgcactacaaatgtacttttattataaaacttaaaatgactagaaaataatttttcaaaatgcataaacatggcttagaatatattgatatgatttttggttttagaaatgatggggctattttatttccgatttccaaatttatataagcaattgtgatttgatgaaaagtcagaaaagttggcaagtatttttttcttagtttaacaaagcatgtattgtttgaatatgtttgttttctctacaaacctgtgtgcattattattgaatatcctcagtacttgtgatagtattttgtgctcatgtttggctaatttgactcaacagcgcatcatggaatggcctctcttactcattttttccgttgtcttatgtgtctaatgaaagttctgctaaggaatgagcttagacttatgtttgaccccaccacacctcccaaaaagaaaagaaaagaagggctgaaagagctggagatgtttctttgtgtgtgctataagctttgcttgttctgcatgttgtctatgaaggacatttcagaatgttagcttttgatcaacagctgctattatttttatttaccaaagaatacctgagagagcgggtgtacaggtcaacttacccaatgcttctcttcattttagactttacaaagggaaaaagactcccctactccggaaacattccaaatgctcagccccccaaaggtgttatttttacttattttatttatttttgtttatttaatatttgatatagtatattgcctagtagtaaagtttctttaagggccttatttgcatttagcttggtaaaatgttgattttcatcagtcatctgtgtgtttgcgtgttttgtgtgacttgggcatgggtcttgtgtgatagtcaactcttggttctttgagctgatttatattttatggctgacaggtgacaaagttaaacctaagtccctttcattctttttttaggtttttatttctttttaaagggagagaagagggtagaagtaggtataaaatagaatttgattacagtaaggtttaggtgcaccttattgagttattaatcactaactcttttactattaaaacaggtccaaaaagaaacacattacctagtggtgtttgccacatttgtctggtttggggcaagaatatgagactggttttctttatctgcctttataatgtatgactcatttgcgtgttagcctttaaacattagaaaaagaaaggaatgaaacagactggtgaaatataactggcagtgaattcttgattaaaaatgtgatgctttctttgaaagagaaagaagccaaaagaggtataattcattgcactgtgtctcaaaaatatttctgctttcaaacaggaattttttccccgatgtctacatctaggatcaatgagaaagggacaaaaacagtccattcttctttttttcagttgagtgtcagtgctatctactagttttgtgtggtgtctgaattcataatcaaaatttgagttttttattttaaactatgcacattttatatgaatactaaaaatgcatgttcataaatgaaatataaagatagaaattaatatcttctatatatttttcctatgattaaatttacttttgtacctacctctaagattaatactgttattttctggcatatagggtgtatttatgtacatttctaatagacatgaatttggaaggctattatccactgctaattacaatacttcccattataacaatgacctctggcagatttttgaaaatcctgtggtatgtatttcatactcaactttattatttttctataactgtaagtggttataaatcagttggttaataatatgaaatgtggttagaggctttttaaaatgacataaggtgaaatgcacatcaaaaccacaatgagatactgtctcacaccagtcagaatggctatt

SEQ ID NO: 30748 - DNA, 2300 bp, Homo sapien
aaactcaatagctgtgaagtgtgcgattttctctcttctgtcctaatactgtttgtttaccattgttcctttttcctaatgtaaatgtcagctaaccattcacattgtccagagaatattttaactgcagaaaactagcttaaatggatttaaaatggtgaaaaattgagcatttgctttgtaaaatatgttgtaatatatatactttcactaaagtattttgtttttatgtattgtcttttgtttatattttccctgctttcatggggccttaaaatccttgatggcggacgtttttgtcttatctttggttatttagtattaactctatgttgcttttatgtgataagttattttaaaaatctgcaaaaagcaacagcttttcagaaaacttagagacttgacaaataaaaatctctgaaatgctctaatgatggagacagataatcttacctgaattttagcacagtcgaatcacactaaaattggtaacctttatgttgatggttttcccattaatctgtccatagaattttgttaaatttttcctttttttgttaagtaaaatttttttatatatgaccatttattttactctctggtttcaaagggtattttgtaaaatgtgattatttaagtttataactcagattgatggctattatgcttagtagacattttttctagatatttcacaacatatatctaagatttctaggctacaggccgtgtttttcttctccagttggaaacattttatattactaaggatttaagtatttatgcaaacacctattaaagatttaagtatttatacaaagacttgtctagcagtagatattgacagaattttgaagcatcttctctttaagaatattgatatatatgtatttaagattattcatgtgacatttaagtgatatttaaatataccgtgtttaatatggttattattttatatgtaattgaatatctgaattgtagaattcatgaccttgaatgtgaagcactctctaatatgaatacttcagtcatctgattgtcttattctctaatttttgatttttaaaatatgttacaggaagtttatcatgaaaaggacatcaaggtattttttgataaagctaagcatgaaatcaaaactataaaaatagtaggaccagaagaaaatctaagtcaagcggaagccagaaacatgggaatgtatgttttaataaattaaaattaaattaaattattttactaaggaaacgttaagaaaaaataaacttttaaattaaaattgttatgccaaatttgggtgtctcaaactatttgtttgcgtatgcagtagccaacttagactgtgtctatgtttgtacgtatttatacataaagggctgtagaagttacttatgtttttcttttaatggctacgagtccacatatttaatcaaatgatgaatcaaggtaagatcaattttttttaaatgcagataaatgaatagtatgactttcatagcagtgacttaaatttaaatgtacactctgaaggttgtgtgtggtaaaagtgtgtttatttagactgtgggggaaacaggtgctcttactctccagttagtcactgagctagataatactgtaatcccaagaaacgggcattgtaggccttttgtttagccctgttaatgcttcattctactaataaaactctagtaatagtaaaaaaaatcgtgtattcaatgaatattaattgaatatgccaggaactgtgttaagagtaggtgataaaaaggtgaagacatgatccattctcatcaggaaataatcttatctactacgaaccctcatgcctgtgctgcagaagctgaggtcccagagggatggattctgactagattaggggtctagggatagacagaaaagaggcctctgaaaaaccaaactgatgttattactaatgattccataatttattcattggagaatcctctgggtccacattcagaacatattttctttaatatttttcatgattgtacctagtgcttctgtctggtattttgtttgatagttgcttcgaacaaatatggtgtggagacacacactgacaacagcaaaaagtgctgactgggaccgacagtgagggaggggagcccagagggaagttgataacccaaatgtcatctggtatctccagttgttcattccttgatattgctgatgataatgttacaaactgtaccagggaaagcaaacatagtcactgcccctggtaagaaggcaggggaataactatcttagaaaatttgatgaaaatc

SEQ ID NO: 30749 - DNA, 2300 bp, Homo sapien
ctgtgagttggcgggtgtgggggatggaaagagagaagtaaaaatgtctgaggccatatgagttagagagcagtagtatcaacagagatgagggagccgagtgggatctggatttgatgagttaaaagacatatcaggccgggcttggtggctcacgcctgtaatcccaacactttgggaggccgaggcgggcggatcacgaggtcaggagatcgagaccatcctggctaacacggtgaaaccccgtttcgactaaaaatacaaaaaaaaaaaaaaaaaattagccgggcctggtggcgagcgcctgtagtcccagctactcaggaggctgaggcaggagaatggtgtgaacccgggaggcggagggagcttgcagtgaggggatatcgcaccaccgcactctagcctaggcaaaagagcgagactgtctcaaaaaaaaaaaaaaaagacatatcgagtttttgccaatggaacatccaagtagaaatgttcagcagatggctggaaatgtaagaaagcaggaaggatttggtttgagaattggggctctttcagactgttagaaatgtctaggtatttgaaaatcccaacacttgctttatacgagtctcacagcacagatgttgtgactcttaacagagaaggaagaatgtcaaaataacctgaaattattagtggacttttggagtttaaacacacacacacacctgtgatgcagagaagccggtaagcattcatgaggggaacgggggtttgggagggcaggaagccaggttgtagctctccaagttcttaaagatactggagaaccaaggaagcaagaagtcaagttcaaggagtttggcaattgcaggtttggctttctggagacagatctggccaaaacaccagccattcctagcagagtccttggactcagaggactgatgctgtttgctttgtgcctagttttatgaagctgtacttgccacacatgaaaggctgttattaaggaatccatcttttagctttttttttccccttcagactaaataaaccttatttcattcttctcacaggtcatagtttccacttctttaattatttgttactcttctcagaactttctccagttttcctcttcttttaaaaaactgagaccaaaccttcaaaacagagtaataactggcttagttctgggcacaggaaatgattctttctaaaatgtcacatcccaggcaagatttctttgcagggttttccacctgtttttaatgctatcaagatgaaagcattaagttcatgttatcttgatatgttaattttagacaaaacgtgatcataatggaacacatttttccataattttctgtcttaatttcaaaggcccagagttataacgggtgttgtctcgattctgtttttttctaatttcacgaaaatttaggcaggagattccagaatggtagcagtttggttctctttctcctataaaatagcttatgtcattaaatgtatgaggcaaaactgtcaagcttttttcttaattgtgcttttgctcccactcattccaacaagttaaacccttggctagttaaaatgtgagaacagaaaaaagggaattttcttagacatcagtcaaaagtggaagcagtgggggccaaggctcagagatctcgacctctccgaccacgtctttgggagtaattttccatgcggactggagcacgatcttgtaagcacagccccggcattacacacgttgggctccgattccgcaggatttacaagcctcattactggaaagagtctaaggctctcttggcacaagcggcggagcaagaaatgttcactggacaataaaactttcggtttacggagtaaaataaaatcacggccttccttttacagggtgatgaacctgcccctgaattaatgaggggcgatccatttccatggcttaagagtctggcgaggtcccagtcagccaagattgccgcagatttgcagtcacttcagactgggtggagtatccaagtccatagaagagcaaattctcacccttcgaggctgctgtggaagctaccggggctgggacagcagagaggaacccagacgggaacaccgccctcccgccagactcccggcggctcctcctccctctcccaaacccactcccaaagctaagtgcaggcttccccgttccagccagaagcgctgcgtgagcctccacacgtagccgcaggcagctccttaaatagcgtccgcgctgagcaaacagtccagacgtggggcccaggagggcgagctgaggcgaccgc

SEQ ID NO: 30750 - DNA, 2300 bp, Homo sapien
ggtaacctaagaacaaccagtgaaaaggaaataacacgaagaaatacacttggagcaacagagcaactaaaatgggattagtataaaaagtagttaatttgtcatccctcgaaatgtccaggttggaaagtcatcagatcaggaaatttcagaaaaacaggaaattgagttcttcttcttcccctcgaaagttgtgatttggggtatatgacatacttgattttattttaatccctcaaagcaatatgtttcacaagacatgttttgctcttgaaatttttggtatcttcacgtggccactgtggatgtttacattcataagctcaattacttggcctctttcataaattttaaacaaaggtaacatgccgagaccagctcagtcggggagaccctaacccagcggcgctagaggaattaaagacacacacacagaaatatagaggtgtcaagtgggaaatcaggggtgtcatagccttcagagctgacacccccgaacagagatttacccacgtattaacagcaaaccagtcattagcattgtttctatagatgttaaattaactaaaagtatcccttaagggaaacgaagggatgggccggattaactgcagcaggaacacgcccttaagacacagaccgctcatgctcattgtttgtggcttaacaatgcctttaagcggttttcgccctgagcgggccaggtgttcctcaccctcactcccgtaaacccacaaccttccagcttgggcattagggccattatgaacatgttacagtgctgcagagattttgtttatggccagtcttggggccagtttatggccagattttggggggcttgctcccaacagtaacatatgctattataatttagtttcaccaccagtttctttgttttatgctttcagtaaaacactatgtctgcatctgagaaatgttctgtgcaattattactgagaagaacagtatgaattttttaatctattctcacatgaatattaacaaataacacacatacaaagaaaaatataaaattctagaactccactcccacatcccttcccctttccaaccttctcccacaatggggttctgccaagtactcctcagagcttaatcaagcttacttctgtccagttctgattctttataaggtcagaggaccttcagttctcccacttcctgtcagtgtattgtgcttctctccaagcaccaccacagaactgaatcccattggtctgaaagaaatatttgtgcctaacagtaataagcaaatggcatttttctcccaatgtcagaaaacatgggcaacctgctccctttcccctttattggcgtctctcccgccttccctccaagatcaaattggcctcccccaattctgtggaaaagaaaacagaatttctgggccctatgcccaagtgtttccagccagcacggcattgccaaggctaaatcaccaagccaaggacctgggggtgggcgcaaatgcaaatcaaaaaggctcttgaggccgggtgcagtggctcacgcctgtaatcccagcacttttggaggccgaggcgggcggatcacgaggtcaggagatcgaaaccatcctggctaacacggtgaaaccccgtctctagtaaaaaatacaaaaaattagccgggcgtggtggcgggcgcctgtagtcccagctgctagggaggctgaggcaggagaatggcctgaacctgggaggcggagcttgcagtgagccgagatcgcgccactgcactccagcctgggcgacagagtgagactccgtatcaaaaataaaaataaaaaaataaaaaaggctcttgagaaagaggggtttcttcattttctctctaggcgcagtaatctatgaacaaagctccctttcccaggccctgcaacctgcccctctgattggaagtgaccgtgggctggcttttatcttttctttcacctcttattagagtagtgacaacttattttcttcatttcttcctccccctcggcttttaggtttcagcggacttcagggtgccccacctcttccaggaagacgctcccccgggctggcggctctcccagcgcggggcggggtccgagacggggaagccgcgcgcggggaaggagggtccaggcgtgccggacccgcccccagaacccgcgcctagccctcccttccgcgcgcttactttgtttataacttgaaaaatcctctccgtctcccttccctgcctcctttcctttccctttcctctgccagtacaactagacccggcgtctggcgtccccggtgccc

SEQ ID NO: 30751 - DNA, 2300 bp, Homo sapien
ggagtttgagaccagcctgggcaacataatgagaccttgtctccatagaaaataataatcaattctactgtgaaaacaggaaggggaatgaggtcaagcccaaaggatttaaatggccagataaggctctactagatgaataaagagaaatatcccatgaatgtgactgtattgttttagaatatcttgttccaacagttgtattggacctacaaatgtatagacagcatattaatatcaggtctctttcagaactatttcaatccatgaacaataaaagtaagtaatttactaagtgtttaatttcctccctataatactaaatgtgttgttgacttgttctttgtcatttttttttttagcttatgaaaggatattatttgtagctgtgttttcccttgtaaattccagtactgggcactcctgaaaacttcgcaagatatatatgagatcatggaactcactcttctgcttaaattcctccagtaattatcaatgacacctgggataaaatccaaactccttactaagggtctccctagatgaacttcttcctattgctttggtgacaaccatgcatactcctcctttcttatgactctcctctctcacgaacatgctaaattccttacagagtcagcgtttttacatttgcttttccttcctcctatagcatttctcggtagatcgtcacgtaaaattttccccttctcatcttttcgatttcaacataaattatatccatctaaagtaacttacttatcctctgtcctttctcccatgttttccccatcataccaatatgaagtcttttataaaaaattattttatttcttccagaagttaactgtaagctcattgacagcatattgactttttgatagctgtatcccctgattccacaacagagccaatcacgagtcatctatattcattaatcgtaggaggaataaattataaaagctatatttacagtgcattagtactaggttaaattgtttgctaacccttattttttattagtatatgagcctgtcaccagtgttccacttaaatgtattgcctattctaagtattatattttatgtggcattaagtatttatttaaaatattgaggaacatagtcccttgaaattatttttcattcctatggaatcactacactgcggactatacaaataagcttatgaagcatcattgcaatgtacatttacatgtaatataaagattatacttattaaatttcttcctctattctgctactttagaatttttcatctgttaaatattttgcttttcttcctcaaactctgttgatttttttacttttgttttgtttaattttctcaaattatgtgttctaaagatctaagagtgacaaattgtgaaatttaattttgtaaccgcaatatcataattgatgttttaagaacaatatcaagggaaacaggagaggaacacgctgtagattaaaactcctcgtaacccattggcccagacaagcatctgaaaagtactaggagggacgacatgattttacatctatattagggtttctcaacactgtagtattttggggtggataattatttgttttcaggaggatgttctgggcattttaggatgtttagcggcatccctggcttctatcaaccagctgacaatatcagtctctcctccagttgcgacaactaaaaatggatccaaaccttgacagataccccttcaggggtcaaccccatctccccattgacttctatacatataggatatgtcatttgttataattccacaattaaaatttttcacagggtgcctttggctctgggaatgctgacacatagccattatttttggcttttttttttttttttccaatttcatctctcttttccatgaaggcatgccacaatcttcatatagatcactttagatcatggtgggtttactttcactttcacaggtataaaagcatattttctatctgagttttacatagtaaaagtaaagctctaggccgactctattcacagtgaaccaccctcaaaatagaagtgaatgtgaaaccacagatatttcattaaaacatatctgaagataaaaacatacctcaagcttcacagatataggacttctgagctgagaggtcagtttgtagataactggggttattctaaaaaggattgatgacttttctgggcagctacaaattattttacttgctcctatttcaggacctcccggacatattgtctaccctaagcaccaggctggacacactgggaaacaggctgaccac

SEQ ID NO: 30752 - DNA, 2300 bp, Homo sapien
ggcagcctgcttttattctcttatctggccccacccacatcctcctgattggtccattttacagagagcctattggtctgttttagagagagctgattggtccattttgacagggtgctgattggtgcgtttacaatccctgagctagacacaaaagttctccacgtccccactggattagctagatacagagtgctgattggtgtatttacaaaccctgagctagacacagagtgccgattggtgcatttacaaaccttgagctagatacagagtgctgattggtgtatttacaatcccttagctagatataaaggttgtccaagtccccactagactcaggagcccagctggcttcacccagtggatcctgcaagggccgcaggtggagctgcctgccagtctggcgccttgcgcttgcactccccagtccttgagcagttgatgggactgggctccgtggagtagggggctgtgctcgggtgcactgcgcaggagcccacggcagagcggggaggctcaggcatggcgggatgcaggtcctgagccctgccccacggggaggcagctaaggcccagagagaaatcgagcacagccctggtgggccagcactgctgggggacccagtgcaccctccacagctgctggcctgggtgctaagcccgtcactgcccggggccggcagggccggccagctgctccgagtgcgggcctgccgagccgacgcccacccagaacttgggctggcctgcaagcgctgcttgcagccctggctcctgcccgtgcctctccctccacacctccctgcaagcacagggagccggctccggcctcggccagcccagaaaggggctcccacagtgcagcagtgggctgaagggctcctcaagtgtggccagagtgggcaccgaggctgaggaggcgccaagagtgagcgagggctgccagaacgctgtcacctctcactatgatctaggttagtggatccaagagggcccagttctgggaggctaagttgctccttactggcccagataaaggggaggttttcaacatgctaatctggctgagggcttatgagactatttgcttgtgacccatttagcctctcttgtcttctccatggggaagttacacaatttattttggacaggccaagctcatctttcataaagtggcagcctttatcctgtattgtttccactgattaatgccagtaggttcttatctgtcttgaccagatgctgctgtgaggtgctaaacctgtgcccttattcacaggaaatgcaaccccgcccccaccaccaccctgggattcattgacatcatagtcagtggaagaagtaacttcatgcccatgtaccttcacaagagtccaaatcccttcactttgttcagagaggattacagacacccaaggctgttgtgttgtccatagctaagcttggcaaatgggcccacacaagagagtcacttaccatagtatccttaacattctgcttctagatcctgtaattgaaatgtgtatccaggttgtttcatctctcatacattgtgaatacttttcctttctgttctgagataccaaagagatacttttcctcttactcaaatcctactacaaaacataatgttctaatttacattccacttaggctttctctctttttatatgactgagaagatctcccaataacagtgtgctcttgcacaaagtgcaaagtaatgaaactagtacaacagaggacaacgtacaatgctctgaaaccattttatgcaccatcatgtaattatttgattgttccattttattgtttaacatgtagtggtaaagccttaggtatcagaaacttcatgtggaactggccccacttgatcaattattggaatataggaggtgtgacatactactttgaggtgtgaatactgctttgaggtggcacactgcttgcaggaggcatgaccactgctttgagcctttgctgccattccaacaccatgggagaattacaagctttatatcctggtatgcgtacaattattcatagaactagtcagcttcaaagttctaaatggaatgtctattgttgtggttgcttgtatctgcccatcttagattcttcctagcaataattctgagagactctggattgtgggccgaatggagaatgaagccttttcaaattcacctcccaggtagccaatgacatgtagtttccagagactaacgtgcttcaaatgttgatctctataactactacatactcccttttgtttatgcatatgttcctattcacga

SEQ ID NO: 30753 - DNA, 2300 bp, Homo sapien
gcaggttgtgtttgctgctctgggggtggaggatgtggggtgaaggttggggccagaaatgcaagaggcctctgaaagggaccctggaagtggagcaggtacacggcaaggggccccaggcggcccagcggcacccgggctcaccccagaaccattcgaatgacaaggggtgccctgcctgaaaacgccttgcggggctcagcttccccttagctacactgctttacaggtagagagcggccctgaatcctgggtagagtctgggctcaggagcatgtgccagcgtagtggggctattagaaggaatggttaatacagcctgcaagctgtcatttatcagtaagtattcaatgaagtccgccggagcccacatctatgctaggccctctacaataccagcttaggaaagatagtggcggtatctagcacggttcctaagaccattagctccagtcaggctccccgactttaaattcggcctctactgcttcacgtctgtggactgtcagccactttcttcttatatatgttctttccattgcctcatctctgaaattgtgtaactattaaatgagctacagagtattaatgtaaaattcttagagcagtgcctggcgctacagaaagtactcagtgaaagttagctcttattattttaaatatttgacaaagttcctgcttctccaagctgattctctggttcccaggtggtttcattcatgcactgttattcctggaagtcttggcatggccacttcccagttccaggaacaggcagtcgttgttttttctggcttatcacattgagatacatggttactacaagtgacacttaaacgtgtcagacagtttgggggctcccttcttgaactttttctaagagcaaacctttgtcttaatgccaccctgtttacaacaatagtagggctttgaacaatgagaaaatgcggggaaatgaaaaagacatataaagggaaagagtggatttatgcaattggatagaaaagtggcatgtaaaatagctggtttatagatcaaactgcctttagatctgtaaaggagcttagagtacatacaggtggagagacatcagatgtgtgtgagcagacccttatgtacttctccatcttcatctctaagaatgtctccctcttttgctctgtaacctcactcgtcttcctttacttgaatgagggacgttcctccagctcaggaattctacctatggagttccctctatctatgatgccctccaacaccccacccaccatacctccatagactagttgatttgagacttccttcatctcctagtctgacttttcttaaaccccctaccaccatctaagttagtgccccataaccctttcttatagcaacattaattttatttatagcacttagagtatttttaataatatatttaattcttaattgtctgtctcccctagtgtctaggtattgtgctctagtgcctggtatagtgccttgcatgctctatgccttcaattaattcctttaaaaccacacaagctttatatttagtgaatatttatataggaagaatttctatgtgtatatatgtgtatctgtgtatatacacactgtattgcactgccctgaatagtgctaaattaaaaaaccaaaacactttttaatcagaacttaatagttgcactcttcaattttccatatgttcttttaagaagtgattagaaaaaaatgatgtctccatatgttgtctgctgctgtaaaagaatacctgagacttggtaatttataaaggacagaaatttatttcttacagttctggaggctaggaagtccaacataatcatgtgttgcttaaatacaggaatacattctgagaaatgcatcatgaggcaattttgtggttgtgagaacgtcatagaatttacttacacaatcctggatactatagccagcctactatttaggctggggtggtggggttgggggtgttgaggagagtcagattgagagctgagggaagtctcaaatcaactagtctatagacgtgtgggtgagtgggttggtggagggcattatagacagagggaacctcacaggtagaagtcctgggctggagggaacttggctcattcaagaaaaggaatgaccagtgaggtggcagatagcctactagacctagactgtgtggaataaggtgttgctcctaggctagaaacctgtatagcatgtactactgtaatgaatactgtatgcaagtataatacaatgtcaagtatttatgtatctaaacatagaaagggtacagt

SEQ ID NO: 30754 - DNA, 2300 bp, Homo sapien
aagatgtgcacaaggatatattatgtgaatttttgttgccaatcaaaaccacagctgaagaactatttgtctttgaatgattacatatcaagaaaactgaattggttattttgtgtaggtatatgcatggaaggagtggctgccatgactggatggctttctggtttcactactctggtcaaagagaccagaatgtgagtctatgcactgtgtcatccacagaaaaatgctggctagctgaaaaatgttacctgaacttaacaatgttttgcaggatgtgacaaaaataatcaaccacattaaagtacattttcttaactcacatctgtttgtgcagctctgtgaggagatggacactgggcatgcatgtcttctcttatacacagaaatgagatggctttctaaaagtagatcactggctgaaatttttgaattatgagagctgctccagagatttattttagaaaatcagtcaccattggcggcacatttcagtgacacagaaagggttgcaaaacttgcttacttgtgtgatgtattcaactcgatctatgaactcaacttgtcgcttcaggagagaaggacaactgtgttcaaggaagcagataaattggttgcattgaaagccaaactggaattatgggggcaacgaatgaacattgagatttttgacatgtttcaaacattagcagagattttgaagaagactgagccagcagcttctttctctcagctgatgcatgatcacctatcttagctttcaaaagagttcgagcattactacccaaccacaaaagaaccctgaactgggaatgaatgtatccatgacccatttgtgagtaagtcaggtgaatcgattttgtccgtactagaagaggatcaattgcttgagatcacaaatgatggtggccttaaaagtatgtttgagacagcttcaaatcccatgttctggattaaactcaaggtgggatatcctgagattgccacaaaagcactgaagagtctgcttccatttccaacatgctatctttgtgaagcaggattttctgcagtgacagcaaccaaaacaagattacggagtagactggacataagcaacacacttctggtgtcactgtctcccaccgttcccagatgggaccttctaattgcaggaaaacaaggtcagggctcccactgattccacattatggtgagttgtataattattttattatatattacaatgtaataataatagaagtaaagtgcgcaatacacgtaatgtgcttgaatcatcctgaaaccgtctgccacccggccctggtccatggaaaaatcctcttccgtgaaactggtccctggtgccaaaaaggttggggaccactggtttatccagggtcatccaggttggagtggggtcaggagaaatggggaaatttaggtaaaagtatacaaagttacaaacacgtaggatgaacaaatgggaagacctaatgtacaacatgagggctatagttaatgatagtggtattcaggatttatgctaaataagtagattatagctgctcttgccccaaggggggaaatgtgtaattataggagttgatggatatgtcatacaaataacttaaatacacagaataaaaactattttagtttaaaaaggaacaatatttataaaaaaataaagtgagctcgaaaacattcaaataactgcttaaaaattaaaaagtaatatcacataatttaatagaaggaaagaaagagcaagacagcaagaaagaaaaggcaccataaagaaaaacaattttggcccctcctcatttgtagtcttaagctgcctctactccctcgccttgaaaagccacgggcttccgagggatggaggtcaaagccagagtaaagaaagttcccgggggaggccactccccagctgatgactttccagttccagttagtgtcggagtcccagttcctctccttaaccaccggacaaacgtctctggagtctctccaatgagcaagaaagcaagtcgggggtaggggaggggcctcacaccagggggtgggcgcagtccctcctccagctccttcaccctccagtagtctcgtgggtccccgagcgccagcgcgggaaccgggaaaaggaaaccgtgttgtgtacgtaagattcaggaaacgaaaccaggagccgcgggtgttggcgcaaaggttactcccagacccttttccggctgacttctgagaaggttgcgcagcagctgtgcccggcagtctagaggcgcagaagaggaagccatcgcctggccccggctctc

SEQ ID NO: 30755 - DNA, 2300 bp, Homo sapien
agatccctgaggaattgccacactgtcttccacaatggttgaactagtttacagtcccaccaacagtgtaaaagtgttcttatttctccacatcctctccagcacctgttgtttcctgactttttaatgatcaccattctaactggtgtgagatgatatctcattgtggtttcaatttgcatttctctgatgaccagtgatgatgagcattttttcatgtgtctgttggctgcgtaaatgtcttcttttgagaagtgtctgttcatatccttcacccactttttgatggggttgcttgtttttttcttgtaaatttgtttgagttctttgtagattctggacattagccctttgtcagatgagtagattgcaaaaattttctcccatcctgtaggttgcctgttcactctgatggtagttccttttgctgagcaaagacacatgcacacgtatgtttattgcgcactactcacaatacaaagacttggaaccaacccaaatgtccaacaatgatagactggattaagaaaatgtggcacatatgcaccatggaatactatgcagccataaaaaatgatgagtacatgtcctttgtagggatatggatgaagctggaaaccatcattctcagcaaactatcgcaaggaccgaaaaccaaacatcgcatgttctcactcacaggtgggaattgaacagtgagaacacatggacacaggaaggggaacatcacacaccggggcctgttgtggggtggggggagaggggagggatagcattaggagatgtacctaatgtaaatgatgagttaatgggtgcagcacaccaacatggcagatgtatacatatgtaacaaacctgcacgttgtgcacatgtaccgtagaacttagagtataataaaaaaaatttttttaatcttctttgatagtgttaataacttaattttttgtattaaagtttttctaaatgctcacgacaaacattagaaaaaacttaggaaacatacagtttaatttaaaaatattaatcatattcacacatcttttctgcaaaacgacaacttaaataatggtagcttttttcaactccaaacactaagaaaactacaacaacaaaaccactcctctttgtcaaataaggaaaactcaaacttttggcagtctgcaaactgtgaggttgactttataatttttcatcacaaggtatacctcctgaagcctcttaactattttcagaaaaagacagtgttgctgataatgcaatatatcctgcatgttcaacctttgtgaatcataccatgtagggcaattgacttggtgagcaaaatctccatggtcacctgggtagctgcatttagaaataggagctgtccagtcaaggttacagcacttgttttctttccttagaattcaatgcagttaaatatcatctgtaaattttgattagctttgcaaggctattgaaggtttgtatattccaatgcctctgattaatcaaattcaattaaaaatgaaaataaagatttatttatataatagtagggaatatatcctcttcttatttattttgagttgaagagatggagataaatccaatagaaaaataacaataataatgttcaaacattttcaacatgtaaagaattgtatttagaactatcaaaaatttatacaataggatgttttatcacagaatctggaaaggagacttctagaaattgagaaatacaggatatttctgatataagactgaatgcaaatgtgtatattctaagaaatacaaaaacaacttggtaaaaaaaaaaaagacacttaaaatgagtgctgtgtgctttcctttctggtttttattatttttaaattgttccttcagccaccaaagttatatgatggtttctgaacagcgtttacttttgtgacagtttcatctcactctgttgtccaaactgataaagtccagaagtctagaaacagcaagggactcccttcctctgttatatgtaagctgacaagaggcagacaaacacgttctgaagttttgtgcatgctgcgttttctctccttgctgcaacaagaaaagcctttgttttccaacctggcaacctttgaagaagtgactcagacatcttcatggcctctaaaggtaagagtaaatataaccaactaataactttttcttatattaagactaaaaatatacaattgtggatgtgttacaaccagttagattggtactttaaaagctgtcatttgtcacttttgaacattgtgattttaaaatcttaactcccaggagcatgttg

SEQ ID NO: 30756 - DNA, 2300 bp, Homo sapien
atagccatctgttgaatggttactattacaagacactaaaagagtaatccataaataacacactttctgtgtctcattgacaatattatacaaggtattttcagatatattgtaagcattgtaaattgctaaatgaggtttgatacagtggcatgaaccaatagttttctgtatcctctgttatatagtagacacttctatattgaggaaaaatgctttttactgtagaaaatactggagattcagatatttatttcaagcacatacctgaacattaaaattacttattgctgtgaatgactaggaaacaaaaaaagcagcagccctgcctagcaggtatcatattgagcctcagggtgaagaacacttttgaaatcttctgaccattgccatctcactcatgctatcaattaacaaaacagaggtggggaggttaacttagcagttagagctaattcttccaagatacatgtttctgtttctgtaagattttctttaagacatagtcttcagatttgttccacctcatagtgttgaagtctaactttccttaaacaatattacaattatccttagaaatgtgtcagtagacttgatttaacagagaaaaacaaagtggatcattagttttgtgttagttaataactaactttatacctttaagccttgagcacagtcccttgatttattataaataacccagaaacctttcataattttcctaggctatgcattcctggatcccaccccaaaacattctaatttaatttatctgggttccagctagtatatcagggtttaaaaggtacccggtgatatttatctagtattgagaactactgttttaaggtcagagttaagaactacagaaataaagcaagaacatgaatgatttggctaaaaaaaagcaatctgagtttaccaccccaagagctgtattacaaacttaagcactgtccacagcctgaacaactggtatttttgtatagtaaattatatagccacatagccaatgtatgtctgatagtaaatacctgatagtaatccccatatatttaagtacataattattgaatcaatcaacctgtcaagtatcatcacacagtattttgttcttcagtcatctcaggatgattgaaaagatattaagaattttaaaacacattgattttttcacatattttgattcatttaatgtttcagttaaaaaaaatctgaattttttttttttttttttttttttttttttgagatggagtctcactctgtcaccaggctggagtgcagtggcgtgacctcagctcactgcaacctccacctcccggattcaagtgattctcctgcctcagcatcctgagtaagctgagactacaggcacacaccaccactgccagagctaatttttttttttcacttttggtagagatggggtttcaccgcgttggccaggatggtctcaatctcttgacctcgtgacccacctgccttggcctcccaaaatgctgggattacagaatagtctgaattttttaaaaaaatccatggctcaaacagcgtgttaatgtttgttcccatttttaagtgtccaagatatcaaagtgaggtaggaaatcagcaggacttattttctgagcgataatcatgaccctgccgatcaaagcagaatgcagtaaagaaacaagcggaaactagcagatggcgacaaaagcaacctccagttgccttcactgattaaagaccaccagcgctatttttaaacataactgtttaaaaatgccatgacaacgatccagaagttatcttatatggtttcaggaatttccccacccctttcctataaaattctgaaaaccagccccttaattagcatacaattaagagtaaggataaatatagctggccagcaatctacccggactgcccctctggactgctctgtttgggtacactgctggggctgctgctgctctggtctgttctgcctatggagcagccactttgctgtacaccgctactccgggccactctgcctataaggaagcactgctctgtgggacagtgatacggctgcacaccgctactcccgggaactctgtctttgggtcagccctgctctgtctacggagcagctattttgctgtatgctgttgttctaataaacttctttctttcactgctggctggcgcttgaattctttcctgagtgaagccaagaatcctcccaggctgaacgccaattcgggataaacctgcatccgctggataacttgataatgaatttttaaattaattttttcact

SEQ ID NO: 30757 - DNA, 2300 bp, Homo sapien
agggtttttttttttttttttttaaacaaacaaacttttacagctctttgccggcccactgtttgaattctgtgaagcagaaaatggttaaattcttagcacagtcgacctacagcagagaagcaagttcagtgcgccacggctggctcaggttttcgtgttttcaggacagaattttgtgcgttctttcggttcgcggtcctgattcattagcggtggggggtgggggaaacaacaaacaaaaacaaacaaacaaacaaacacgaccaacaacgaactacagagtctggcctgctcgggcatttccctcaaatccccctcctagtcataaaaagaagagagagagagtgagagagagagagagagagagagagggaaaaaaaatatttctcaaatggcaatagacctcactacaaattattcatgaagacagttctcgattcaacaggaaaataattgccttttcaaatattaatggcgtttcatttcctcgagtagcagaagcggcaaacaggagcaaatttctcaggagctgagattctccctgacctgaatccggggcctggctttgaaggcgactgtccgcaccgaaaggattcactttgtggcggtcacagcgatcccggaacaatggtgcctcggggagggaggcgcgggccagcaaccgcgctcggcctggccaccgccacccagctcctctccagggacccctcggccggggccgggagctcaccacaccttccccggcgtctgagggcgagtcagtgctggggatccgaggtagaggaaaagagaccgcgccggggcgcagtcgccgggacaaccagatccagccacaagtgcgagaaaatggcgctggcccagctagcccgagcttccgaactttgttcggcggacccggctcagggtcggagaggaggcctttcaggactgctgggcctctgggatgagaatctgggtctttcacagcgcagccccgggcctaggacgctccgagcgggctgcaggggcctagcccaacgccgcctcttcacattcacccacccacccagggcgcagtgcagggagctggagggagggggaaggactggaggccgggtgttggcggggggcgggggtgatgtcaagcgcagagaccagggcgcctcctgcagctccggagcaagctggggcgcggcctcacctggcctcctaggggcctgcgaacttcccggctgccggtatcactcagtgcactgctgttttctcctctgctcctcgtctggagcgaaataattgtttttgttttacgtgaatgtccagtgaggcgctcacgagatcggataagcgtttggcgggatttttgttgggggtgggggttgttggggaggggcaccaaattctaattccatttcacctctgttttctcaaaataaccttggttcttttgcaggccctgaattgtatgttttttgtaattttttttttttttttgaaagagaagaaggaagaaagttttgggtttgcaaatgctggcaggaatcagaggagataaaaatgggggcaaataggaacactgatttattccgcatctttctatcactgttttataaaatggtgccagtgtcccgcgaaatggcaggtgccaacaccttccagactgttcagtgtactagctgtgctcctgtagggtgggaatccagcgaccaggtggtgccggagacccgggctcaggagccgctgattgcgcagaagcgcaggttgtgcgcaaacctctctgtccgagcctcaacagggctcgggaattggggctttgtttgttctaaccagccccaaagcgcctgtttttcctggatgcggcgggagaagcaactacaaaggcaacagttctccagctgcgcgtcttcctcctcagctagacgctaggtagccggtcccttaactcagagcgctgggaggcagccatttgtttaaagcgcccagaaaccttcttcccccatttccgcagcacttgcagctccggcaggaatctaggcttccgggttctcggggtcctttcctctcctacacgtcagcgaattcagctggccgtgagctccccgattggggctcggtccggccaatattgtcactctaacgtgcactcgcgccttccctcggctctacagggcatcgcagccaccgatcccagcccctccccggcctatgccagccgcctggtggccctccgggctgcggagccaggcctggcctgacagcagcagctgttttcttcccgaagccgcagcgctcaagggcgtggttgcggtagacacctcgga

SEQ ID NO: 30758 - DNA, 2300 bp, Homo sapien
tcctccctggaagtttaagaaatcaacatcttctcccctcccccattttgggggcgggagaaggggactggtggggacaggagaaaataaaatgaattccagcttggtgccccacttctcctactgcccggtgccttgccttactcgcccctattcttgctggaacatcgacaattgttggagtcaaagaacttcctaaggctagttgttctaacgcctatcttctccccaaactctcccttcccggggaaggtccatggcccggacactggcacatgcggagaccagaccaaagtccacttggagcctggcactttatttctaaagcttgtctggaagtgtacggtttccctgagttcttttcagggtttcccacaatgtcgcatggatctcaccccctcaccagaggttttagcttcgggaaggggcggtaggtcacactggaatcctggccccaggcctgctactccgggagctggcggcggacacccggaaggtagactcgcagtcctgagctggagaaggaactcatctttaatgacagggtttttttttttttttttttaaacaaacaaacttttacagctctttgccggcccactgtttgaattctgtgaagcagaaaatggttaaattcttagcacagtcgacctacagcagagaagcaagttcagtgcgccacggctggctcaggttttcgtgttttcaggacagaattttgtgcgttctttcggttcgcggtcctgattcattagcggtggggggtgggggaaacaacaaacaaaaacaaacaaacaaacaaacacgaccaacaacgaactacagagtctggcctgctcgggcatttccctcaaatccccctcctagtcataaaaagaagagagagagagtgagagagagagagagagagagagagggaaaaaaaatatttctcaaatggcaatagacctcactacaaattattcatgaagacagttctcgattcaacaggaaaataattgccttttcaaatattaatggcgtttcatttcctcgagtagcagaagcggcaaacaggagcaaatttctcaggagctgagattctccctgacctgaatccggggcctggctttgaaggcgactgtccgcaccgaaaggattcactttgtggcggtcacagcgatcccggaacaatggtgcctcggggagggaggcgcgggccagcaaccgcgctcggcctggccaccgccacccagctcctctccagggacccctcggccggggccgggagctcaccacaccttccccggcgtctgagggcgagtcagtgctggggatccgaggtagaggaaaagagaccgcgccggggcgcagtcgccgggacaaccagatccagccacaagtgcgagaaaatggcgctggcccagctagcccgagcttccgaactttgttcggcggacccggctcagggtcggagaggaggcctttcaggactgctgggcctctgggatgagaatctgggtctttcacagcgcagccccgggcctaggacgctccgagcgggctgcaggggcctagcccaacgccgcctcttcacattcacccacccacccagggcgcagtgcagggagctggagggagggggaaggactggaggccgggtgttggcggggggcgggggtgatgtcaagcgcagagaccagggcgcctcctgcagctccggagcaagctggggcgcggcctcacctggcctcctaggggcctgcgaacttcccggctgccggtatcactcagtgcactgctgttttctcctctgctcctcgtctggagcgaaataattgtttttgttttacgtgaatgtccagtgaggcgctcacgagatcggataagcgtttggcgggatttttgttgggggtgggggttgttggggaggggcaccaaattctaattccatttcacctctgttttctcaaaataaccttggttcttttgcaggccctgaattgtatgttttttgtaattttttttttttttttgaaagagaagaaggaagaaagttttgggtttgcaaatgctggcaggaatcagaggagataaaaatgggggcaaataggaacactgatttattccgcatctttctatcactgttttataaaatggtgccagtgtcccgcgaaatggcaggtgccaacaccttccagactgttcagtgtactagctgtgctcctgtagggtgggaatccagcgaccaggtggtgccggagacccgggctcaggagccgctgattgcgcagaagcgcaggttgtgcgcaaacctctct

SEQ ID NO: 30759 - DNA, 2300 bp, Homo sapien
ccctttaaatcgccggacgacgcagctgaccttagccggtcggctcagacaaaggactaccgctcgcccccaaagccccccaacccccgaccctcggcttttgccacactcgactgagccagaacttaagttttttttaaccaaccgacccccatcccgccaaagtggcccccctagcactggaaggcatcttgtcggaggcggccacgggcctgcaggccctctcagagcctggaaggggaaacgcggcgtgcactttctacagaggcctaagacgaggtaggaggaagcagagaaggcttggaccgcaggcaacaagtagccgaagctgaaagtggaagtcacccttaaatcccctttcccagaggctccgtacgactgcggggtatagcgctcaggatccctgatttgcccagggagatccgagagcgaaaacctgtttctcctggatccacgcccgactcctttgtttctttggccagcaggcctgcgggtgggtgtgacttgtggcggggagagtcctttcaggaaggcacgggttcgagcccagccttttcaggccgtcaccacttcccgcctaatcccgtccctggtcagggccagatccttgagtttcgcgcgtctttgagctctccaacaccggggaggaggggcctgcaaggctaaatgggaagagagtatagaggaaagagagggggaggggaggagaaaggaagacgaagtgaggtagacgttttggggaaaataagagagacgaaaaggaccagaaagatgagggaaacgagacatttcggagaaagccagaaaataaaattaggctcaacggctgctagcctaggagtttctcagctcctggctcctgagtcagcaacctccttcggtccttcgatcccgaccccctcctcttgcaggctgcagggacaaactgcccaacgagaccgccatctctgcgcacacgatgctgcccatcagccccgactgaggtcccgcaatgctgcctccccaaagttgtggtgaatggtggcataacccagccccgagtacttccaggagccctgagtcaaagctgatccactcagctttccggagaggagggggaggaggctcaaggggagagaaaaggatttgtgcccgggtcagagcgcatgagcagtggaagcttgagatgctgtgggggtggggtgagggagggaaagagggtatatgtttgggggagaggtgtgtgagggggtggcggttggagcagggaagtgtgagagagagagagagagaccgaccgcgtgcggcaggacctgtcatcactgacgtcggacccggccgcgggccaatgggctacccaggcgattgttcctctctgtgggtccaggccacggccctgaatctctattgacttcctaacgcgccctgctgctacttctgtagtgtgcaggatttcgcgtaggcattaatagccaagggggtgggcgcgcccaaatccaaaccttgggaagaagaagagaaagaaagaaagaaaaaaaaaactttacagaagtttttttgtgtggttttcctttcccctccccactgtcaggtggcagtggtgttagcggcccggtacagggagctccggggagcgtgggtcggcaagcagccggccgccctctcctagccaagcggggcactgaaaatatatatggctggggcgcttcagaaccaccaccacctccaacatcatcatttctgtcacctccactccccgcagggcatcgtgccccggagagccccggggtgttagccgccaaagtgcgcttggggctcagctcctacccctctggagcagaacccccagcaacccacagactcagccctgcgccttccattaccccttacatctactctgccgctaccatccctctctagctcatggcgcggcgggggacttggcccaacagcaattcggcccaatggcggcggaggtgtttggccttgctctgtccaccgggttcactgctggcgctgtctggctctgagttccacggctgactgcagaggccgtagtgcggcagggctgggcctgccccccggggcccagggaagagcgcgcagcccacgccacccgttctcatgcgcgctatttgtttcgacaacaggtagcagctctggacaccatggcccccagctcaccgccgcctccagcccctcggtgttcccgggcctccacgaggagcctccccaggcctcccccagccgtcctttgaatggactcctgcgtctggggctccctggagacatgtacgcgcggccggagcccttcccgccag

SEQ ID NO: 30760 - DNA, 2300 bp, Homo sapien
ggatgaaggatcagagcaggggaaggatcagagagatggtgcctgttggtggaggagtaaaccatgggagaaagtgaaagccagggagacatatcctgagagtctagtcacaaaactgctgtgtggaagcccttggttttgagagtagggagtgggggtctggcagtcaaatactcttctctaattttttttttttaaatactgaggagtatctattggtagagttatccaagctcttcctgtaggaggagcagaaagacctggacgtgtctaagtagagagaaattgttgtggaagttaatccctccctaaagtgcacccaagggaggaacaatgcattaaatgaaggtctcaaagaatctgccaactgttatacatcagttaattattttaaaaaaaaattttttaaggccttatttactgaccaggaaatgtataagaatagtccttggtgctggggatgggaggaggggcagttcagtcaatttctattcagcattgctggtatctgccaaaatttcttgcctctgctaaggggtatgggatattttactcaatctttaaaacttttcttaaagatacaagcctttctctgtttgggggacactttttatggccgccagggaagcccaagcacttagactggcattttcggctgcagcgacaaggcaggagtcccggccagcagccctttaaatcgccggacgacgcagctgaccttagccggtcggctcagacaaaggactaccgctcgcccccaaagccccccaacccccgaccctcggcttttgccacactcgactgagccagaacttaagttttttttaaccaaccgacccccatcccgccaaagtggcccccctagcactggaaggcatcttgtcggaggcggccacgggcctgcaggccctctcagagcctggaaggggaaacgcggcgtgcactttctacagaggcctaagacgaggtaggaggaagcagagaaggcttggaccgcaggcaacaagtagccgaagctgaaagtggaagtcacccttaaatcccctttcccagaggctccgtacgactgcggggtatagcgctcaggatccctgatttgcccagggagatccgagagcgaaaacctgtttctcctggatccacgcccgactcctttgtttctttggccagcaggcctgcgggtgggtgtgacttgtggcggggagagtcctttcaggaaggcacgggttcgagcccagccttttcaggccgtcaccacttcccgcctaatcccgtccctggtcagggccagatccttgagtttcgcgcgtctttgagctctccaacaccggggaggaggggcctgcaaggctaaatgggaagagagtatagaggaaagagagggggaggggaggagaaaggaagacgaagtgaggtagacgttttggggaaaataagagagacgaaaaggaccagaaagatgagggaaacgagacatttcggagaaagccagaaaataaaattaggctcaacggctgctagcctaggagtttctcagctcctggctcctgagtcagcaacctccttcggtccttcgatcccgaccccctcctcttgcaggctgcagggacaaactgcccaacgagaccgccatctctgcgcacacgatgctgcccatcagccccgactgaggtcccgcaatgctgcctccccaaagttgtggtgaatggtggcataacccagccccgagtacttccaggagccctgagtcaaagctgatccactcagctttccggagaggagggggaggaggctcaaggggagagaaaaggatttgtgcccgggtcagagcgcatgagcagtggaagcttgagatgctgtgggggtggggtgagggagggaaagagggtatatgtttgggggagaggtgtgtgagggggtggcggttggagcagggaagtgtgagagagagagagagagaccgaccgcgtgcggcaggacctgtcatcactgacgtcggacccggccgcgggccaatgggctacccaggcgattgttcctctctgtgggtccaggccacggccctgaatctctattgacttcctaacgcgccctgctgctacttctgtagtgtgcaggatttcgcgtaggcattaatagccaagggggtgggcgcgcccaaatccaaaccttgggaagaagaagagaaagaaagaaagaaaaaaaaaactttacagaagtttttttgtgtggttttcctttcccctccccactgtcaggtggcagtggtgttagcggcccggtacagggagctccgggga

SEQ ID NO: 30761 - DNA, 2300 bp, Homo sapien
tcaaaccttttctagttcacaaatcagtcacccttgtcacagttattgaaattccgcaactcgccacaccaggacggtggaaaaagcgggcgcggtctttgttgccgaccaggcttttgatcgccagagaaaatttacttaccttcagatgagtgagcagaaaaagaaataacactccctttgatttagttaggaaaatgcagacatttggattcagtgcaaacatacaacactcgcttgttttcgcgatgcggccctcgattaacctgtctttgcctagcgcaaagtctattcaacaactgcgcgtagtttctttttgtcccttccacaaagagccattgactatatattaaaatgattgttgaaaggtaggggagtatggtacttaaaagcaggaaaaaaaaatccctgtgactcaatcaattaagccgagcaacatttatgcatttcaaaaaatgcacgcggatgcggggggttgtggggacgaaggttgcatttctccgcagctctgtttaaaacccagcagtcctggccgaggctttagctgaagcgtctgcatattcattaggtctaattattttctagtaaggaaaacacaaaaagccaagagtcggaatccttcaatttaccctttgtttctaacttcatttggcttctttgcagctgaatcaaagccctaaactctttttccaaacaaagaaacctcaactcatcctttcataggcggcccggttaggaaactcaccgtgccccagcgagaggaaaatgaaaatgaatatattttttgccctgacgccagcgctgactgcacgggctggaggaaggcagggtcagcgtccgccgctcctcgcctttctggttttctggtcttctcaccaactagattctcgcttggggctggccggcgggactgccctttccatgggctgtgcttgctcaaaagtcggcttgggtatccgggatgatttcccggtgcctgaagggacctggctgagcatttgtgcttgtgccgggaaatataaattcggaaaaaaaattaattgttctgttcccatcaacaagtctgagtctagcagcccagcatttcccaccaactttgagtggaatggaatgaggagtggaggtaaagaaagggccgaggtatctttaaaaattattgtacacttggttggaaaaaaaaaagatatatcggaggcactaagtctttttacctacaaggggaagttggatcctgcttcccctggagtttagaaaacctcatctgtatggagaagttttctctagaggctgtattcctctcactagggagaacagatattgaacccacctcgcccgcctttcaggaaacacacgcgggcgcacacacacacacacaacaagggaggggacctaaggggggaagggtagctgttgggagggggagagggaaaataattcttcaaaaaagaaaagtcagtcttctcctctccagtccgtggaaaatccaacggggacgttgacaagagggtatttttaggaaacacatccaaatatacagggtaagagtgaatgtgagaaaaaaaaaagttgtgggttgtagaagttatcaagtgggatttgcggcgctctctgcaggaaacgcgaacggctccagttcaaagccacatgcaccaacgtgacatataagccattaaaatatcatcctgacggctcatttctgcttcatcatacattccctaactgcttcctgaaagctggaaaaggagaagtgaaggatgaccgcctcgctggaaccacaaaagagaggcttggaggggtttgtggtcccctctcagccaccccgaaatgatgtgcagaaatgaggcgatcctggcaacaggtggagtggggtaagtgcgtgagtccagggggcagacagatgagaactgtacctccagcgaccgggtagcaagtaccctcaaggggaccactggcacccaaaccccagtgggggaagaggcccagccagtctttctgccccatctcctccttcatcctacccccctcccccaaccgtggataaaggccccaccccactgacactaaggggaggagggggcccttccgcaaaggggcaacgcagaggatgagtccatcccttcttcccaggaggagggaaaaggggtacaaatggggctcccactggcacaggaaccaggagcagtttgttgcctgcctgccttcccttctctccttgtgaattgcctgggtgccccaccgtgggcacaagaatggaagtcgtggcccagagcttccctcgcgaaaaatgagcaaggcgggtg

SEQ ID NO: 30762 - DNA, 2300 bp, Homo sapien
gatcttgggagcacacgggcactatgctctctttacaaaaaaatgtaatttctcagtgtaaccggcagcctctgtatttctcgcttttatctaatcagacttccggcaccaccgcacccccctccccgaaaacacacacacacacacactcacacacacaggtggatgaaagcgcttaagttcccaggttattgaggtttgaattttttaatggcaaatttgaaacgttgttgccagtttcctttactttttctctctcttgcgttatttttctgttttctgcctttccgttgtctccttcgactgcccccgctaaccctgtctctcctcactcctgttccctacttgggcccctttcattcaggtaaaactgtaaatttcccaacgcgctattgttcccttgggctgcccaaagctccctagagatccccgaatactttttcggtatttaaatccccaatagataggaccaatgtaaattttgtgacattcaaaccttttctagttcacaaatcagtcacccttgtcacagttattgaaattccgcaactcgccacaccaggacggtggaaaaagcgggcgcggtctttgttgccgaccaggcttttgatcgccagagaaaatttacttaccttcagatgagtgagcagaaaaagaaataacactccctttgatttagttaggaaaatgcagacatttggattcagtgcaaacatacaacactcgcttgttttcgcgatgcggccctcgattaacctgtctttgcctagcgcaaagtctattcaacaactgcgcgtagtttctttttgtcccttccacaaagagccattgactatatattaaaatgattgttgaaaggtaggggagtatggtacttaaaagcaggaaaaaaaaatccctgtgactcaatcaattaagccgagcaacatttatgcatttcaaaaaatgcacgcggatgcggggggttgtggggacgaaggttgcatttctccgcagctctgtttaaaacccagcagtcctggccgaggctttagctgaagcgtctgcatattcattaggtctaattattttctagtaaggaaaacacaaaaagccaagagtcggaatccttcaatttaccctttgtttctaacttcatttggcttctttgcagctgaatcaaagccctaaactctttttccaaacaaagaaacctcaactcatcctttcataggcggcccggttaggaaactcaccgtgccccagcgagaggaaaatgaaaatgaatatattttttgccctgacgccagcgctgactgcacgggctggaggaaggcagggtcagcgtccgccgctcctcgcctttctggttttctggtcttctcaccaactagattctcgcttggggctggccggcgggactgccctttccatgggctgtgcttgctcaaaagtcggcttgggtatccgggatgatttcccggtgcctgaagggacctggctgagcatttgtgcttgtgccgggaaatataaattcggaaaaaaaattaattgttctgttcccatcaacaagtctgagtctagcagcccagcatttcccaccaactttgagtggaatggaatgaggagtggaggtaaagaaagggccgaggtatctttaaaaattattgtacacttggttggaaaaaaaaaagatatatcggaggcactaagtctttttacctacaaggggaagttggatcctgcttcccctggagtttagaaaacctcatctgtatggagaagttttctctagaggctgtattcctctcactagggagaacagatattgaacccacctcgcccgcctttcaggaaacacacgcgggcgcacacacacacacacaacaagggaggggacctaaggggggaagggtagctgttgggagggggagagggaaaataattcttcaaaaaagaaaagtcagtcttctcctctccagtccgtggaaaatccaacggggacgttgacaagagggtatttttaggaaacacatccaaatatacagggtaagagtgaatgtgagaaaaaaaaaagttgtgggttgtagaagttatcaagtgggatttgcggcgctctctgcaggaaacgcgaacggctccagttcaaagccacatgcaccaacgtgacatataagccattaaaatatcatcctgacggctcatttctgcttcatcatacattccctaactgcttcctgaaagctggaaaaggagaagtgaaggatgaccgcctcgctggaaccacaaaagagaggcttggaggggtttgtggtcccctc

SEQ ID NO: 30763 - DNA, 2300 bp, Homo sapien
agcaagcacagcccatggaaagggcagtcccgccggccagccccaagcgagaatctagttggtgagaagaccagaaaaccagaaaggcgaggagcggcggacgctgaccctgccttcctccagcccgtgcagtcagcgctggcgtcagggcaaaaaatatattcattttcattttcctctcgctggggcacggtgagtttcctaaccgggccgcctatgaaaggatgagttgaggtttctttgtttggaaaaagagtttagggctttgattcagctgcaaagaagccaaatgaagttagaaacaaagggtaaattgaaggattccgactcttggctttttgtgttttccttactagaaaataattagacctaatgaatatgcagacgcttcagctaaagcctcggccaggactgctgggttttaaacagagctgcggagaaatgcaaccttcgtccccacaaccccccgcatccgcgtgcattttttgaaatgcataaatgttgctcggcttaattgattgagtcacagggatttttttttcctgcttttaagtaccatactcccctacctttcaacaatcattttaatatatagtcaatggctctttgtggaagggacaaaaagaaactacgcgcagttgttgaatagactttgcgctaggcaaagacaggttaatcgagggccgcatcgcgaaaacaagcgagtgttgtatgtttgcactgaatccaaatgtctgcattttcctaactaaatcaaagggagtgttatttctttttctgctcactcatctgaaggtaagtaaattttctctggcgatcaaaagcctggtcggcaacaaagaccgcgcccgctttttccaccgtcctggtgtggcgagttgcggaatttcaataactgtgacaagggtgactgatttgtgaactagaaaaggtttgaatgtcacaaaatttacattggtcctatctattggggatttaaataccgaaaaagtattcggggatctctagggagctttgggcagcccaagggaacaatagcgcgttgggaaatttacagttttacctgaatgaaaggggcccaagtagggaacaggagtgaggagagacagggttagcgggggcagtcgaaggagacaacggaaaggcagaaaacagaaaaataacgcaagagagagaaaaagtaaaggaaactggcaacaacgtttcaaatttgccattaaaaaattcaaacctcaataacctgggaacttaagcgctttcatccacctgtgtgtgtgagtgtgtgtgtgtgtgtgttttcggggaggggggtgcggtggtgccggaagtctgattagataaaagcgagaaatacagaggctgccggttacactgagaaattacatttttttgtaaagagagcatagtgcccgtgtgctcccaagatcttaaattataaacaggagggggacaaagcaagagggaaacaaacttcaaaaggagcaaataacaaaagcctcttttgctgctcttgaagggaggggggaagggggaagaaagaaaagaaagttgctgaatcgggacattctggaagtgcctttgctgtgtttactagccccatccccgcctgctgcacccggagacgtctgaagtctctaatcgctcagcgaaaagttggtttcgggaagggcagcgccggggtgcgggagggcaaaggaggaagaggaatgcatatgactgtgagaaggaaaagtaatcgtggcaaaaaaaaaaaaaaaaaaaaaaaaagaaagaaagaaaagaaaaaagaaaaaaaatttccgtgagaagagggaaaaaatttggctaaaaaaaaagttgctactcctggcagccctggtttgtcaaaaggggatgtcaagcgctttacaatacctgggattgatgaggcgggcgggccaatgagctgcgcgcggcgcctcggcgcgccctccgttggcgcggcggctgagggcggggggaatgcgggcgcaccaatgggcgccagcgtcggcagcacgtgacacctcccccctgctcccattcatcaagggggggacggtgtcgtcctttcaattcatttatctgcaggaatgattgctgctatcagtctcgcgctcaccgcccggctgaggaggtgaaagtttctccccaggaagataaaccgcaaaagacaatattgtgcatgatttgcgccttttctttggctttttctttctttcttcacccccccacccacttttttttttttttttttcaaaaagcagagagggaaaaacggagagtgaaggagcgaggaggcg

SEQ ID NO: 30764 - DNA, 2300 bp, Homo sapien
gcagaaaccgtgctcctgggaaagtcagggtccccaagactcacaaaagaaaaataggtctgggaagagggagactggatatgaggccagagactgcactttctttccctgaactttgcttgtccatgtttaggtgagccagagctcaggcctgggcgcaggagtccaattcttgcgtctcactggcagctgcaagggcagcagtttccgcagcgtcaaccccctgcaaaagccctagctctgggccaaattcagtggcggcctttgctcatactcgcctcttttaacttttattattaaaccaaaaatttaaaacggccttggacactcccatccccttttccaggtcccgccctaccttctctgcccagttccactgagtggaacctttgccttcccgcttcctctggctcccgccaccgcctgtctgccactcgccgcccgaccccaagccgagagccaagagagctcctgcctcaaagggggcgacgagagtgcggcgattaccttcatgtgtttgcgcagcgaactgggatgcgtgtaggacttgtcgcacatcttgcaaagatagggcttgtcgctcgtgtgcacgtgcatgtgcttcttgcggtcgctgctgttagcgaagcgccggtcacagccctcaaactcgcacttgaagggcttctcccctggtgccaaagtagaatgagaggggtctaattagaaaaaaataccgcggccgtttttcaaaaactaaacaaatagaaaaaaaataaaacaaaaagccagcagcccaggattagcactttgcaagcttaaaaacccggaacgtcaataaattcttacatctgcagtggaattataaatatcttaactctattgtaatccctaatacaattggatctacattttatttttatgtttaaaaaaattaatagtaggaggagtcggtttttagcatcagatctggaaactcgtattacccagagctacacacgatttcggattgcttccacctggctcctggtttctagttttcacgtttgcggcttattctcctgccctattgcttttctctcctccccctgccccctccccgacgctccgcatcccctggtcgcctcctccaacccaccccactccctacatacactcacattttatagcgtaatctgggccggagagaactcaacgccgcaaattcttccctgactcgggcgttaaacccgaagtctcaagcatggttctcagatctcacccgggaaaatcagaataggaaaggagacccagttcccggcctcttgggggcagggggcccagaatgttttgtctgatgccaggctacaaccctgagctcgtgggaactttttttttttttaactgttccggacctgtgtcttgattatttttaaaggccaaagaggggaatctggtgttttgaaaacaccctcatggagtctaatagacaacaagttcttccttgccttcctcggactttctccacccctcaaacccactcttaaaaccagtcactactaaaactgaactcttcaaatatgcataaagctccaaaagcctcctcaatcccaaattatttcctttccccactctgtctcaattctttctgtctctgttttgtttctttctacgcccttaacccggcctcctcaatttcctcagctctttcctttggcaaagtcctcagtgaagtgcacggagagagatgttggcagcaagcaagggtttagatttgtctgcagcctgagcagctggcgcctccgcggctgccgggagccagccactttctccggcttcgaaagcaccaaggtctccgccaaaccaggtttggcttcctgttctccgaccttttttgtttctcatttaaaaaatctatatacccagctcctcctcgtccgccctgtgtgtgtgtgtgtgttttccataatttcaagccagaaactaaaaatcagcgcacactttccctgcctgcctgccggaacctgacgcccgggatcccaccgaggctgcgtttgtgcgacctggccgctgactttcggtttgggtcccaggcccaagtgggaatgggtaggggtcctacagctgtttccgtacctgtgtgcgtccttttgtggatctttaaattctcggagcgcgcgaagaccttgccacagccagggaaggggcagggaaagggcttctcgcccgtgtgcacgcggatgtggttaaccagtttgtatttggctttgaagggcttgccctcgcgcggacactcctcccagaagcagatgtgattactctgctccgggccacctacgtgc

SEQ ID NO: 30765 - DNA, 2300 bp, Homo sapien
tgcaaagtgtcctgtttagagaatgacacctgcatgtcatcatcatagcaagaagaataagagtttttaaacctgaacaaggaatataaggcaacacataattttcttattttcccaaaaggcaaatttaatacagtgagggaaggatgaggaaaagcagctgcaagcagactgggattagatgtctgatccgctacattgacaactgtaaaaacatatttgattactgatgtcattactggaaggctgatatagtgttgtgaggtttgcagacaacacaggctatttattattctagtgttgtcttttcttgtttattgtactagtaggaacttattattataattcatgtacatttacaaccatatattagcagattggtacgtatgcaaaggaaaattggacctactcttagtctcaaaaatgttgttgaagatagtaacttgagtttagaggtttcttttatcacaaataaaactaaagttggtaaatgttatcaaaaggaaggtataaggagtaatttgtattgaatcatttcaggtatacatgcatactaagactgaaatgagtgaagtttaacaagtgagtatattttccccaatacataacaaaatttcaaaacctaattctgattttgagcctcaatatggtttagttgaaagagggggtgatttggtgtcaggtagctctgggaacaaatcattgctatcgtagttattgtgtggtcttcagacagtaccttaatcattgggcctctgtctcctcttgtgtcaaatgagaatgagaatgtctacctttccggattgcagtaagagttcaaaagaatagacacgaagcattgagcatagtgcttatactaagtgttgaaaaaatggtggtcatgttttagtaatgaagagatgcctagtaaatcaagacatcaagggaagaattaaaagagaaggctattagtaatggaaaagtcaatgcaatagatgaaaagataatttaaaatggccagaactgggaaagagaataaacaagtcaaaaaaaccaaaatattaaaagataaggacactcaatagaaaagtttgttcacgtagtactattgtgacttttggaactgtgttttcacaaataaacacaatgccctaacaaaaacaacaaaaaaattaatcatataaaactataagggaaatgaaacaaaaacaagaaaattaaattaaatatggaatttttgtcaaagagcagttgaacaatgcaaagagaacaatatgataaaacaaaaaccatgggaagtcttgagaagaagacaaaaggaaaacaaagaaacatgggaaagacagaaaaaagcaaacacaagcagagactaaaggatacatctaaatgttcaagccagtagaatgaacacaactctgcttttaattttgacagcaaaaaagatatctgaatcaagaaagggcattcacaatgttagaaagcaatgatttttaaaattctcaaatttaaacagaatgctttgtttaagcatgatgtatgtgtttgtgttttcaaatgcaaaaatgttggaagtttttgcatgaagaaatcatttgatttcatgataaatttacccatctgggtgctagaaatgaaaaccttgattgtttactcaactacccaatcagagaaagaaaattttcaaattacagttatatcaacagatacagaagagatcttagctagtaaaaacatccttaagcattattttgctgacgacaacaaaaatatttccagccacatatcaaaccacctacaaattctttggggatcaatttcttcatttctatagcaaagtaacatgtgcatgtctactacaaatcttaaggcaaatagtcctgttcctattcacttgtcattgcaatgaagcatctgccgctcactgtttttttgttattttttttcctgattactccaattcaaaaacatcatcctaccagctcttttagttgttaaatatccctgtgcttgtggctacatttctttgcactggagaaatgatctcattaacaaactagttctgtgcgtccttaacactgaggcccctcgcctgcagctggaggcagctctctgttcagccccagtgcagagtgacacagacaggcgacagcgtcgctgagcaccaacttctattccacggaggcagacagcgaaaaccatttcataaccatggcaaggcatgagagaagcacaggtaatcctgtttctgtattcagtttgtgcaagaatcaaatatattcatctggaagagacaactgggcaaaaaaaggagttggggtggg

SEQ ID NO: 30766 - DNA, 2300 bp, Homo sapien
agggagagcctcccacagttgaggccagatacaagtctttttcgataaaaatactaaaagatatgaaagagggagtaaaacagtatggacccaactccccttatatgaggacattattagattccattgctcatggacatagactcattccttatgattgggagattctggcaaaatcgtctctctcaccctctcaatttttacaatttaagacttggtggattgatggggtacaagaacaggtctgaagaaatagggctgccaatcctccagttaacatagatgcagatcaactattaggaataggtcaaaattggagtactattagtcaacaagcattaatgcaaaatgaggccattgagcaagttagagctatctgccttagagcctgggaaaaaatccaagacccaggaagtacctgcccctcatttaatacagtaagacaaggttcaaaagagccctatcctgattttgtggcaaggctccaagatgttgctcaaaagtcaattgccgatgaaaaagcccgtaaggtcatagtggagttgatggcatatgaaaacgccaatcctgagtgtcaatcagccattaagccattaaaaggaaaggttcctgcaggatcagatgtaatctcagaatatgtaaaagcctgtgatggaatcggaggagctatgcataaagctatgcttatggctcaagcaataacaggagttgttttaggaggacaagttagaacatttggaggaaaatgttataattgtggtcaaattggtcacttaaaaaagaattgcccagtcttaaataaacagaatataactattcaagcaactacaacaggtagagagccacctgacttatgtccaagatgtaaaaaaggaaaacattgggctagtcaatgtcgttctaaatttgataaaaatgggcaaccattgtcgggaaacgagcaaaggggccagcctcaggccccacaacaaactggggcattcccaattcagccatttgttcctcagggttttcagggacaacaacccccactgtcccaagtgtttcagggaataagccagttaccacaatacaacaattgtccctcaccacaagcggcagtgcagcagtagatttatgtactatacaagcagtctctctgcttccaggggaacccccacaaaaaatccctacaggggtatatggccccctgcctgaggggactgtaggactaatcttgggaagatcaagtctaaatctaaaaggagttcaaattcatactagtgtggttgattcagactataaaggcgaaattcagttggttattagctcttcaattccttggagtgccagtccaggagacaggattgctcaattattactcctgccatatattaagggtgaaaatagtgaaataaaaagaataggagggcttggaagcactgatccgacaggaaaggctgcatattgggcaagtcaggtctcagagaacagacctgtgtgtaaggccattattcaaggaaaacagtttgaagggttggtagacactggagcagatgtctctatcattgctttaaatcagtggccaaaaaattggcctaaacaaaaggctgttacaggacttgtcggcataggcacagcctcagaagtgtatcaaagtacggagattttacattgcttagggccagataatcaagaaagtactgttcagccaatgattacttcaattcctcttaatctgtggggtcgagatttattacaacaatggggtgcggaaatcaccatgcccgctccattatatagccccacgagtcaaaaaatcatgaccaagaggggatatataccaggaaagggactagggaaaaatgaagatggcattaaagttccagttgaggctaaaataaatcaagaaagagaaggaattagggtatcctttttaggggcggccactgtagagcctcctaaacccataccattaacttggaaaacagaaaaaccggtgtgggtaaatcagtggccgctaccaaaacaaaaactggaggctttacatttattagcaaatgaacagttagaaaagggtcatattgagccttcgttctcaccttggaattctcctgtgtttgtaattcagaagaaatcaggcaaatggcgtatgttaactgacttaagggctgtaaacgccgtaattcaacccatggggcctctccaacctgggttgccctctccagccatgatcccaaaagattggcctttaattataattgatctaaaggattgcttttttaccatccctctggcagagcaggattgtgaaaaatttg

SEQ ID NO: 30767 - DNA, 2300 bp, Homo sapien
tagtagagacagggtttcacgatgttggccagcctggtctcgaatccctgaccttgtgattcacccacctcggcctcccaaagtgctgagattacaggagtgagccactacaccaggtcatttcttagtatttttactcttttgatctatagtaagtaaaattgtttttatctttgaatttttaaatttttaacacagttcaaatcagtgtgtctgatttcatctccttctctaacaaaccagggtgccagaactgcttcagtttctctgccttctctttgtctatgatgactaatgtatgaaggtatctgctgcatcaaactttaaacttcacattatccttatttctcttgaccttgacagatctggcatcttttcacctggctgtaagcagaaagtccttgatctccttaactttttgaggcatggcagcatgtgaggcagggagaggacacagacccacacagcaagtggtgagaagccaacagtggaattgttttcttaattccatttgttgattgtttattgctagtgtatagaaatacaactgatttttgtatattgatcttgtattctaaaaacttgctcaacttgtttcttagttctaatagttaattaattgattccttagggctttttaatacaagatcatgtcatctacaaatagaaattgttttactttctttctaatctggatgccatttatctttttttcttgtccaattgccctcactagaacctttagtacaaagttaaatagaaatgggaagactagacattttgtcttgttcctgatcttagacataaaaacgttgtcttccgttattatgtgtgatattagttaagtttttcataaataaacttcacagtttgaggaagttcctattcctagtttgttgagtgttagcatgaaaaagtgttgaattttgtccaatagtttttaaaaatttttttagacaatcatgtaggctttgtccattttttacttctttaaatttatttttattgatacacaatagatgtacactttttaggtacatgcaataatttaatgcccctcactataaattcggagctgcctcctcgccgatgattccagcgcctgacagccaggaccccaggcagcagcgagtgacaggactttttaggtacatgcaataatttaatgcattcatataaagatcaaatcagtgcaattggcatatccatcaccttaaatatttgtcttttcttcatgctagaaacattcaagttattttctcctagctactctgaaatatacaatagattactgtaaactacagtcaccctactcacctatctaacattaattgatttttggtaaactaatctaatcttgctttctggcatcaacctcacttgaccatggtgtatagtccctttcatatgttattggattcaatttgcctacattttgttgagaatttttatctatactcttaagaaatattgatctgtagtctcgtgatgtctttatctggttttgttatcagggtgatactggcctcatagcatgagttgggagatcatccttactcttctattttttggaagagtttgtgaagaattgatattatttcttctttaaatatttattgggtttttaaaatacatttttaaaatgcaacttgggtagcatgtccaataggaacaaatgagtgtccacccttgaatttcataaccctggaattaatccatgtaatctatgatccacaactgtattaccaaagttcgagttactcataggaaagagaaagaagttctctaattcgtccttaaaagttttccaagttcagaaaaaaaaaatgttgaagaacacgaatctccgcaggaaatgatactcctgtacccccagctcgctctccctcacgacccctcgctaggcggggttcgggaccaggtgaacgctgatctgatagttgacacgggacgactgtggcatcatccttgctgccgtcaatatcccgagagggaggaggttgggccgggagggtctcccggggcggggcggaggaggagggaatgcaaaacagagcctcgtccccggaacccaagaagcagcaacgcccctcactataaattcggagctgcctcctcgccaatgattccagcgcctgacagccaggaccccaggcagcagcgagtgacaggacgtctggaccggcgcgccgctagcagctctgccgggccgcggcggtgatcgatggggagcggctggagcggacccagcgagtgagggcgcacagccgggacgccgaggcggcgggcgggagacccgc

SEQ ID NO: 30768 - DNA, 2300 bp, Homo sapien
aaattcttctccctttttcctccaccctcgagtaggaaaaaatttgtttctttattgggcagggagttctggtcattatacatttatgtaaaatgttcttctaattggcatattccatgctatgtccagattctttcaagcgaattctcattaaggtaataatacctcaccgaagtttccagggatgatcccctagctgttcaaagctaccttttatatattaaataccagtcaatatgaatcaatggtaactgaaaaaaaggctgatagcttgtgaaggagttggagtacaaaactatgcctataaattgatcctcacaaaggcagactttttcccacagaaattgtattatgaatgctagttatagtttgagactagttaataaaattctactcactccaaacataggattaatggaacccacatgagttgtgtgctgtcaaagtcgagtcaagaggagagagaaggagaagaaaatttcctccctgttctcatagctcagggcacccaagggattctagagcgtaaagtgtactcccttctattttttactgcccttattcccaagctgaaccaaatatttacctctgccctcattttcagttatggagttcactcaggcccttttcaaccttcgaggttccttaacctttacattattaattctttttctaagcaaaatccagctgatctctactagatggttaaaaggatagtaaataggtaaattaatccacattaagccacaaatgactgctagccctaaccctttaatgactaattaatttttaataaagaatatgtgtctatataaatgaatttatacttctaagttggcataagttcagaaaaaatagtaagatgaactggaaaatctacaaggtatagggaaatcctctgggtgaggaagaactagtcatacctccctaaaagcctagccctagtttctgttacattatttcttcttttcatcttctgttttctaaaccacaagtttctaaaagcaccaaggaattttctacctgtttatttcgttttgtttttgtttctgtttttttgtccaaggtgaggcccaagttgacactgagtattctctgtgaaactctgcaaggagcaacatgtgatttcacagaaattagtctcgatacactatattcatggctgtaagttctatgctgctcacccattcatttgtccattcagtcactcattcatgagacatttatcatctgcctcctggaacataccagggcctacaccagaaaacaaggaaacaagtaaacactagtaaactttaaacaggctctccccacaagcaactgacagaccagtggagaagacagatatgtcaacagatgattacaataaagtttcaaggccgggtgcggtggctcacgcctgtaattccaacattttgggaggccaaggcgggtggatcacccgaagtcaggagttcaagagcagcctggccaacatggcaaaaccccgtctctactaaaaataaaaaaattagctgggcatgatggtacacactggtagtcccagctactagggaagctgaggcatgagaatcacttgaacctgggaggtagagatcgcagtgagccaagatcgcaccactgcactccagcctgggcaatacagtgacactctgtctcagaaaaaaaaaaaaaaagtgtcaaacctacatccaaaatgtcaaagtgctcaaaaaagttgggaaggcttcaccaaagatgtgacatttagggtagataacacctgtttgtggatactaatgtcctggtgagtcaaagaagaaaaggatgtacattatataagctggatgcaaaaaggaacaataatgaggacatgcaaccaaaaacttacatagggagaacaactttacttactcagggaaggcaaagagaccacttaagaactccttcacatgtgttatgtcttaaaagctgactactggagttgtatcccttgcacagcatccctttgcaccaaagtgaacactactctaagaacatgtgttcagctctcctgaatgccaagcacaaccatgcttggcatggcagtggtgtcttatttctgctcctctttttccccagggcatgccattgcaagagaatgctcagccatgttcatctggggacctgctcctggtagagcaataggatctgtgtgcccagcaccactgcccacctagctgtcctggcctgtgcccaatgctgaccttcacctcagagtgtggctgtaccacattcggtgatgtcactctcactgaaccttcagcctccttcctgggact

SEQ ID NO: 30769 - DNA, 2300 bp, Homo sapien
tgaaacttaaggaaaaagttgcctgtctgtctaaggcagacattgatggttaactattgttaacaatattgactattgcacagaatctaccatggcctgcaaggaggaagtctaaggtaattctaccatccatgacaaccctggccagtgagttggggccgcccttaatgcctcccagggctaacgtggtgtttagtgcattttgtgtgtgtgtatgacttaggatccaatctaggatgtctctttagtcttctttaatctggactagttcttcagcctttatccttcataatattgacatttctagagggtaaatgtcagtttttgtgaaggatgtccctcattttggtttgtctccttgtttctcatgagaaacaaattatcttaaaggttaaagagccattaccatacattgagatccatagagaaagtgctagaacatgtgagaaaagccttttcaacaaataatagtggatctactgaatatccatattttaaaaatgaatgattcatatcttacactaaagactcatatcttacataaagaccccaaactacaaatctcttataagaaaaaaaataagtgaatgtgtttgagaccttgagataggaaaaattcctttgaaaaaatgtaaagacactaattataaaagaaaaatgttggtaaacaaactttatcaaaattaaaaacatctgttcatcaaaacataacattaagaaaataaaaatgcaagccacatactgggaaaaatatttggaacatatatttctaacacaggtcttgtatccatgctatataaagaacggctacaacacaagaattaaaagacaaccaatttctttaaaaaggcaaaagacttcaatagatgcttcacaaaagaagatttacaaatgatcaataaacacatgaaaagatgttcaccactactaatcatcagggaaatacaagttaaaattagaattagataccactttatactcattagaaacaccaaaattaaatactaaaaataacaaggtgttggagagaacataaagccactagatactgatggaagcttaaaatggtacaaaccactatggaaaaattgtttagcagaatcttattgtgttaaacctagatttacactattacttaacaattccactcacatgtccacccccttaaatgaaaacatatgccaagaaaagaacttgtacaaaaatatttattgcagccttattaacaataacacaaaattggaaacaatataaatatatatcaacagtaaatagctaaacaaattatgacatatccatacaatggaatatcacttattaataaaaaggaataaaccaataataccaacaaagccgagcacagtggctcatgcctgtaatcccagcactctgggaggccaaggcaggcagatcgcttgatgccaggagttcaaggccagcctggccaacacagcgaaactgcacctctactaaaaatacaaaaattagccaagcatgatggtgcatttcagtaatcccagctactcaggagtctgaggcacaagaatcacttgaacccaggaggtagaggttgcagtgagctgagatcacacgccactgtactcccacctgagtgacagagcgagactctgtctcaaaaataatatcaatagtaataatggtaatacaaacaaaaatactgataaatctcaaaaacattatcttgaatgaaagaagccagaaacaaaggaatatatattgtataatctcatttacattaagtttaatacaggcaaaattaatgtataaagccagaaatcagagtaacatttgcctgagaggagtacagaagtagactggaaaagtgctcaagggaacttgttagggtgatgaaaatgtgctatatcttgtttgggatgtttattacatgggtttacacatttgtcaaaactcatcaaactttacactaaaatctgtagaacttattgtatgtaattctcaattcaaaacagaaaaaaatacaaaatagattttatttaaatctaatttactctcagactattcaagttctgatccaaattaaataagttgaatttgagagtatttactctatttccacaggtgttgagagagataccctctcagactttacacagctaccaaggcaacaatgccaggaaaactattaatcaagatatgatagttcctgtttgcaatcaggagaagaaagcaaagaacactcaggattataaaagcagatgagacctacccactagacctggtcagacacaatgttggcactcttggttctggtgactgtg

SEQ ID NO: 30770 - DNA, 2300 bp, Homo sapien
gtcacagaggaaacagcttcaagaaaatataacagaattctaaaattaagaggatttctatttttcctctttcacctttcctgtattttccagaatcattttcaatgggcatttataatttttagaatcagaaaataaaactctaaaaagcaaagctataacattaaaaaaaattattgaagtagtccacatgaaaacaaatacagagacatattttatccctaaaggtcacggccaccactttaatctaccacatgatctattttgataccggttctgcaggctggcagtggcccactggaagtctctgttgacagcacatgaacattttatcaactgtctagagagcatggacgtgttttttagcacctaccacgaagtccctaacatatcctgtctcactaagcctcacagccacttgttagagtcacattagcattcccattttacaaatgaggaaaccaaggcccagaataactaggcagcctgctcaaggggatgtagctagcgtgtgggagccacattgaagtgatgtctgtcgaaacccaaagtcaaggtctttctttttcactgttccctggtcaaaagtatctttagtcaaaagcaatggagcaagcatttgctttgggagttctcagtgctggtgagcttgcccagtgtcaagaacatgaaggcatttgtaaaaccctcctcttccttacctgcaaggctggagccggaaaatccatttggggaaataaaaaaaagtcccgagttctaccacacacccatcagatagagaagaatggaattactgctgctgtatatataacaggggcgtgtctccaaccacactattttgatagtacataagcgtgactctgagaagttttatctacagtcagctatacgtttgtcaatgtgaagaggtggttttcaaaaaggaaattctaataagttaactgattagataaattcacttactcttttaggttacctatgattctaggtaaaggtgttattctcccataattaaccaagttgtgttcaagactaaacatccctccagagatggttgtgaatggtctataggtggctttcattaattcaactctcaaaaggcattatttggcaattacagcatccaggctctgaagacagtgtccaattaataaacattacagcattgatattttcttgctgtcaggtagttctcaagttgccttagaaataggggtcacctctgaggacagagagaagagaagggcaaagagttagggcagtgctttaggtctttagtgtttatttctttacccagagaagtacaggaaaaatataacaaaaatgttatcattgtaaaatctaaatggtgaacatttcaatgttcgccatagtacttacagcatttttagtacatttatattttgtaatttaaatttttggggttttttttgcctcccaagtagctgggattaaggcacctgccgccacgcccggctaatttttgtattttttagtagagacagggtttcaccacgttggccaggctggtcttgaactcctgacctcagatgatccacccgccgcggcctcccaaactgctgggattacaggcgtgagccaccgtgcccagtcaatttaaatgtttttaatttcacaacttacattctagcttcaaaaatatattttacattattacgaaccactcaccaagattttatggccagatacccaaattcatctcagtctccaagtgcaaattttaaaactaatttcttccatcattcaattcaagcagaatggtagagtagtattttagaacagatagaactagtaaatcccagctctgtgaacatactttctctgttaccttggccaagttatttgctaaaggcatttgcttcccatcctgtatctgtaaaatgggtatttcctattgcaaaaggtagataagtagcatgtgcttggtgggttagtgtttttccctctccagctggaaaaaaaaaacctggtgtgggggaagaaggggaacagtttgtgcaacagaaccctaagaggaaatcagctgctcatcaagataagggctgaggcataaaactgccagagggtctcaaggcaggcaaagaagaaccatgaggctcatcctgcctgtgggtttgattgctaccactcttgcaattgctcctgtccgctttgacaggtaaatcttacttcctgtgttccagtctctgtgtagaagagaattaaaggttgtttccttacagttcactttttttttttcatttgcctccacaaagggagaaggtgttccgcgtgaagcc

SEQ ID NO: 30771 - DNA, 2300 bp, Homo sapien
aatgaatacattataaagcactttatctttattgctgcctgaagtggagaatataattgccagctgtgtatcccaggcacataattccattactaggttcttacggagccatcagtcccatggatggtcctttgcttgacaaaccagcccatcaaattccaaatctgccttaatggcaaatgccacctctcgatcaggtcactgctccagcctgaattcagcaaatgttaccagaatacttaccctggggtacccacgctgctcttagttacggggtgcctatcttgctcttagttctgctcaaaaaagcttgtcatgcttgaggtcacagcttttggtcaagggtccttccaggatgaagctgatctacgttttcttggactgtccacaaacatccttaacaggtgctaactctatttttaaatactctagcaatatttgtatggggagcaggggccagccactattcggaagtgggctggtgaggattttgatagtgttttggcttttttgtgttggctgggtggtgacacagtttcttcagatatctttaaatatatcatagtctaccaaataaagattagttgaggtgtgtgggttggggagaaagtggttaagaaaacttttctgccagcatacaaactaccctggcttcatactttgctctaaatttctgtgtaatcccagggttttagaggtaaacctgtacggatctcctatcttacacaagagggatgagcactcacatttactgaggccacatgagggcttggcgcagttgggagcttttcatttactctctcagttggctgatgaggaaactgctggtacttttgtcctagcacacaaagaatataaccatcctgaaggaaagagagttttgattaaagaggggagggtgagagaaggagtaacactggggcagggcagaggatggtatgcatggatgggtttgctggaaggagaggaggactcaggagacccggtggtaggagggtgatatgaagaggagggtggcccaggatacactgagcacacttttgcacgttagtggaagacactggaagtacaatgtctgatacaatttctgggctgcctttgccacaatattccaggttgctgatatctgctttcaaggtaagtttgtctgattagaatctagagaagtgtttgagaaagcaaagaggggtgaaaatgttattactattattttagtggtggtaatcattaccacctgctgaaagcttaatatgtgctacaaactgctatgtgtatgatgtatcttacataagttaatttttacgaaaaacttggaggttggtgttcttatgcttattttagaggtggatgaactttcttggccagattctcacagcaaatgggagatctgggatttgaatgcagatttgtctagctcccaaatttatgtgatggaatatcaaataaataacttaatctctactcataaaacatggattccatatcccttttagaaccatttttatgtgattcaagccaatccagagcataacaacactagaagatataatagcagtaagataaactgcctctttagctatttccaaattcatggtctcaattaagcctttttcacatgtgctggcccttgtaattcctgatgtacttttcctaattccaaatgtctggtaacaatttatgatgtataattaaatgggctaccctccttttatcacgccttctagatatagtcccatcacatgaaacaaagcgaagcaaaacacttctttgatttaatgttgacagtctcacattctcattcttattaagctaataacatttaaagatgatactgaggctctttaataatccagcaagaagaaaaatacaattaggcaatgatatggtttggctgtgcccccattcaaatcttgtcttgaattcccaagtgggaagggaacctgtggaacttgtgggagggacctggtgagaggtaattgaatcatgggggcaagtctttcctgtgctgttttcgtgatactgaataagtctcacgagatctgatggatttaaaaagaggagttcccctgcataagctctctttgcctgctgccatccatgtaagacatgacttgttcttccttgccttccaccataattgtgaggcttccccagccatgtggaactgtaagtccaattaaacctctttcttttgtaaattgcccagtcttgggtatgtctttatcagcagtgtgaaaacagactaatacaggcaatatcagggcaaataaatacatcttgggaagtggtagaaaggggag

SEQ ID NO: 30772 - DNA, 2300 bp, Homo sapien
tatttgattcaaagtggtaaaagctgtaaactttctatttgtgtaaatatacatgaagctcaggaagggaagctgtggtaaccgttccttttacttaaacgtcctgggagttgcagcagagaggagcttgttctaagggaagcttttctgtttttcccagttgtccccagttctacctcctggctttgccctttcagccccatcaccacatccctggctaagtccagcctgagatagtaggctgcaagaagtagatggttaagggtcagctgatggcaggagggttctgggtgaaagatggaaatctcactcttccaagttcacctctcagtctgcaaaagagcaatcagactgagaagtacctctctttgttttccctctccccacttaagatacaaaagtgtagcctttgtgttccttaaagagctccaactcttctatgtctatatcttttgaataagtggaaacccatctattgccctttccacttttctgtttcctacaacggaagcacataatgccaagtaactgggagggcctcccatgtgatcagcggtctctaggccatggtcaagactaggaaggactcaagagaggctcctggaaggtgatatttaaaatactgattttaaggttctacccttaagattctttttgttttgtaacctgtttttcttcaaataatatattttgaacagctttttatattaaaaatatataatgattatgcctacagagtatttcattacctcaagagtatatgacgcgacttcaaaaagtccatagaatatacatattataaaaaaaaaatgcatggatttcaaaattattttgcaccaaaataaacctacccttaagattctgattcaggaggtctgggcttaggcccaaaaatctacgctttaaccagtgcccccaagtgattctgatgtaggagatccacacccacacacgaggaaacagtgatataactggtttgaggacagcagtaccacctttgcaaataaatcacttattcttaagcatctgttttgctttttgaactgatgtcaacttcctgattggtttccaaatggctttgcagtactcattcaacatttaccgagcaatttcagttttcagtttgcagagaactgaactacccgaggcttgttctgtgtttggactggggatggggagcagagaaggatgtgatcacattaaagctatttctcaacttcctagaaaaatgacaaattgaccatttcaagatttgtgaaacaggttagcattggctaaccacagttacaataatttactaacctttttggagcccctgtgtacaagaggcaccaagactttctgggtgggaaggttgattctgtaaccaaactgccagggtttaaatcctactttctccatttatattatatgactatagaaaagttagcactttgggaggctaaggctggcagatcacttgaggccaggagttccagaccaggctggccaacatggtgaaactctgtctctactaaaaatacaagaaaaaaaagaaaagaaaagttaatttaacttttctgagctcagtttcctcctcgtctgtaaaatgaatatgtaacacctcactgagttcgtacaaggattaaatgaagcacttaaatgcctaattgatgcagatggctccaagaatttaacatttacgaaatattcactatattttttaggttaagggtacaaaaccattgtgagtacactaaggaatgattatagaggctgatcgaaattctgcaaaaaaagcgtaaattttacgtttcattcaagcagttcagactcacgattttaactagagtaatctggggtttgtttgcttgttttttaaggttccctaacccttggcttcttggggagtttgatgccgcactcagccccaaagtcccccttaactcccaggtttagcggcgacagggggcgcgcggttgacaagggcaggcgccccggggaagtaggagcaggggcgccggtgagccgcagccgcagcggcagcctagccccgagggagggaggaggagccgagggagacgcgggacccggagccccgcgggccaccgcccctgccggccgcgcagctgggaggatgcggacggcagcgagagcgtgcgcggccacgtgacggccgctataagagcgcacggggcagacgctcggttccccgccgtgcctcctcgctggccgcgctccctcccggtgccggcttctctgagtcaccaacctgaggctgccccggccgcctgcgcacccggcagcaccatgacaggtac

SEQ ID NO: 30773 - DNA, 2300 bp, Homo sapien
cggcctctggcggcccggaaccccaggaagcaggggctccgaggcggggatactgcggcctccgcccggctcctccgccgcccgccccggccccggccgccacgctgagcctatttttaggcctttggggccgggttgcgggaagccgggagtcggactagcgtccccgggcgcgagccccgtctggtgggagggcgccggctttggcttcacttgttgcgaggcgtccgggccactccacgagttagccccagcactgggaagctccgagttagctggtccttccgtgtcattgaggctaatagccagggttattacagcagttgaactgccacaaagattgcaggtgtaacccagagttcagccgtctttaggaagattaaactcctacccagctgtcattggtctttcttggtcatttgtaatgttggctagtctggtgttctaacctgtgttctatcccttatttaatcttggaaatcatccatatccttgcttccagaaatccttgaatcctgctcaccttattacatttttctccatgatcgcctggaacctggacttcatttgagttagatgatcattcattttgcctagcttaagtatttttggtacagattgacagcgatgttacccatgttataatgggctgaagataatagaagcaagtacaggcggatgttgatgggcctgtcaagggacaggtgccactgttcagagctttcctagagtgtgagtgactgggaagctggtggcccttcgggggtggggaactggtcttcctacaacttagtagttggcctgccgtgggagagggcctaataaaatgtgtgaagatggctctcaggtcagcagccgagggatgcgctggcccactaggcaacccacaacttcctctcatgtctcggtggaatttctactgcttccagcctccaccttggaaaacgggcaagggagaatgagggaaagccaggtcagaaagagaaggacttcatgacaaaatgtcccaactcgctggttaagcaactgactcctaccagaacttgatccgaagtgtcctatgcatttggatgcccaccaacttgctaatgtttcttggagatggaacatggcccagaattgtcccagggaatgactggagaaatcttgaagcctgtgctaggggtcttgggagggtggggactgttcagcaggaggaaaaatccatgtatttaccttctcttctggcaactaagtgattattggagattggggtgcgtgtctgttggtttgggcggggggagggggagggtgcaggatggacctgcaccttcttctccaaagaaaagcaggcagttgtttagggcttcttgggtgatctccaaatctatttatcagtgattgataactatttagatagaagcatcaaggagggaaagcctctttgaggagctgatacttgaggagagactcaatgttatttttcagggatattggggcaggggagcttttgctccacgttgaggaaacagttatgtataagatgcctggagttcgaggctgcagtgagctatgatcacaccactccactccagcctgggtggccgagtgagaccctgtcttaaaaaatacatacatacatacattcctgaggcatggcataaacgtaagcaccagaatgaagaatatggactctgctttcagactgactgaattgagtttgacggttggttttgtgcttgtctgaaaacactgtctacagtaccttgtagaagaaacagcaaatgtactacttgatctcttcattaccatctgttagttgcctggagttcaaactcttggtattaagctattgttttgtctgagaatttagcgtgtcggatttaatttctatagcttaatcaacctgttgaaggttgccatatgtgcctgctatgatcttgaaccattcttgaagtgggcacttggggttttctccccaaagggctacagcttgattcatagagaaagttgatgttagaggaactggttttgctgaattactgtttgaatgggttcctggggaaaaggctttctccagataagatactgtaatgagtgttttttttttctttgtattaagatcaggcctttgtgacactaaccacaaacgatgcctacgccaaaggtgccctggtcctgggatcatctctgaaacagcacaggaccaccaggaggctggtcgtgctcgccacccctcaggtctcagactccatgaggtgaggacctcgctgccaccccagcatccaaggggctctgacatccttctccctgttgctgac

SEQ ID NO: 30774 - DNA, 2300 bp, Homo sapien
aattttggattcctttcctttccataccattcctttaaatagcaaattttagttcattcaaagcacattctttaaccatgggacagtcattattcatagatcttaagtctttttatttttttgagatggagtctcgctctgttgctcaggctggagtgcagtggcttgatctcggctcactgcaacccatgtctccctggttcaagcgattctcctgcctcagcctcccaagtagctaggactacaggtgcgtgccaccacgtctgcttaatttttgtattttcttagtagagtcaggctttcaccatgttggccaggctggtctcgaactcctgacctcaggtgatccacccaactcggcctcccaaagtgctgggattataggtgtgagccattgcgcctggccagtcttaagtctgaaagagctatgttctcatatttggaattttttctttgtctagtgagcatgactttcttactcttacaaaacatcaatttgagcaatttctggcatattttccaagaatttatttaaaatctggcatactaaaagctgaactgtattgccatttgcctcaacacacttcaagaagaacatacaacaattaaaataatttgaaatgccattgtctttatcttcctcatcaactttggtcaaatgaaataatacattgtttcaaattctattgctcatccatggttcatgattagagatcactacagtttatttacgataatgaacaaatgtgtcttgaaaagctgactaccggcctggcacggtggctcatgcctgtaatcccagcactctgggaggccgaggcgggcggatcacctgaggtcaggagttcaagaccagcctggccaatatggtgaaaccccgtctctactaaaaatacaaaaattagctgggcgtggtggcgggctcctgcaatcccggctactccggaggctgaggcaggagaatcgcttgaatccgggaggcggaggttgcagtgagccaagatcacccccattgcactccagcctgggggacagagcaagactccatctcaataaaaaagaaaaaaaaacaaaaaaaagaaaaaagaaaagctgaccacctaatattattgtgctgacaggcgtgtaacatggacctctctgtgacgcgcaagtattatctggcagttacatggtgccgcctgtgcagctgggcgccaccaccagcttcctgccctgtgcgattaaaaggccagcttcggggacagcagcctcctcaacgcaaagcgaccagccctgccaggcgtcggctgcagctggtccaaggttgacggtcccagggccgcattctccttccggtcacctcagactctggaaagagagccatggagggcctcagagcgcccctctgcagttccttgaggaaaacaagggcctccccctcttggctggagcagccaagtgcccacggggaaaatggtcccgtccaccatttcaggcaaacgcccccatagctgtaataaacatgtgatgggtttcctgcaccaagaaaggaaaattttccttaaaaataacaaaaagaggtggggaggggactctaagttccatttaagattttccaaactcgttgtgtctcatgcatacgctgaggcttaacatgaaaatttggagcgaaagtccccacggttcaccacagggaatgaagtaaagtatctcgccggtagctctaggtctcgtaaaccgtggagctcctttagtataaggccctattatgtgccacattagatgagaagaaaataagaggaaggatacggtagagcctttagaatggggttcagtcttaggactcgtaggataaaggaaggtcgtttccctccgtttgaggcagggaatcaaacaaaacaccggcaccgcaggcaccgcagtcgcactcctggggcctcgtggctttcccgcgcgcccgccttgggggcggggaagaacccggatggaaccacccttgcagcccggaccccccgccgtctttgaatggcagcggggcggagttgccctcccttctgtgctctgactggtttggctccgcactctcctcttcgtgattgggctttcctagtgccagtcacagagcgacgctggtctcccagattgttgcagaaggagacggcgtcgacgtctgactggactcgcggcgacttacctttcagtcgtgcgctcctgatccggcgctcggaatttgtccccggcttcagggctgcggggcctggaaggaggcgtatcgaggcggctcgaaaacgatccaggggagccgaggcgctcctctt

SEQ ID NO: 30775 - DNA, 2300 bp, Homo sapien
ctatagttcctgctaatctggaggctgggatgggaggattgctcgagctcaggtggtcaagggtacagtgagccatgatcacactgctgcactccagcctgggtgacagagcgaaaccccatctctttaaataagaaagaaaagaaagaaagagagagaaaggagggaaggaaggaagaaagttctcaagacaacccttttcaacagagtgctaccctaagtgcatgtgctatgggctaaattgtgtcttccccccaaattcatatgttgaatctgtaacctccaatacctcagaatgtgactgtatatagagatagggcctttaagaaataattaaggttaaataagatcataagggtgggtcctaatctaatatggctggtatctttataagacaagggaaggacaccagggatgcaggcacacagaggaaagaccataggaacacataataaaaaggtagtcatcttcaagccaaggagaaggggcttcaggagaaaccatacctgctgacatcttatcttggacttctagcctccagacctgtgaaaatgaaatatctattgtgtaagccacccagtctgtggtgttttgttatggcagcccttgcaaacaaatgcaacctcccgcaaggaattgatggtgtgccattgctgcccctgcattcgtaacaggaatacaagtgggcagctcctgctcacagctcctgacaaacgtggaaaccagacacatgccccaccttcccttgggtagcatgtctcttcccaaagaatcttagatgagtcaggtgcagtgactacagcaaggaagaagacactatctctaggaaggaatggggttccaggttttgagcaaatctcacttctttctccaaaacagacattctttttatgcaggtgaaattacactaaagttaatatcagtcttcattaggagaaaattgaattaggataattaagtcttgaagaagaaaattaagccaaaaagaataatatggcagatacttgtggaaaggaatcttttttactattgattttgatatttgctcttaagttttgtatctagaacaaataacttgtggactattagtctggttgttttccataggagccttctgtgattttttgcagccctagttcctgacctgagctacctccatgtttacttctctaactcactgagtttgacgaacctgttgtttcccattacttagaggtactttattcatctgaagggcctaggaaagggaggcaagtttaacttcaatccaattgcatctaatttacaaattctgaactggaaactgactgaagaaaatgttgcactttcatttatgtccctgtgtgcctaaataaaacagcatccctcaatccatgctaacacatatattttctaggtgaactggacaaagttatactacttgttttatctaaatctgatttttttagaaaagggaaagtgttgcgatcgtgaactccacgttgagatgtcaggaatagataatttactgcatagttttaggagcactggactgaaagccaggggatttccctcctagttcttctatcctctggggctcaaactagtcttttgtcaaatgcctacaagatgaagtccatggattctttctttcaacaaatatctttttgccaagcacgttcaaggctttgctctttccagctgaactattctagaatttccattattttaaagcaactcttcagagtgtttagccccgagttgcaccccatttcagtttttgcaaccccatcctccagaagctcagggactactgaagagacatgaataacgctcctcaaagtaagtacaaaatgttacaagatagatgatgaattgtcagaacgtactcaaaagccaaaacataccgcctggcccaaagcagtaaaagacgaaaggcagggacccagcggtccccgcacccaccggccactgagcatagagcagtggcaagctcgcgcggcggagtgggaggcgcagagaccgaaagcactgcagcgccagagcgcgggctgaccaggctggcgtgaccgctttcccgacgcctgccacgccccgcggcggcctctttaagtagcggagccgcgggcggggccggctggcgttcacgtgacccggcgtcattggctcgctcgcggaagtagtcctacattcgcggtcagcgcggggtctccgggcgccctgcagggcgggcaggctgtgccatcccgccggacgtcgggatggtgcagctgtacaacctgcacccgttcgggtcgcagcaggtggtgccctgcaagctg

SEQ ID NO: 30776 - DNA, 2300 bp, Homo sapien
tacgatctccagggaaagaacaggttcaggctccatctctgtggcataaaaagaaccatcatcaggagaaagcttgctacctgtagaagtcaggatcattttggaggagggagcctggtcagcccagtgaatgtctgcagaaaggggcagcacctgtttgcttgcctcataagtacatgggaagtcaatgtaatggcagcatttcaatttcaattcatcggaaaagggccaatttgcttaatagtgttaatataatagagtctacatttggaagaagtgacattagatcctctgacttatctccttctttacccgcaaaattctaaagattaaaaatgtatattttctaaacctccactaaaatagaagaaaatataggagcatatttatgtaatttggaggacatggatgggaactcagaaggcaaggaggaaaagatacatatagtatactctaaataaaaagggtatggtaaaacatgccatcagcaaagtcaaaatcagaaaatagactctaaaaccatttactatttatagacgacaaaaggtttatatcccttttaagtagagagctacagtgtcatgataagaaaaacaaatgaacaacttaataaaaattggacatcatgcagaagagaaactatacatggctgataaacgtaggaaaagatggccagctttataaaaaggtctaggaaatgtaaattataatagccgtgagagtccatgtttctctcattgtgtagagtcagtgctagtgaggatgtggggaaacaggtgtgtttaagcactgctgctggtaacatgaatttctattatctaattgatagtaattgggcaatattgaaatttaaaatgcccatgccctttggcccaacatatctcacttttgggaatctgtaccgttaaaataaatcccccagtaaataaatatatagatataagcctatgtattactatgaaacatagtggcaaaaaaccctggaaatatatttgaatgcttatcagtaagggaattattgaataaattatgcgtatgtatgtacatatgggatgttgaacatattgaaaaggatgttagatatccatgtatcagcctggagggagagatttattaataatttttaaaagttgcagattgttaaatatatttaatatgattacattttagtttttgttcatttttaaaaaagacagaatacctctctgtgatctctgtttatatgagagaaaggtgttgaaaggcacataccaggctgtgtgttaacattgggtcctcaagggggagatcattatgcttttcattttgcatctctttaccacgttaccattttgacttcccacaaccaatatatgtttataagttaaaacttatacaatcaacaatttagagaaaattaacttggatctgtattttctttgctatttccaactttatcctgtttctcagacttgtgacttgtgggaaggagagggtttgaaatgtaaattctgctaatctgagaattccttaatgtatacctaattttggtgtcaccctaatagtgaattctgtgtcagtagagctttgttagaactgcagatttagagctacagtaaacacttaattttacattttattccttatatgaactttctgtatgttacatgggcaattaataggttgtcttaagacactcagatgggagagattgcatttcagaacctcaaagcctaatgtcagtcaaaaatacacctaagattttgttacttagggttttattctattcagtctttaattcgaccatttgtgttagaattcattaatagtactcatgtcagcaagggaggtggttgtatttctaattacaaattctcagtataatcttcattccttctcaggagattatttggtagcaattgaagagaaaaacaaagctacatttctacgtgcttatgtgaactggagaaataaaaggactgaaaactctcgtgtgtgtatccgaatgattgggcataatgtggagggaccattcagcaaagccttcagagaccagatgtacattattgaaatgccgctttcggaggcccccttgtgcatttcctgttgccctgtgaaaggagaccttctcgttggctgcacaaataaattagtcttatttagtttgaagtaccagatcattaatgaggaattctcactattggactttgaacgttctttaattatacacatagataatatcactcctgttgaggtttctttttgtgttggatatgttgctgtcatgtcagacttagaagtcttaatcgtaaaactggagt

SEQ ID NO: 30777 - DNA, 2300 bp, Homo sapien
tttttttttaatggttagattcagattatgcattttcagccagaatattgcataggtgatttttgtgttaagggtatcacatctggaggcacatgctgttcatctacccctctttggtgatgttaatttttggtcatcaggtcaaggtgttgcctgatttgtccctgccaataatttaatgccaattattatattagctgtgccctgtcttttcagtcttgcttaattgaaagtcttcgtttaggtgatttgaccgctagagtctgaatatattgattgagtcagattagctagtgataatttttatgagccctctatgagttatggaaatagatgtagtagagcctaaacttaccaatcaaaactaaaataagggaagaatactcagtctaaatttgagaaagaattaaatcacaattttttgaagtttatttcaaatattaacatgttcactagtcttactgagatcaaattgttgctaagtttacagtattattagtattacagtattatttggacctctgtaatgattagagctgtttaacaaggtattatttataatcatgtatgtattaaactggctcatagatggtgggaaaaaagccctacagctaagcccttgtcagaatggtgaataaccattttgtttacttttagggtttaatatgtccaaatgttaactttactaacaaaatatataaatgtttttaagaactcaggaacttttgagagtctctcttcagcaacattagtgtttgtcttttttgtttaggtagactatagcaatacctataagactgtcaaaacccagagctgcattcaccttctcagtgaggctcatctgttagtgcgagctgccctgatggatgccagtcagctggaacctggagagaaggcagagcttttggaagcatttaaggaaagctgtgggcaccttggggactgttacagcaggtgggtgacacctcttggaaccttgttacagaagtcatcttgaactttgggtacacttgttagcttttccatctctggtagttacctgataaatgggaaggtggttcatttattcccttcttccacaagcatttgttgagcacatactctgttaggcactgtgctaggcttaaacatacaaaaatgaatgtgacccatttcctgctctcaaggagtcacagtttagaagatgagcagtaagtctcaagtttgtgattttcccaccatttaacttaggactttgacatttttctcaagctttgaaaatccctgacattaaaaacatatattttgttagtaaagttaacacttggacatattaaaccctaaaagtaaacaaagtggttgttttccattctgacaagggcttagctgaaggacttttttcccaccatctatgagccagtttaatacatacatgattataaatactaccttgttaaacagctctaatcattagagaggtatgactagtttattgtctgctaccttaagggagagctgccagttggacagtctgtgattttgatctcagtagtcagtgcttttatgatatcagaaagggacactggtatgaataatgtttttatttttgagagtaatgtttacaaatttttttgcatatgattgttttcagacttacttgatccacatgaatggttaaaaattaataaaacagacttttcctcctataaacaccattattttagagtccgatcatgaatattagaattaacttaaattgttgtttttgtttctattatgagcaggcaaaaagaaactgcattaattagaagtttgtaagataaaacttaggagtttgtttcagttactaatggcagtagaaaagcattttggaatttctatcttctggaaagcatgatatattctgttatagaatgttttagatatccaggtttaaaaattccaaatttgactaggcatggtggcttacacctggaatcccagcactttgggaggctgaggtaggataatcacttgaggtcaggagtttgaaatcagtctgggcaacatagtgagaccccgtctttaaaaaagtgacaaatttgaggtttttcatttccttccctttaggcttgactcccagcattctcatctcaccttgccatactataagatgtctggtttgtctatggctgaagttctggcccgcacggactggacagtagaggatggattacagaaatacgagagaggattaatcttttacattaatcattcactttatgaaaacctggatgaagaattaaatgaagtgattatagttttctgttttctatctaata

SEQ ID NO: 30778 - DNA, 2300 bp, Homo sapien
aaggacttttttcccaccatctatgagccagtttaatacatacatgattataaatactaccttgttaaacagctctaatcattagagaggtatgactagtttattgtctgctaccttaagggagagctgccagttggacagtctgtgattttgatctcagtagtcagtgcttttatgatatcagaaagggacactggtatgaataatgtttttatttttgagagtaatgtttacaaatttttttgcatatgattgttttcagacttacttgatccacatgaatggttaaaaattaataaaacagacttttcctcctataaacaccattattttagagtccgatcatgaatattagaattaacttaaattgttgtttttgtttctattatgagcaggcaaaaagaaactgcattaattagaagtttgtaagataaaacttaggagtttgtttcagttactaatggcagtagaaaagcattttggaatttctatcttctggaaagcatgatatattctgttatagaatgttttagatatccaggtttaaaaattccaaatttgactaggcatggtggcttacacctggaatcccagcactttgggaggctgaggtaggataatcacttgaggtcaggagtttgaaatcagtctgggcaacatagtgagaccccgtctttaaaaaagtgacaaatttgaggtttttcatttccttccctttaggcttgactcccagcattctcatctcaccttgccatactataagatgtctggtttgtctatggctgaagttctggcccgcacggactggacagtagaggatggattacagaaatacgagagaggattaatcttttacattaatcattcactttatgaaaacctggatgaagaattaaatgaagtgattatagttttctgttttctatctaatatttttaacatttcattttaatggtttattttatgtagtactgtttagaagtcagattccaaatatttttcttctttgatactctttttctaaaaaagtaatgtgaccttttcttcattaatgaagatagaattatagcttggaaaagaacttatggataatcttctcatactttctcattatacagacagggacatgtggtctgttgtagtctcaacacctgcccagtgacagtagcatgtcctcagtagagctacacagaatgcgggccttgccttccatcttctcatctgcagtccttcccgcaaccctaattgtcccttactccttgtgtcctaaacttcacttataaaactctgaccttaggccagtgacctaaagacattattaaggattatttttagggctgggcacagtggctagtatctgtaattccaacactttgggaggttgaggtgggaggatcacttgaagccagaagtttgagaccagcctaggcaatatagcaagatcccatctctacagaaaattaaaaaattagctaggcttggtggcatacacctgtagttccagctactcaggaggctgaggcaggaggatcgcttgagcccaggagtttgaggctacagtgagccacaattacaccactgcattccaggctgggcaatacagaaaaaccctgtcttagagagaaaaaagaaacgataacccctcatgtattttatacatagttggatgcaaatatgccacattagaaattgtggtatcaaatgttttaaggttttgaaatgaaattttctcatacaaattacttaattgggtatattttgaactaaatagtagtttttatgatggatttttattgtcattcaatcaaatgtttattttcttcttctgaagtgttaaaattagaaacgctggccataacctggtacatattttcattgctttttcttccttataatcagcaaagatcacttcaggttatctcaggcctcccatgtattagtatcagtttttgtctttttaaaattaaaacataatactataattttatcttacttggaatgtttgtgtcttggctttttgcacatatgttttgctgattttgttgctttcttctggctgactgaccttttattccttttattccttcgtgctcaccaaaggaattagcagcaaaagtggttcagatgttttatgtggctgagccaaagcaagtgccccatattctctgtagtccttctatgaagaatattaatcctttaactgccatgagctatctaaggaagctggatacttctgggttttcatcgatcttagtgacattgaccaaggcagcagtggctctgaaaatgggagatcttga

SEQ ID NO: 30779 - DNA, 2300 bp, Homo sapien
gaccagtgccctggaatacccccagagatttttatttaagtctaataccagatttttttaaatacctagtgtaattctaaaaagtggttagagctcagagacagtgagttcattattcaaaaggcccacaccactaatggacatcagtaaaaattattgtagccaatagaagaaaaacatgtaaagttgtgttacaaactgatttttttttaagctaggtactagtcacgctacccacaatctttaaaatatttcttttgattctgcatttttgtatatttggaagcattgagaatattaatcatcaaaaataattaaatacacaagataaagaaaaaacctcctacatatgacctttcctgttattcaagatgaattagagacttttttttttaaatctagaacagcaacacactcccagtatatggtgcacaggaaaagctgttataattcgcagatttgggtgctcacaaatataatcacttaaagaactggaaataacagaatcattgttttagccaggaagagcagtgggattcccaggttgctagggacactagcatagaacaagaactatgcattcagctctgctcctttcagccagcggctgctctgaaatgccaggaaccacaaggagttgcaaggatactcctgacacataaagcgtgggcaagcctgaataggtcttttaaaaattaaaaaaacaaagttggtcctggaaagtctgtgaggttgtcatgtagtagaatctaaaccacttccaaaatgttatttcccaacttttacagccatgaatggattcatgtatgggaatcagccgggtctcactatgtgcaaaggagattcggtcgtgtggtacttattcagcgccggaaatgaggccgatgtacatggaatatacttttcaggaaacacatatctgtggagaggagaacggagagacacagcaaacctcttccctcaaacaagtcttacgctccacatgtggcctgacacagagggtatatttacttaaagccaagtctctattggatggatttgtgtagttttggtttaaaatcctgtagcagaatgtgttgggtgataaacttatcccttccccaagcctctgaagtgcccttcctatctttgaaagagcaagtctaggccactatcagctgaagtatgtaccagataggtctgtttcctagttactgaggacaatgtggagtaaaagaacatggtgtggttttctccacttccataggctcctcaagatgatccctttttagattatggtccttttaaagatagctggaaaatcagactagaaggggaatgactcccataaatattctgcacctaaacttttcatcatgtctctgtagcctagatgtagtgttggcttgttggttgcaagtgaatattctatgctagcattgtagccatgcaaattcagagacatctacagacctggctctgaacgagtaaaacaaactacaactgaagagaaagaattttaatcaaaatgtgaaaatatgctagcttgtttcaggcttcatttggtttatcatatgccactgaaacttaagaccaccccagtgtcacgctttccttccttcaacaaatgtaaatacaacaatgaacaaaagagataagatgtctcatgctgctgaaattctaatgcagggagacagacaacaagcaagtatattaatacatatatgtcaagtgattataagtacacaaagaaaaataaggcagaggaaggggatggtgactgagaggggaaagggtcaagattctctcaggaggtgctacttaaggagagacgagaataaaatgagggtgtgaaccatgaggatattttggggagaaggcagaggaaacagcaagtgcaaagttcccaaggcaggcacacacttgatctgctctaagaacagcaaaaggatggatggagcagggtgagcagaaggtgtggaaagctagatcacctgaggccatgataaggacttcagcattaattctgaggaaggtggagagccccagagggcactagcaaagaagtgacatgttttcttatttaccactccagggacttttaatgttgaatgccttacaactgatcattacacaggcggcatgaagcaaaaatatactgtgaaccaatgcaggcggcagtctgaggattccaccttctacctgggagagaggacatactatatcgcagcagtggaggtggaatgggattattccccacaaagggagtgggaaaaggagctgcatcatttacaagagcagaagtaattctccagactctg

SEQ ID NO: 30780 - DNA, 2300 bp, Homo sapien
cttttttgcattacaccataaaacgttcacaagggcactggtcacagtgttactgtttaaccatttcatttcaccaccaatatgaggggtgtgctatgcatacattctggaaccctcagcaactatttgaacaggtttgtttgttggatggttggttggtacaatttgctgaaacaagtgactctgggcatggttacggtgctctgatcaacatctttccatgcacaagattggggctgagtttgagcactgagtgaaaaatgaaaagcaaatggctgagacagttgctggttcacatcgtggcttcatgccaattagaaaaagaactgtcccccttctccatgccctggggaggataaacggctgaaaaatgccccccgtctgtgtggaccattaggggaaaagcagcttcttgcaaggcacagggtatggccggtggcatctgagcaagattttagtccttcgtcagtcctctcagtggacatgacggcacaattgttcaaggcagtcctagaaggaggccttggggcatcctgggcaacatgattcagttttctgtaccaagccatttagttaagattattaccagctggtgagagaagctcctccactgtctgccttaacataggtcatttcaattaacctgagattttcagatgaggaaactgaagctgggctgaagtatcttacttgaggtcatttggtagcatcagatttttccctagcactccttattctccttctctgctttatttttctccatagcattcaccactaatattgtgtatttcatttttcatttttatattttcagtttccccaagtagaatgtaagttgcatgatggtaggtgttttgttctctgcggtattcccagtgagtagaacagaacttggcacagactgctgtattcccagtgagtagaacagaacttggctcattcaataatatttcctaaatgaaggaattgttcaaatatcgcatgctttcttctataccaatctatttcaacaagtggccttcagcaaatacacaacgttttgaggtatttgagagaaaaaaaattatactaacacaaagtgtcaactgttatcaggattttcttcagctaaaaaaaaaagccatttcatacttttagacatatacttcctgactaaaaacagggttttaagaaaaagtcttccaccttaaaattcatatccacttcaaagagaaaaatttcagtctaatgataaactggggtactttctatttactaagactaatctttgcctctgaagacaggtttagttatggtttgtttatttgatgattaaaacaaagttattagcccctgttaggctctgctagttatttgcatatagcaatacagaatgatctggtaaagtttttatgcagatttggtccaagctcataaaacagataaattcttccaaattaaattcttatttttgtttacttaaatttggcatgctagatatcatgtttcatatcataaagctgcaattaatcatttgttagacttttagaaatagtcatgcaccacataataatgtttgagtaaatgacaaactgcatatgtgatggtggtcccataagattataataacatatttttactgtacattttctatgtttgcatatgtatagatacagaaatatcattgtgttacaattgtctatagcattcagcatagttatagactgtacaggtttgtagcctaggagcaataggtataccatatagcctacctagatgtatagtaggctatatcatataagtctgtgtaagtacactctgtgatagtcacacaatgacaaaatagcctaacaatgcatttctcagaacgtatccctgtcattaagaatgactgtagtaaaaagctacatgttttgattcattttacataattcttatcctgatttactaaaagtgcactgtttgcaggacactgtgctgtgacatattgtcagaggaacaaagggagcatttagacacgttctctgccctcctggaatttacacaatgaatggaaaaaggcacagagttatgcacaccctaatgcctccaacaataactgttgactttttattttcagtcagagaagcctggcaaccaagaactgtttttttggtggtttacgagaacttaactgaattggaaaatatttgctttaatgaaacaatttactcttgtgcaacactaaattgtgtcaatcaagcaaataaggaagaaagtcttatttataaaattgcctgctcctgattttacttcatttcttctcaggctccaagaagggg

SEQ ID NO: 30781 - DNA, 2300 bp, Homo sapien
aactcaccaagaaagctcctcttatgaaggccaccagtgacctccacgttgctcaacccaatagccgattctcagttctttcgtatgatgtgccctttggcagcatttaactttgttgatcacgccttcttcttcttagaaagtcacctttgagaataagctcctgatcttcatttctggctcactggccatttctcagtatcctttctgccttcctctcatgtccctaaactcagtcctgggctgcccaggatttagtccttgggtctcttttctatcaacatgcatttccttagtgtctcatgggtttaaataccatttatatgctgacaactgtcacatttatatgtcacccagacctcttccttgaacttcatatttgtatatccagctgcctagttgacatctccacttggatttctaaaaggtatttcaaaacttagcacattcgaaactgaccatatcattcctcttctcccaaccctgctcattcagctgacttgctcatttctgttaatgacaattttattctcccagtttctcgggcccaaatgatgtcgtctttgacttctctctttctcttatacccacatccaatctgccaccaatcctgttggcacaagcttcaaaatatatcccaaatccagcttccttttttttttcttttattattatactttaagttttagggtacatgtgcacattgtgcaggttagttacatatgtatacatgcgccacgctggtgctctgcacccactaactcgtcatctagcattaggtgtatctcccaatgctatccctccccgctccccccaccccacaacagtccccagagtgtgatgttccccttcctgtgtccatgtgatctcattgttcaattcccacctatgagtgagaatatgcggtgtttggtatccagcttccttttaccacctctgctgctactaccatcatgatccgagtcatcattatctcttacctggatggtggaaatggcttcagaactcatctctatctcctccacaccctttaccacctatttacaacacagcagccagagtgaaccttttaaaacatcaagcacagtgcctgccacataagagatgctcaatgaatgctcaaccaacaatgttattctcttcccaatcatcccaggaactctagtaaatatgattttatgctgcttctatgtgactggaaaaaacgtctaatgcccagattttttgatgcacttagatcaaaagcactagagggaaaaaaaaccatatccacaagggggtgccaagaaacctctttggaacctggactgctagtttctttctttctttctttctttctttctttctttctttttttttttgaaacagagtcttactttgtcacccaggctggagtgcagtggaacgatctcggctcactgcaacctccgtctcccaggttcaagtgattttccttcctcagcctccagagtagctgggattacaggtgcccagcactatgccagctaatttttgtatttttagtacagatggggtttcaccatgttggccaggctggtcttgaactcctgacctcagatgatccacccgcctcagcctctcaaagtgttgagattacaggcttgagccattgcgccagccctacctttgttttcttaatagtaggaaaaatatgcctttatttctgttatgatttttcagagaggtagagataatagatgcaaactcttggaaggaaagctgtactgatctaaccaagatattttgtttttctcatccaccagtcactttctcagtcctttcttatcccttgcaatttgaacaaagcttggtgaatagtgtgcacacaaaaagcacactaggtgaaagacagatacataaaaagggtaaagtcaggatattttaacaaacctatcaagctctaaatataagcctccttggtagttttctctttaaccctctctccactgttggatgaaatttgctgcattcaattccagttcccaccccaacttccttcttaacacaaggtcagggttaagccttcggtgctttaatccagaggaaaattacttattttaaaaagcagtgaaaaacaccgcattcctttggcacaggatgaagaccagctcagctcttcagttgttgatcattgtctattgttctccaaacagtaaaccagtatttcacactgagattgtcggctgcgggtatattccaattccccgtctcctcatgaatatgaagtgaagggctctgaccctggaagtggtaggtaatctcaaaaaaaaaaaaaaaaa

SEQ ID NO: 30782 - DNA, 2300 bp, Homo sapien
ctggttttgcctgtcccaaggatttcgtctgaagggcgggacattccccctgcctcttcgcaccacagccagagcctgccattaggaccaatgaaagcaaagtacctcatcccctcagtgactaagaatcgcagtatttaagaggtagcaggaatgggctgagagtggtgtttgctttctccaccagaagggcacactttcatctaatttggggtatcactgagctgaagacaaagagaagggggagaaaacctagcagaccaccatgtgctatgggaagtgtgcacgatgcatcggacattctctggtggggctcgccctcctgtgcatcgcggctaatattttgctttactttcccaatggggaaacaaagtatgcctccgaaaaccacctcagccgcttcgtgtggttcttttctggcatcgtaggaggtggcctgctggtaagtcattcaggattattactgaattctctcctgtttcctagatgttttcattatgtattttcatggaaagttttttgtaatgcatatttctaaatcaagtgacttttttgttgctgttcattcctttgaaagcagattatacaaaagcgagattggtacagtatagcgtagtaattttatgagatgttgttttacaaaatgctctttcaactaaaagtgaactgcctttttgctaaactctataggtaggaaacagatattcgcttttaaatcagatttgagagactatagagtttctactagaacgggcagtcatttaacatttgctctggggagccggaaggggttggctggttctctgcctaaatcaacagttttgaatccaaattctctgctgtttattttcagccatctgtgatagggaaaaataatgaattgtgagtgcattgctattttaaaagaactctaagctttctcctttatgtaaggctggggtgtggcgtctaggaaaaaccctacagttagcagcaggtcggtgtctgaagctaatagtggaatgtgttattttttccaagaattgtttttgattgaagtgagaggaatttccctgccaacctgggagctgaaagcattagcttcaaccacagcatggaaagaatgtgagcaaacttaagtttgctactttaaagtgctgggattaaaaattttaaggagaaattttatggaatggtaccatacgtgataaattttcttaatcaagtaaaagatagtaaaacatttaaacctaatacactgattatggcatggcaaatctgccctaaattatttatttaatgagattttatttaattttattttatttaatgagacggggtttcgccatgttgcccaggctggtcttgaactcatgggcccaagtgaccctcctaccttggcctcccaaagtgctgggattacaggcatgagccacagtgcccgtctgcctcaaatttaagcattattatcatgttaacatgattatttgtcttaaacataacatcacacttaagtttctttcgatcttgaacctgaagtatttcatatttactatattttaagagcttaatattgttaagttaaaactatgcatttgtataatcaaggaagcagttaatatttattatatatagctttcatgtctcccatttacaaaaaagtttcagttattctattaaagatttgttggtatattctgcattttacaagtggaaaaaatcagatttaaagaaagggtttaatatttccaaaacagagtttgttatctggggtcgtgtgataaactcttgtggaataaacacgtttacagtttattattttactcctcccatgttacatcctcaccctaaaaaatgctttgacagattacatgaaaacaagcagatatgacatttaaatggtctttttctcctcagaggtttacattctttgagatatctggtcaacctaatcaaagccagttaatgtcattggaaataaatatattttaccaagagatgcctaacctgacccatatgagcctgagcaagacaatgacctgactttgtttgtttcctaaccagatgctcctgccagcatttgtcttcattgggctggaacaggatgactgctgtggctgctgtggccatgaaaactgtggcaaacgatgtgcggtaggtcctcctgccctggtggtgaaaatgactcctaagatgtagctgtggcactctgtggctcacttcctgtgtgtctgcttttccctagatgctttcttctgtattggctgctctcattggaattgcaggatctggctactgtgtcattgtggcagcccttggct

SEQ ID NO: 30783 - DNA, 2300 bp, Homo sapien
cgggttcacaccattctcctgcctcagcctccccagtagctgggattacaggtgctcgccaccacgcccagctaatttttgcatttttagtagagacagggtttcaccatgttggccaggatggtctcgatctcctgaccttgtgatccacccgcctcggcctcccaaagtgctgggattacaggcgtgagccactgcgcctggccgcaagacaccttctttacaaggcaacaggaaagacaatcatcaagagaagggggaagagctccgtataaaactgtcagatctcatgagaactcactcactatcacaagaacagcatgggggaaactgctgccatgattcagttccctccccccagtctctcacttgacacgtgaggattatggggattacaattcaagatgagatttgggtggggacacaaagcctaaccatatcagtagtttaagcatcactttcccccattttggccccaggtgggatagatcagcagacaggagggttgcaatgattatgcttcaacaaaggatgccgtcattcacccataggctctgtcaccagtggaatcctgtctctaagccatcgggccaaacacacgttccctgttgttggacacatagtggtgacccaatgacactcttatgaggatttgcctgcctccgcctgagcaggtgggtggttccacgcttcccaactccactgatttatttcctcaggccatcctggattctggcttcacccctgttagtgtgctgaggccacacttcttgggccctcctccggtcccatgccacatcactaaccacagctggtctcctcaaatttggtatgtgtcccgccctctagttccgggccaaatccttcagactctagattcgtgaacctcattcaccttcttcttctaagctaatgcctccctaccttggtccttttctattttctgtactctctatcttgtcctggtgacaaggccctccaggcctggccccacccggccaccctgtccacctcccaccaccatccactggctggtgcaatctgctgttcaaggcataaatttattcagtgcccagcccctccttctgcaaggtaaccacctagaaagttagtctaacaccctttctctgccctgtgtggggagcctgtggaagctggtctcaggatctggctgggtaaaccatctgtttacctctgtgtgggttctgacactcctagccagttctgtttctctgaaccttgtttctccactctgcttgccaagtccctttgtcttatttttttctccctctccctccttccttccctccccccatccttccttccttttttccttccttccttcctccctccctcccttcctccctttttccctctctccttctctccctccttctcttctttccttcctctcttccttcctcctttcctctttccttctctcccattctcttcctccccctctcttcttcctctttttatttttgtcccatgctttaggccttccttggcccttcctggcattgcttttcctgacagcaacactcaataatttttaaaaagcacctgagccctttgtgttgactgatgccacctctgttgtggtgcagatttgttttagaggcagatgtccagggacgctgaacactgaaatccatcctgcagagcttgctgtaggcagagtaaagaagtttgctctgtagttttcccaacagccttctcaaatccatgggagacgtctcagacaccttgtatttaatagacaaggaaatgagctcaggagatttgccccaggttgtaaattaaatcagcacaaaggtagaaatgaacacagagctctcagattggaagctgtccagacagctgcatggagcaggggcacagctcactgtctttcaaagcctcaaccagggctgttgcatctcggacacttggcagttactggaaagtcatgttaggctttcctgttgattctttatcttgtggaggagttgcacagtcaatgccttgttcaagattaatcattttccctgttgcctatgactgaggctgtttctcacatcctgcccctggttttgcctgtcccaaggatttcgtctgaagggcgggacattccccctgcctcttcgcaccacagccagagcctgccattaggaccaatgaaagcaaagtacctcatcccctcagtgactaagaatcgcagtatttaagaggtagcaggaatgggctgagagtggtgtttgctttctccaccagaagggcacactttcatctaatttggggtatcactgagctgaaga

SEQ ID NO: 30784 - DNA, 2300 bp, Homo sapien
ggcttagtgtcctcagccacttccttcttgctgtttctgaaaacaagggagttagcctttttggtttaaagccttcactgctaaacacccagaggaacagaataagcaataaactatcaagtaggagtatcacaaaaatgattcccagaatctcacacaattttcccttgcccccaaagcagtctgttggtgacctccctgctacacttccagagagtgaatttcaccaaggttcccatcccccccacgattccctctctccagattagatattctacttcttgcctggaggtctgaaggcacaattaataattgaacaattaatgagttagtcactatccaagtgtttgaagtctgaagtggtcagggcattccaggaaagtgactgtttttcagtgtttctcttcctctacccaggaaataagttacctcaggcttgaaagaaaactgaagtgtggtccacaatatttcttactttcatctagtcactcagacagtatacatgggtaactccagttgtgcatctgaaaaatctaggacaacagggctagtgttggtcaaatgccatgatggtaacttctagaagcaaacggtgtagtccagggagaaaggagaaagctgcccagtccccagagagaagctgcctagctctaagtagcatatgcatttgattaacccaatccactcacccccaggactgttgcctttagagttcatatgctcaagactccctgtcagaagccagtgggttataaataaagttcatttgcacctgcctggagtgttggaaaacagctgtcagcacagtgatgacagcccttgtttgcttctggtggaaacacagctggttttctttttcttccttttgcttgtctgtatatccaatttttctaccaaaaaaagtcacattattttgtaataaggaataaaatcacagtttgttgttgtgttcagaagggtctcctactgtgtgcatatacctcacacacagtgtcattctattgtttatatttaaaagatgatgttttgttgtttgtttgttttcaaaaaggaaaatctatgagagagaacatagcctgggttttggcaacacagagctggagaggaggtaggctaatgggtatgaacatacagttagccaaagggataacctctgttgtttgacattacagtaaagtgaccatggttagtgataatgtattatagattgcaaagtagctagaagagaggacttaaattgttcccagcacatagaaatgatcaatattcagtgatggatacccccaaataccctggcttaatcactacatattctacacatgtaaaatatcacacgtaccccataaatgtgtaaaatagtatgtataaataaaaaataaaatcttagctcttcttcttatgctgagatgagcttgcaaaaatcactttgagcagaagcatccccacttgtgaagggggcatgacaccttcttcacagaagggtgaagaacatttaaggtgctcattcgtgcttggagtattatgcatggctcaataaacatttgctgtttttctgctttctttctcatcctgaccctgagatttctaagtatctttataaagcaaccagtactcatttcttagaaattttagaaggagcctcaacatttttccagtctgacttttctggaatccttcccacagcttccctttccaagggcctctgagccttggcaaagcccagtccatggcttccttgtgagcaggtggcctattccacggtaggacaggtcttaccatggtaataatgtcacttgctttttatttagctaaaatttgactccctaaaatattcgacctattttaacctctagattctcaatgaagaactagtaagacttccagttccacctcttaatccttcagctgttatgtaataccagtaccaggcagggccatcgcataatgtagagcttggtccaggcgtggcagagaacttcttaagtgacacaaagcaaatgaatgaatcatgcccctggcagttggcaaactttctaataggggtgtgttttactgcctcctgcactctataactgctcttccaactgtgtcttctccccagtcaactcatcaggaccttttctctccctctctaccaatgctgaccttcctttccccttagccttagtggatgatggtttctttattcctatatggaagacatagctgagaaagttgattaggaaaactgtttttgctaattccatcacatcgtgtagggaaaagatagaacttaattacttaattgcgtaacaagtaga

SEQ ID NO: 30785 - DNA, 2300 bp, Homo sapien
aacccaatccactcacccccaggactgttgcctttagagttcatatgctcaagactccctgtcagaagccagtgggttataaataaagttcatttgcacctgcctggagtgttggaaaacagctgtcagcacagtgatgacagcccttgtttgcttctggtggaaacacagctggttttctttttcttccttttgcttgtctgtatatccaatttttctaccaaaaaaagtcacattattttgtaataaggaataaaatcacagtttgttgttgtgttcagaagggtctcctactgtgtgcatatacctcacacacagtgtcattctattgtttatatttaaaagatgatgttttgttgtttgtttgttttcaaaaaggaaaatctatgagagagaacatagcctgggttttggcaacacagagctggagaggaggtaggctaatgggtatgaacatacagttagccaaagggataacctctgttgtttgacattacagtaaagtgaccatggttagtgataatgtattatagattgcaaagtagctagaagagaggacttaaattgttcccagcacatagaaatgatcaatattcagtgatggatacccccaaataccctggcttaatcactacatattctacacatgtaaaatatcacacgtaccccataaatgtgtaaaatagtatgtataaataaaaaataaaatcttagctcttcttcttatgctgagatgagcttgcaaaaatcactttgagcagaagcatccccacttgtgaagggggcatgacaccttcttcacagaagggtgaagaacatttaaggtgctcattcgtgcttggagtattatgcatggctcaataaacatttgctgtttttctgctttctttctcatcctgaccctgagatttctaagtatctttataaagcaaccagtactcatttcttagaaattttagaaggagcctcaacatttttccagtctgacttttctggaatccttcccacagcttccctttccaagggcctctgagccttggcaaagcccagtccatggcttccttgtgagcaggtggcctattccacggtaggacaggtcttaccatggtaataatgtcacttgctttttatttagctaaaatttgactccctaaaatattcgacctattttaacctctagattctcaatgaagaactagtaagacttccagttccacctcttaatccttcagctgttatgtaataccagtaccaggcagggccatcgcataatgtagagcttggtccaggcgtggcagagaacttcttaagtgacacaaagcaaatgaatgaatcatgcccctggcagttggcaaactttctaataggggtgtgttttactgcctcctgcactctataactgctcttccaactgtgtcttctccccagtcaactcatcaggaccttttctctccctctctaccaatgctgaccttcctttccccttagccttagtggatgatggtttctttattcctatatggaagacatagctgagaaagttgattaggaaaactgtttttgctaattccatcacatcgtgtagggaaaagatagaacttaattacttaattgcgtaacaagtagagaaacacagcaatcagacaataaaatgaacagtagctttttgccttaaacaattcttttaagtctgagctcaatgatacacaactagaccatcaaattattttgatattgaggaaaacagaagctcttttggataaccctgaattccaggctttcagtggaaaagacaaagacacgcactgtacaccattaagtacttgggagacatgattttaaccaggatgtaactcaattatattagtgatttataaagagtctggagaaaatatttctttatttgggcatgggcactgtcagattaaaggtgcagtggttctaaatgctgtttgttccagccctgtcttcgattgcaacaatgtgagtgtcttgtctgtgctggtggattattaacagaggttattggtctccatggcaaaacgattgaatgattgctctgaacgtaatctcatttatgggggtgcaaaaaacaaagcacttcaggtcagggagaatgtataaatgtccattgccatcgaggttctgctatttttgagaagctgaagcaactccaaggacacagttcacagaaatttggttctcagccccaaaatactgattgaattggagacaattacaaggactctctggccaaaaacccttgaagaggccccgtgaaggaggcagtgaggagcttt

SEQ ID NO: 30786 - DNA, 2300 bp, Homo sapien
aaagtagccgggcttggtggcgggtgcctgtagtcccagctactcgggaggctgaggcaggagaatggcgtgaacccggtaggcggagcttgcagtgagcctagatcgcgccactgcactccagcctgggcgacagagcgagactccatctaaaaaagaaagaaagaaagaaagaaagaaatcatgtagggctgggcatggtggctcaagcctgtaatcccagcactttaggaggccgaggcaggcagatcacttgaggtcaggagttcaagaccagcctggccaacatggtgaaacctcgtctctactaaaaatacaaaaattagccaggcgtggtggtgggtgcctgtaatcccagctactcaggaggctgaggcagaagaattgcttgaacccagggggcggaggttgcagtgagccgagattgtgccactgcactccagcgtgggcgacagagtgagactttgtctcaaaaacaaaaacaaacaacaaacaacaacaacaaaagtcatgttattacatcatattcttgactccaccagctacttagaagtcaaaggactgagcacatgtccaaactatcactcaataacccagagaagaccagctgtggcataaatgaccatcaagtctgtttcagaatctcagcattacaccaatctcagaaacaacaaaagaactccttggacaagatatcaacagccttgagatggggaagtaataagaattggtcactggtatgaatcaatgggctcactatagtaaacttcatccatcactgtgtattcattcttagggctctctcatagcaatcagagcatcaaatattagtgccaaagaaaggcttgattaaacttttaaaattgtacatagtgtcttcacttttgcactaaggctactctactaaagaaatatgggctttaaaatgaagtctaagtcaagttcttaggagaggagtttccctcactggcagtgcaggcaatcctgaaacaagtggttaggctggcacaacctccatctttgatagcctgaccctatgacctcaatggaacatttcaagttccagcctggtttctcctgaggaatgtagttatcttagggtaccacaattgaaacaacctcctctagtgtttgagaatatattttcctgtggggtgtaatttgaaaatttcaactaatgtaaaattcatgacatcaaaaagctggaacaatgtgaaaggaagaagagtgacaaagcaggcttgtgatttgatggtattttaggttaacaagtttaatgtaataaaactcctaacaatttccacacgattgatttgtccagcccacaactactccaccacacagttgctaataacatcactgtgctgtgtggtcattatgtcacccagctgggagcactatggcctaccaaccactgttcacttttccagcttgcttttcccaagaagatagaaactgcagaccacctacttcaccaaaagtccctctgttccccaagcttcacagcttttctctgatttatctcggtgtcacatcccaaagggcctggctctggactatctgacttagagtggccaaggaagggactaagggtctgtgcccaagagttggcttcagtcctgcagattcaaggcaaagtcacctgtgtgttttatggtggatgaacttcaccactgcttctgatccctgcttctgatcccttacaattccaacactcagagactcactccctgcttccagctctccatatctgtgaaataaccgtggaaggacacgcaccatctctctctttctctctctctctctctctctctctctcacacacacacacacacacacacgaacacacgcgcgcgttgggcactgtgacttggtgccttcttcggctccaggctgacttacttgaggaagtacctctggccagtggccgtgaaggtcatctcccagcccgggggcagtggcagctcgtcggtcacgtcgtaggactgctggcggaggtgcgcgtgctgctgcgcggggctacccgcagcacccgcgccggtgcccagctgcagggacgcgggcgacgagtgcgagcggacatgctgggcacccccagccagtcgaggccccgggtggccgcccgacgagtcggtgctggactggcgcgagtgcgagcccgaatcaggctccttaaagaaagactccggcaggatcttcttccgccacgagctaggcttcggattcatgacagagttgaagagggcttcgaggtctgtgtctaggtcctgcgtgacgtggatcacttgctgcccaggcgg

SEQ ID NO: 30787 - DNA, 2300 bp, Homo sapien
aatatattttcctgtggggtgtaatttgaaaatttcaactaatgtaaaattcatgacatcaaaaagctggaacaatgtgaaaggaagaagagtgacaaagcaggcttgtgatttgatggtattttaggttaacaagtttaatgtaataaaactcctaacaatttccacacgattgatttgtccagcccacaactactccaccacacagttgctaataacatcactgtgctgtgtggtcattatgtcacccagctgggagcactatggcctaccaaccactgttcacttttccagcttgcttttcccaagaagatagaaactgcagaccacctacttcaccaaaagtccctctgttccccaagcttcacagcttttctctgatttatctcggtgtcacatcccaaagggcctggctctggactatctgacttagagtggccaaggaagggactaagggtctgtgcccaagagttggcttcagtcctgcagattcaaggcaaagtcacctgtgtgttttatggtggatgaacttcaccactgcttctgatccctgcttctgatcccttacaattccaacactcagagactcactccctgcttccagctctccatatctgtgaaataaccgtggaaggacacgcaccatctctctctttctctctctctctctctctctctctctcacacacacacacacacacacacgaacacacgcgcgcgttgggcactgtgacttggtgccttcttcggctccaggctgacttacttgaggaagtacctctggccagtggccgtgaaggtcatctcccagcccgggggcagtggcagctcgtcggtcacgtcgtaggactgctggcggaggtgcgcgtgctgctgcgcggggctacccgcagcacccgcgccggtgcccagctgcagggacgcgggcgacgagtgcgagcggacatgctgggcacccccagccagtcgaggccccgggtggccgcccgacgagtcggtgctggactggcgcgagtgcgagcccgaatcaggctccttaaagaaagactccggcaggatcttcttccgccacgagctaggcttcggattcatgacagagttgaagagggcttcgaggtctgtgtctaggtcctgcgtgacgtggatcacttgctgcccaggcggcgggagcggagggggcgccgaggccggattcatcttctgcaaaaagaaggtcagatcagccttttatttaaagtcggaggaagtgggtaagagggttacagggtgagagggcgagatggtgggagaaagaatagagggaaaaggaaacgaggagacagataattgcccgcctggagatcccagacactcagcggtaagaccagcaggatgggggaggggtccctcctggcctcgagaattatgcaactttcttgaagcaaagaagttgcctggaggaggagaagatagggcgaggggtggagggaataactgcactcggggcttgctgaaccgcaggatggcaaaggaaaggtcgcacgattccaggacaggcagccccccgaaagaagttcagcccgagccaactccaccacgtctcgactccggaagcccgaggagcctggagccctggagtggtgccggatgagcgcgcgagctccagcgggcactacctgggcgggcagcgaagctgagcctgagcgcgcggcggccgccgtcccgcccgaacttgccgtcgggcctgggtcgctcgggtgagtcccgagattgcggagctggagccgaggcttggctgacaaatcccgacccgactctgtgcctggcagtctaagggcttcggctctcacatcccccgagctggcctaaggcgctagtgctgggcgaaaaggaggcgcaggagaagcagacagcgcggccgcagcagctcccggactgtcccataaacaaagtttggagcaaactcccacccccaggaaagaggcgggcccgaaagttgagctgttgaattatgtatgacctcctagtccctagccggccagcccccgctcgcccctcctcttcctcctcctcctcctcccacctcggctccagaaaaccctgggcgtgatgggtactttactgggtaagaggagacgggtgccccccacccactcctcccggccgcgcggacctctcccgctcagacctgcatctgcattcctttgagtttaccacggacttggggcgggatcaaagggaaagtggcctgagcctgtttcatcaaggggttgtggaccgaaaccaaggccgggggtggcggagggcacgcggatgagggg

SEQ ID NO: 30788 - DNA, 2300 bp, Homo sapien
ccttttgccagtcctatgggcagaggacttgctgcacagaatcccagctactcgggaggctgaggcaggataattgcttgaaccagggaggcagaggttgcagtgagccgcgatcatgccactgcactccatcctgggcaatagagtgagactccatctcaaaaaaaaaaaaaaaaggatgatacgtgtatgcctgccttagtctaagatggccctaatttcttccagtctatgaggagtctggaattggagccacctccaagtacagataacaggggaagtggctcactttggtggttctgttttggatatggatgcagccattcagggagtggccccaaaattctaccttttccgaggcaaaactatgagtggccttgtcttttccttaaacttttctcctccaaggcagctccagattttaacttcgactttattttaccctgtaaaaatattaaggcaggctgggcgcggtggctcatgcctgtaatcccagcactttgggagcctgaggcgggcggatcacctgaagtcaggatttgagaccagcctggccaacatggtgaaaccccatttttgcttttaaaaaatacaaaaattagctgggcgtggtggcaggcgtcttaatcctagctacttgggaggcagaggcaggagaatcgtttgaacccgggaggcggaggttgcagtgagctgagatggagctattgcactcaagcctgggggacaagagggagacgtcactcaaaaaaaaaaaaaaaaaaattaaggcacaatacgtgaacttgaagaacatacagttctcttttatttaacaaacacttacgtaaccagcccggtgctgtgcgaagtgctttacattgtctcgtttgatttacttaataaactcctatttgaatcaaatggggtggagtaggggcttcctggaatttggcttacctcgccatctccccccaccctttcccctcagtggagaggcaaccagagagaaaagaaattgagctgctctgaagggcaaggcctcctcctacttcccgcagctgtttcgccagacttgaccttcttcccttagctagaggcagggggtctccatccctcgcccagatctagttggtgggaaggtgggtggcttttttcgggtcactggcgcaccctctctacttccagccacctgctcgggttccatcccggctccaggctccccggagggcggcagggacattccaatcctcccacaaccctcacggatgttgcgggggaggggggtgcaattgctcttctcttccaacacccagctttttcttctcaatctctagtggcctgagtcacccccgtagaggaaattaaggattgatgaatggtttgaaagttgtttgtttacaacccacccgttggcgaagccgcatctccagtgacagaggcactttctgggcaccgtctgtgctctagcagacaattgagagccaggcagccaagatgcctcctcgccagaccaaatatggtcacaagagctaagcagcctctcgtggaaaagctggccttgttggtgtctccccgcgccggggcgcacccgggccggccttcgggcagaatcgcgggtcagtgcggcgctccgggtgctgcaggcctcggcgcctggctgcaggggagggcgcggtgtccaggaccggcccttcctaggcctgagcccctcatccgcgtgccctccgccacccccggccttggtttcggtccacaaccccttgatgaaacaggctcaggccactttccctttgatcccgccccaagtccgtggtaaactcaaaggaatgcagatgcaggtctgagcgggagaggtccgcgcggccgggaggagtgggtggggggcacccgtctcctcttacccagtaaagtacccatcacgcccagggttttctggagccgaggtgggaggaggaggaggaggaagaggaggggcgagcgggggctggccggctagggactaggaggtcatacataattcaacagctcaactttcgggcccgcctctttcctgggggtgggagtttgctccaaactttgtttatgggacagtccgggagctgctgcggccgcgctgtctgcttctcctgcgcctccttttcgcccagcactagcgccttaggccagctcgggggatgtgagagccgaagcccttagactgccaggcacagagtcgggtcgggatttgtcagccaagcctcggctccagctccgcaatctcgggactcacccgagcgacccaggcccgacggcaagttcgggcgggacggcggccgccg

SEQ ID NO: 30789 - DNA, 2300 bp, Homo sapien
tggattttctcctatttctaagggtctgacatttcacaatggtctattttcatccattgtctaggtattttgggggcgctatcaatctggcagctcacatcctttggtttttgaaatcttgaattattgatttattatgagctcctccccatcaatttttctgttctctttctttctggaactcctgtttattgaaatattgtaccttgtagactgatcctctgattgttttttctttcctattgtccttttctttgtcttttagctttattttcctagtttctcaactttatcatataaactgtctaagttttaaaattccattattatatttcaaatttctaagagttattttttgttctttttatttcatcctgttcttataacatctttttacttctctgaagatattattagcttttttaaaagcttttatttccctgcatattctcaagactttgtttcctctctaatttttgttttgttttgtttttcgttgtttgttgttgttgtttttttttttttaacttttgtgtgttctgtctctctcttctttggtaggggcttttttcagatgtctgataattctggcccttcacttgtattttagagctaatgggcacctctgtgccatggatgaagcttgttaccttttgtctttagaatgatcagtctgggccatttctatgggagggggatgtccttgtctttaggtcttttttcttggtctgagcaagttttctagaaggtaaatgtctcctctccttcctagaatggttccttatgctggctgcctctgttctggaggttgaatttggactgagaatagtgcttcattatataagccttttttcaaatctgtctgctttcagcataatattcccagtctttatcgtgcctagtgtcctagctctggcttagagaccctctgttatatcttctgcagcagtcactaaactgcatttgggagggaggcttttggggtagcctaccctgggaaatggcttgcttcttggtttcccctgtgctgatttagaatttagccttcttagtttgttacgtgatatgcaaagtatcctattttttagctcttaaaattttgttgctgtcattattttctcccccttttaatttgttaaaatccttttatttttaatttaatagaggtttgggggtaaacacatttgttcaatcagccatctttaatcagcatttttaaaaagatattcttggccaggcatggtggctcatgcctgtgatctcagcattttgggaggctgaggtgggaggattgcttgagctcagaagttcaaggctgcaatgagccatgatcatgccactgcactccagccttggtgacagaaggaaagcccatctcagaggtttatcagtccattcttgtgttgctataaaggaatactcaagcttggtgatttataaggtaaagaggtttattttggctcatggttccacaggctggatgagaagcatgcgccagcatctgcttctgatggggactcaggaagcttccaatcatggcagaaggtgaaggggagctgatgtgtcacatggcaaagagggagcaaaagagacagtgaggaattgctaggcttgttttaaacaaccagatctcttgtgaactcatagagtgagaactcactcattatgtcgaggacagcaccaaccctcttatgaaggatccacccccatgacgcaaacacctcccaagaggcccacctccaacactggaggtcacatttcaacatgagacttggagggtataaacatccaaaccaaaatgagggtggggaggagatattcttaatgtaatactttttttctgaaaaattagattttctgtgccagaatcccaaatctaagaaatctaagataaagtaatgtgcctgagaatagctttgtaaatgtgttcatttaatttctaactgggttttaatattttggccgtcataactgttgtgtggtaaatatttctgtttgttggcaaaacccttttgggttgttcatcaccttttatgtcattatagatgtaaacaacatgtgtgctccagatggactctgaaatccaggctcccactttatgacacactcctctacaacaccagagactcccaaacacaaggccttatattgactcatttcagctcacatcctggcgactctcaagagagaaacctcagagtgactaaaatctccataatgagaagacatgtacattcagtatctattttggtaggagactttatattcagccttctttctgtagagtaagacgtggagat

SEQ ID NO: 30790 - DNA, 2300 bp, Homo sapien
ctgacatggtttgaaaaatcatgaagggtatatataaaggatgcatgtgtaggagccattaaaattcataacagtatgtgccccttcagcgttttaatcttatgaagtggttaagagataagtcttcggagttggacaaaaggatttgaatttaggttctgtggattattatgggtccttgataaattctcaaagcctttttttttgttcatctctaaaataggaatataggattacctaccacattgactcgtaaggactatatgagaccatgtatatagaatgtttaacatagtaccaggctttacaaagaactcaataaatgtttaccattattgaaatagttttgtagactgaggatctcattattttacagccttgaattatgtcctgtatactctgttaaagaaactgggaaaaaaatgccaactggttgtttctgggtggcggaattatggctgtttcttttcttttttaatttctatagtaagtttgaataactttcataacatttaggaaaaaatattaaaggaaagaaaaaagatcagggaatttaaatatatttttagtagatatttttatccaaacttaattcttagaatgataaacacatagtttaccagaaaactcagctgttcaaaactactcagtccccaaaggactcaggtaaacaggctgagggttttatatatagagcgctctagagtttcctttttctgtcatttttttctccatgttagtgaaaaaaacatgggaatcttaagacattaagccgtttctccttttctaggtaatattacttctaaatggagaattgtttgtgttgtttttcatctcaaatggaaacagtatttctttgaagtttttcacatcccttatgatcaggaagttctgtcagctgctatattaaagtcctcctgctataacttactcagtcttctctgtacttatatgaatttgattaagtatcttcttttccagagtttccataatcatagattactctcacatctttcttccaccaacagtagaaaatattttggtggaaatgttatgatactacattgcctctaacttaaatatgttcacttttaaaaccatcatgactgttatattcaaactcaaatacttttcttagaacaaatgaacctaactccaccattaacgtggttagttcagtaagctttatacattttgaaagtaatgtttgaattataaaagcagaataagcccattatttttcagctttcaaaaaattatataaagatgagaaaaaatactatatggcactaaaatgtgtatttaatgatttgatcacagagtagtaatggctctttgttctagatttttacagctcctctctacccaggaactccatctataacttaagtatgcacaacagccatgagtccaaaagttttgacataccataatgggcgaatatagaaaaagtaatttcatatccttagtgggttaaaaggcagtatcaataatacaaatatctatgttaatgtgctctaaaactgggcttttacttgagttgttgccattctaaacccaagcaacttttgaataagatgaactttttataattataatgtaaattatgtttgttatcattagaaatattaccaattatatgaccaccagagtgagagactgtgtttttttattgtgcttgagcctaagttgacattttttagttgcaaagactacacttttcattttcttctcttgcagttatcatatcctctgttgcagaagagtctgcccagcagccaaaaagggaaataacacaaaaaagatttgtgccttatctcaccaaccatatgaggccttttaacttttaaaattttttttactctgctctgttacactaagctataaactacccacttatgcatggcattatattgataacaaagcacattttgaaatcttttctggcttttttacatggtacagattcagttttgttaatagtaggtacttagagtgacccatattgtgtgttgaacaaaggataaagttctagtctcagaatttagaatgctcttaggctgttccatcctctaaaatagtttaatccataagctcattaggctgcagaaaggaatctcctgagggagttattctgaagaagggaagttcctctggtctggtgtctactagaattgcttttccttgaaactctgccttcttctggaaggcagaaatctaacatgattcaatggctacagctgtggaagtgtgcagaggaaaggtgaaatcattatagaatactgaggaatactttgaca

SEQ ID NO: 30791 - DNA, 2300 bp, Homo sapien
gctggagtgcagtgactcaaatcttgctcactgcaacctctgcctcgcaggttcaagcaattttcatgccttgggctaccaagtagctgggaccacaggtacatgccaccaagctttgctaatttttgtatttttagtagagatggggttttaccatgttggtcaggctagacttgaatttctggcctcaagtgatcctcccgccttggccttccaaagtgctgggtttacaggcatcagccaccatacctggcctaacttggttccttgaccaccttttttagacagcctattgtgctactccctagtctcaccttcacctcgcctgtcctcacttcattccctgagattacagacaagaaaggccatttcatattggcataatattgtgtctatttgcaaattcatttcagcattcctactccctatatatgtacagttcttgaatacctcttttgaatcagttgaaactggtttttactgtaatctctcattaattacagaatgctgtaattctctcattaattaactagttcaatacattttttgacatgtgttcattgtacacttgtagaagaatcatgattttaccttttctgaaaattattctttaataatggatgttttctcaataatgtgtgaataaaggcaacttcaggaaatgatgcaatttttgctaatctgcaattcacagtctaagtaaaagttgtgttctctctgcaaatgctacttcaagaactaactaataagttcaaggacctgtctttctgtgtcccagtggaagaaacaatttcagtcagatgtgaaggacaaagtagacacagagaagtgaattgaaaaactcttccaatttttagtctgcctgggagactcagaatatagagttgtctcaagccttagatagaaaagacagatatgaagagtcttcttcccttcccctctcttcctccacaccctccattttcaaggggttaagatttgaagaatcatattcctatcaattagcaactttatcatctctgatatttgaaccacagcaggtgagaagagagttggaaaaggaactaaattatcacaggcgctaaatactttttaaaaggcattgctctgggccaggtgtggtggttcatgcttgtaatcccagcactttgggaggccaagttggctggatgacttgaggtcaggagttcaagaccagcctggccaacatggtgaaaacccgtctctactaaaaatacaaacattagccaggcatggtggtgggcgcttgtaataccagctactcgggaggctgaggcaggagaatcgcttgaacccgggaggcagaggttgcagtgagccgggcgacagagcgagactccatgtaaaaaacaaaacaaaacaaaacaaacaaacaaaaacattgctctgaatcctgtaagcatcggtcattgtcatcattatctttatcctaatttataatcactcataaaacttgtcagaagctttcagctttcaggctgttatgtagaaggatgggctttgcagcaggtaagtgagggatccaaccctctccatctaactctgtcacaggctttgtcacataatctctggagctttgtgtcttatctgtaaaaacaaagccatgtttgttgaggatattaactgagatacatttaagataacatagaagctctggaaactattagctttataaaagtgtcagttgctggacttgtctatcagtttccttatctctaatggaaattataatggaacctacctcatagggttcttctgaactccaaatgtatttaataaatgtaagaacacttcctgacacggttagtgcttaacaaatgtgaactattgatattattaatgtatgctccacgagggggcgtgtcggatttgaaacaccttttcatctcccatagagcctagcaccttgcacccagcaggcgctcactgcatctttgcgggatgatttcaatgttctgacctcagcctgcgctgcagggaacgtccgagtgtaacgcgttagttcgtaggccggaacccaaagctccggacgctgcgacgccggagcctctaggcgccgggacacgggcgccggaagtggcgaaggcggggtcggcgctgccgggtgaaatcgtaggacagtgaagatgctgctggaattgtccgaggagcataaggaacacctggccttcctgcctcaagtggacagcgcgggtcagcgggcgtgggggcggtgttctgtgggctggggaggaggtcaaaggcagcgcctggcactcaacagccttctgactttcatt

SEQ ID NO: 30792 - DNA, 2300 bp, Homo sapien
ctcagtggaggaggcaaacaccatcaagcaaacagaaaaatatctcattttaagcagaggttaagagctacgaagtaaaagaaggcaggataatggaataaagaatgatgcagtaaactgatgggaggctatttagatagctggtcagaaaagaagacaacattgagcagagacctgaataaagaagggaaggctgctgggagcttctcaaagtagatttaggtgaaagattacctaggcctgaaatagggcaggactggttgagatggaggcaaggaaacagagttcttcaatattgatcaggtaaacctgtcaggcctaagcaaccgtttagatgtaggacatgaaaaaatgagaaggatgccgggcgcaatggctcacacctgtaattccagcactgtgggaggccaaggcggatggatcgtttgaagttaggagttcgagattagcctgaccaacatggtgaaaccccttctctactaaacatacaaaaaaatttagctgagcatggtggcctgtaatccagctacttgagagggtgaggcaggagaatcacttgagcctgggaggcagaggttgcagtgagccaagattgtgccactgcaccccagcctgggtgacagagaaagactccgtctaaaaaaaaaaaaaaaaaaaggaaggatggaggaaaactctctaatatatggcttaggtagcaaaatagatgtaccactcactgagaaaaaaaaatgcaggagaaaaagcaggttgggtgaaagataatgagtggtcttttagaatgatggggttgtagtgcaatcccttctttggtaatatcgccagcagggggagtctggagctggagcagaggctgggctggagattgggacttgggaatgagtgacacctgggtggtcaatgaagctatcatcgccactaagattgacaattaatcagctatcaagtatttagtgagcacctaccaagtgtcaggctatacggcaagtcgtgaaggaattttcttcttaatgggagcatgaaaaaaaaatcttcaagcaaataaaatgatttcaaatactgatgacaggggcaataaacaagttaaaataaagtcatgggatacaaagtaatgaaggtgaggaggtagtgatggcagagattgctttagctatggttgaagtgaaaactgaataaaaaggacacagtcctgtgaaaatctgatgaagatcctttcaatcaaaaaattgtaagtcattaggtcctgagatgggagtagacttggtgtgaggacaggtgaaaggtcaaggtggccataataaatgaatgaagcagagtgaagagaggtaagtgagctaggttggttcacatagggagaaggctgggtttaatccccagggaacttgcgtaaattgagaagaacggaaggctgaggaaagatccctgggaaacaccagcctgaaggataaaaggaatgtggtatcacagaaagggtagactttggagaagcaagtgataagttctccagcagcagtgaattactttaatgtttgtaacggagaacagctcctgtttcataaaggatagaacaagcaaattagctggtgagcatctttccactccctcacagcccactcataagctaaaggccccagaagactgtttgtcctgccacaggttccttagtttcctcttccaatataatggcttcagtttacatggtaatatatacagcagcattgagtcaatctccacaagactgttttaagatagctgcaaaaaaatacttcagtgctatacgccatcattgagcagatgagaaaatggtaatacacagatgccaaacagcttttccaagccaataatggcctatgctaaaaataccatccctgtctccttgttccaaggttatttttcattttgcatctagctaagcctctgtttggggaaagctaccattagaagttttatggattgtcaaaccacactgctggactggaaccataaaccacctctcttgatccacaggcacaacacttcgcttggatgtctgggatggatggaaggaatttctgatgggttgtctccttggacaaaaacttaaagtccaacgctacttatcaaaagaaggaccagtactcaagtatgagaaattaattttaaattaacttagcaagtgctgtgatttttactaaacttccatcataccttgagcctgcaattcactcactctacagctggggtgctgctctatgccagttccacttagtatgtctcaaccaaatattattattgacatatttgttggaacaaaacagcag

SEQ ID NO: 30793 - DNA, 2300 bp, Homo sapien
gaaagccacagaatgatttgcctacacattcatctccctggtgcaagtgggtattgttctgtaccctgtggcaggattataaatactgccagagaacaagtacacaaagttgttatggaaaccagaatgtttcagctcaagagttatttacagagaactttcaggattatcacattcaataaaatcaactcttgttttgcttcaccctgtgctagtgcatcccaatcaaatatctatttttaagggttcttcaatcagctgtacttatgtaaataagaattcaggagtcagttgatggggaccacatcacaaaagtgtaatttatgagtagcatttttgtatcacatgcttgaagcttgtccatacttgcctcaaccattgtcaagtttgctggtttccgtaatataggaataaggtggctattgactactgccttccgcagataaatatttcctccaaagtagctggtgtctgtgttgcctgatactgtggcactgtgggactaggctcttcacattctacaacttacctttgaggctagacagtgacagctgcctctggctatcatttttgtccttaattgtgaaccggaatttttctagccatccaggagaatctttgaaaaagttggatattttttgtttgaaaaggtaattgtacaatgaggattttcatcgcctttgaaggatcttttgaaccgtttgatgtttcagcagatgaaactgtggaggttgtcaagctgatgataaaggtatgtacttcgttcccaaaccaccaaaatgtatattaattttaacaatgcagtgcatttaaaaatgtacaaagggtagagatgctattgggtacattttcagcaaacagggaacgaaaactatttgaaaatactattatttgcttacacaatagatttataagaagatagtaactctggtagtgttggacaagaaagcaaaaagagccagtcaattatcaagaaaaaaaaaaagtctgacttctttttagggaatgtgtgggttgtgcataggccagataatattattgcaattcttcataaaaggaccaaagcaagacaccaacttcaggctatatacgtgggacatgccagtcatcagataaatgtcttatttggtgagcaaacaactacaaagaacagaagattttggaagcagagaggactttagagaacttgtgagctatggcttcattttgcattcagaaaaaactgaagctctgagaggttgactatcttacctaggatcacagagccagaataagaaataacttgggtatagtatcttccttataaatttcatataaatgttcactctaaaataaaaaattaagcaaaatatttagtttctgatcatcaaatatttaacttggagatggtcattcctatttgctaagcggcatttactgaaccatagttacatgatattcagtagattattatgatgattgaaatctaaatcttgtaacacaagggatcttaacctctatgttttattaacccctttggaagtctggtgatgtctatagactgcttctcagaatgtctttaaatgcataaaataaaacagatatgatagaaatgaaatttgttatattgaaatacattttccaatattaaaaagcaaatgtatgatatagtgacatgtggacttcctaattaacacattaactaacaagttctagcagctcatctaataactattattttcaaaatacagatcagtagaaataatattttgaaatatttgcaacaactataatgtgatatgaaaacatctgtgacttctattggtgtcagtcacaggtacagcgactactcctactttaatttgctgcctacatgtatagttgaaagaaaatctcaatttcatttagagttaataaaataaagatgtagtttcttcccatctaaattctacccataaatgttttggaagttctctaagttaagaacccctatttaatacttcttccctttgtcccaaacaattataatgcccagaggaaaaaaatgtaaagggaaagagagtacatttctggtctagtaacgtaaggatgtactgttttcataatatgctattgatttttaaggattatttccacattcctctctctgaagacaaacaaggcaggcggtatctggagttaatgtatgctggagctgctctaaaggacagttggagtcttgctgatgttggaatatctttctgttcaactctcaaatgctttgttaaggtatgatggtcaggataatattcgtctaagatatctatctcattttgaataaa

SEQ ID NO: 30794 - DNA, 2300 bp, Homo sapien
tgtttgtactttttaggaaggtttaaaaaaaaaacctgttagatacaacaccctaaaagcacattttgatttttaaaaagataattagtggtatattagtatcacgtgccttattaacccttcatgttcttgaaaattgtaattatgatatctgtcaatcttactgtctaatctgctttagaaagattaatacatttttccaatatatttttttccaatttacctttttcagcacaggttgggagagtaaatgtttttgcagagtgtagcctaaatgcagtacaaatgacacattaccttgttcatagttgagagaactatacctattgttatctgaagagcaggttgaaaccagaagtaaaatattctgtactcaaggtgcctttaaggaataagcaaagctctttgtctgagcgtggtgactcatgcctgtaatcctagcactttgggagaccgaggcaagaagatcctttgaggccaggagtttgagacctgcctgggcaacatagccagactgtaaggctaaaaaaaataaaaaaattagccaggcctggtggcacatgcctgtaatcctagctactccagaggttgaggtgggaggattacttgagcccaggagttctggactgcagtgagacatgatctcaccactgcactccagcctgggcaacagagtgagaccttgtctctaaaataaataaaaataaaacaacaaaacccaaagctcctctctgtggacttaatttttttttttttttttggagatggaatcttgctctgttgcctatgcccgagtgcagtggtgggatctcagctcactgtaacctctgcctcccatgttcaagcgattctcctgcctcagcttcccaagtagctgggattacaggtgtgcaccacaatgcccggctaattttgtatttttagtagagacgaggtttcaccatgttggccagtgtggtcttgaactcctgacctcaagtgatccgcctgacttggcctcccaaagtgctgggattacaggcatgagccaccgcacccggcctaaaaaaatttattttgatgttatgcaagaaatctgatttaatataccaatttgggataatttaatgaaaaaaatgcttatagagatattataaatgtgtttatactaattagtcttcttagtaatattcccaatgctgacttttatttatgactttcttaaaggcagaattgtgatttaagtattgaatgtctttgcaaccaatgaaaagttaagactacatagaatactcataggatacacagaagaggaaagtacctttgatagcttttatttaattttttaaaatttgatcttaaatttcttgtatttgaattttatttgagtaggtaatatttgcaaggttcaaaattcaaaaggcacaaaaggatacacaataaggaaagagtcttttccccattgctgtgtcccacctactcagggctctccaagcaatcaaagtgacaagttacatccaatggtattctactaatactctgtgtgatagcctcctcgccaccatttttaaaagatgatgttgaaggagttgaagcctgtaaaggccttattaagggtgccttattatttgaagcagaagtagtgcctgattctatgtctcctgacatttctttcaggactctgtaatatttgcctaagtcacactgcttttgtaaggtggcgagttggcaatgattaatcaatgtggatggtacaatccggtaatttaagtttcgactggtttaagattgagacaaccagaaaggaaggcttatcagaagggcggcaggggaggagatttttggttcatcaaaaggaggcaagggttttaaaaggctgacctagggcctgaatcacatggtttgacttttgctaagccccggggatggcgcgtgtcaggcccagagtgctgatgccagcgtggatccgagccaggcctcaggggactggcgttcagacctcgggccgctcgcatctctaacaatttgagccctactttaaggtgtggccacggtccccacccactctgatctcagactgggcacggtacggaaggcgggcggatgaggcctcgccctcgcctctttagtaggtcgggtgagtgtagtgtgcagggaagagacgcgtcagcgccagggccaggcccgcccgggggcagcccggcagccgaatcttgggctactctgtcccaacagccggagcagatcagaccgaccggccctgcccgctcggtcccgcgccctccagaccctacggtctccgtttctaggggcacatggtt

SEQ ID NO: 30795 - DNA, 2300 bp, Homo sapien
agccagactgtaaggctaaaaaaaataaaaaaattagccaggcctggtggcacatgcctgtaatcctagctactccagaggttgaggtgggaggattacttgagcccaggagttctggactgcagtgagacatgatctcaccactgcactccagcctgggcaacagagtgagaccttgtctctaaaataaataaaaataaaacaacaaaacccaaagctcctctctgtggacttaatttttttttttttttttggagatggaatcttgctctgttgcctatgcccgagtgcagtggtgggatctcagctcactgtaacctctgcctcccatgttcaagcgattctcctgcctcagcttcccaagtagctgggattacaggtgtgcaccacaatgcccggctaattttgtatttttagtagagacgaggtttcaccatgttggccagtgtggtcttgaactcctgacctcaagtgatccgcctgacttggcctcccaaagtgctgggattacaggcatgagccaccgcacccggcctaaaaaaatttattttgatgttatgcaagaaatctgatttaatataccaatttgggataatttaatgaaaaaaatgcttatagagatattataaatgtgtttatactaattagtcttcttagtaatattcccaatgctgacttttatttatgactttcttaaaggcagaattgtgatttaagtattgaatgtctttgcaaccaatgaaaagttaagactacatagaatactcataggatacacagaagaggaaagtacctttgatagcttttatttaattttttaaaatttgatcttaaatttcttgtatttgaattttatttgagtaggtaatatttgcaaggttcaaaattcaaaaggcacaaaaggatacacaataaggaaagagtcttttccccattgctgtgtcccacctactcagggctctccaagcaatcaaagtgacaagttacatccaatggtattctactaatactctgtgtgatagcctcctcgccaccatttttaaaagatgatgttgaaggagttgaagcctgtaaaggccttattaagggtgccttattatttgaagcagaagtagtgcctgattctatgtctcctgacatttctttcaggactctgtaatatttgcctaagtcacactgcttttgtaaggtggcgagttggcaatgattaatcaatgtggatggtacaatccggtaatttaagtttcgactggtttaagattgagacaaccagaaaggaaggcttatcagaagggcggcaggggaggagatttttggttcatcaaaaggaggcaagggttttaaaaggctgacctagggcctgaatcacatggtttgacttttgctaagccccggggatggcgcgtgtcaggcccagagtgctgatgccagcgtggatccgagccaggcctcaggggactggcgttcagacctcgggccgctcgcatctctaacaatttgagccctactttaaggtgtggccacggtccccacccactctgatctcagactgggcacggtacggaaggcgggcggatgaggcctcgccctcgcctctttagtaggtcgggtgagtgtagtgtgcagggaagagacgcgtcagcgccagggccaggcccgcccgggggcagcccggcagccgaatcttgggctactctgtcccaacagccggagcagatcagaccgaccggccctgcccgctcggtcccgcgccctccagaccctacggtctccgtttctaggggcacatggttagcggcaggcgcccacagccaatccactttgccagcctgccccttcctctgccaagagcagcttcttcagccgcgctccagttccgcagacgcctgccccaccctgctcttcccttccagggaagacggatcacgcggccaagaacgagactcgcaaactgggcatttctccgagccgggctagagcaagtagcgagactccgcgtgagagtgggaaagagccttaacaggcaaccatgttgcccagtgggttttctgtgcctttgggtgcggaccaatgaggcgcgtggggcgggacttccgcttcgcctaggtgttgtcgtccctgctagtactccgggctgtgggggtcggtgcggatattcagtcatgaaatcagggtagggacttctcccgcagcgacgcggctggcaagactgtttgtgttgcgggggccggacttcaaggtaagaccctgtccggcttcgcggcagccgggcagctcgttatcgagcggcccagagaaca

SEQ ID NO: 30796 - DNA, 2300 bp, Homo sapien
gcccagtggacctgtgggacaaacctactgtatggtgctactgaatagctactgtgatttggcatctcctttggtagaattacaaaggagggctctcctttccagggctagggattgtagtcctgcttcccctcttagtctctatctacctcatggatatttctcccttcaggtacttgtgatgctttctgtgggttaaggaagggacaaatctcctcctagggaacccaagatagtgggcaatctggttccactttggtcttacttttccagtgtagaaacagtgagttggagggaaattttccttgcagttggtgctcggcaaaatggggggaggggcatagtagatgtggaagtctgattctctgtctgctgggagttttttttacttctctgtggccctgggaatgatctctccttatatttgagttctagcttatttctggccgtaatctcattgctgtacatttgtttttctttttctatggggggagtcaaaccagcttgcttctgcatcatcattttggagctggaagccaacctatatggcttgagtttaattgctgtaataatcatgttgaaaaatatttcctacactatatgatttagcattggagcaaaaacttagtgtttgcagaaaggcactcagagcaggatgcaaatttaacaagaataaagcaaatattcatcattggaaggatgaccacagttgtacttcgttgcaaaacaaaaaccgagtgctttatgggattaagaagaggagctattatatgagcaaatgaaagagtgatacattttatacccaagatatgtacaaacactttccatatcacaagctgagcaatataatttcagggaggagaaattgccaaatcctgtggaatagatgattggtgtgaccagttcaggaccatacagaactgttgttaaggcattgtctcatagctttaattgcctccttcctttataaatgaaatcagtgaatttgatcatctttttatgtgtttattcactttttacaaaagatagacatttgatttttctgttttagtctgttaccagattttttttttttttttttttttccgagacggagtttcgctctatcgcccaggctggagtgcagtggcagaatcttgactcactgcaacttccacctcctgggttcaagccattctcctgcctcagcctcccaagtagctgggactacaggtgtgtgccaccatgctcggctaatttttgtatttttagtagagatggggttttgccatgttggccaggctggtcttgaactcctgacttcaggtgatccatctgcctcggcctcccaaagtgctgggattgcaaatgtgagtcactgtgaccagcctgttactacattttcttatgtcaaaccatcctgcattcctgggaaagcaacttgctgtttactttttaaattcatggttatctcgtggacgtcttttcagtttagtgtatacaggtcttccttatttttttaaatggctgcattattttcctattgtataaatatactataattgtttaaatagttaccttgtggatatgcatgatttccagtttttgctattaaaaataatgtaccaatgactgtctttccacatacaccttacatactcaggctagcatttctgcagaataaatttctagaaatttatttattatgtgcatttcattgtctgctaacatgaaagaaagttaatttttaagacatatttgcttggtttgaaaatgtcaaatattgttcgaaaatataccagtggttgtctttggggtgattggcttatgcctgagtttgcttattattattatttttttaacttcaatacaaaagatagaacttattttagaaaactaaatgcttgtgaaagcaaatgctgctttagaagttccgtgattgtgagcaattttacatgcccaatgatacatctagcataatgcaaaacacatgacaaatcgaaaagatatttgtagaagtaagttgattgatttactgagtgaaacagagagataatttttaccaattctttttcagggttttttgattaactcaaaaccagagaatgcctgtgaacccatagtgcctccaccagtaaaagacaattcatctggcactttcatcgtgttaattagaagacttgattgtaattttgatataaaggtatgattatcttttttcattttttgtttcctatttgttcagttagctaatttaaatcatttacatcctcccttgtttcagaaaacatttaaaatttaaaatccagtaagattgaaaa

SEQ ID NO: 30797 - DNA, 2300 bp, Homo sapien
ctcccatctcagtaatcagttttctttctgggcaaacgcaaagtggattctgtctacagcactgcggtaggcaatagtaaaacagaaaaaatggagggagattgggaaagaaactgaggtagccaccagaaccggaaaggagaaaacgtgcattctaacattccatgaataagaaggaaggcgtcgcccccatcagaactgcagagtcatagcaggccccagccatttccaagcacactcccgcaatcttcctagtcagacagcgggaactcacacacaaagacaagaggactgcaggaaaaaagttgatgaccagatgccaattccctacaagaattgtagtccactgcgggtatacgagaccttaaagtactactatcaaggactgagttctaaagttagactttaaaccatgttaagtggtaaaagaataattagcacccttaataggggacctgaattttggtgcttaatggaaagggagcgtggtgctaagaaataaagagaatggtctcgtatttagtacaattatcataattttagaaacagccttgggcagaaacaggcaaaacaataagctggaggttttgtggcaaatattctccaaacatattgcaaccaactcaaaaccatcaagtctcaagaaaatcaggcaatgtgaagcataaaactgcattagttcctttactgccaccactaaagagggagggacttagagaagtgaagtgtgctcctggtcttcgcagataattgaaagcccccgaaaagcaccccttttttgagctatgttgcataactggggataaccgtatatcgatgaatctccatatgagaagagaaatcaatggcagttcgccatcttggagaatttaaaaaaaaaaaaaaaacaacctatagagctagagctgaagtcgagattcacgaatccacctacgcggtcggcgtacatctctcgcaagccccagaggcctggacatcggtaaacctacgcaaagtcgcttcgagaatcccgggggccgggccggggccgccgcctcccacagccggaggcgcgggaggcgcgctgtccgcggagcaagagccggccagagagcctagggacctccacccggggcccgcgcgccccagcccggatccccgacccccgcttccaccccagaacgtgcatagcaaacctcagggcttcaagagaacctaggggaaccgcactaggaggaaaaaaggaacccctccccttgccctggccggtgcgtgccccctcccccaacccgggcacctggaccgacgctgggaacgccgggggcgcccggccagggccagcaaggagtccggccgccgcccccagcctgtcagcgcagccccgggtgagggggcgtccccgggcctcggcctccccgcccgcccggcagccgcatcctcggcgcccgctgcctagcacacctgcgggctcggccctcagtgttccagccccgcgctgcggtgcccccgcggccggccaccccgctccggtgcagggaccagggtaccggccgccactggtcctcaccgtaatgctctgaaagacgcccccggccgtggctgcccagacgtatttggcgtcgcagtagccgacaatggcggcctcctggcagcagccatcgcacatcaggttatccacgtagctctgccaaccggccatcttcgagcccttcgcactgcagcgcggacggcgaggagcagcaggcgcagcggcggcggcggcggtagcgggcggcggcggcgcggggggaggcggggcgggggcggggaggaggcggctctgcgcaggcaccgaccgcccccctccccgaggagctgcggcgggaggacgcgggttcagcgatgagggacgaacctcagagcgcgctcggccgcccggccgcccgcagccgcggggctgacaaaccagcggcgggaggctgcgaagcggctgtgcctgtggcggctgctccttaccgcagcgccctccgttttccgcggacacggctgggcgtgcgcgcgcgcgtgcgtgcgatccttccgcggcgcccgggcacggagggtcccgggaagggcggggggagactgaggcgggggcgcggagggataccgccccgggacaatcacggccgccacgtgcgggaggcgccggccgggagcggtggcgggccgagcttcggacctcgggccggcggagagggtggaccccgcgtcgctctcggcaccccaggaacagcggcggcacggacgccttggagccccgcggccgggccgcgatgtgcttttctcctgtgttcgctgcc

SEQ ID NO: 30798 - DNA, 2300 bp, Homo sapien
agagtaaattaataaaaattcaacatacttcaagttatcactgtattttttctataattaccttttcgtttactgtttcaatttattgaattatacatacaatgaagagcacaataaatgtacatacagcttgatgaattctcacatagtgagcctgtgttacaagtaatctattattaacttttaagatgatacagtgctatgatcgaaggactaaaatgatcaacatcaccataaaaggcagagtcataaacaagaacaattaagtgtaattaaatcaggtgggaggcacacttacaaaaatgaaacaatttttggttcacattttacaccacacaggtattctgtatctttagaacatgagaaaatacatattctcagtctgataggtctctgacttgggggtttcttttactgtactttttttctctctagtagctgaacattttaaagcaatcagcagaaaaaatataaaacttcagaaccaattagacttttaaaagcaacgttcttgccctttccagagatacattccttaatcctcctacaaatcatgacctcacacgataactttaagggtgaacatcaacttatctacattttggtgctttctttcccttaagtggcagatggtttctattaacctaaaattgaagtcattgttgggggacccctaattccatgtctagtcctagtgcccagaggctaccaaagacgatacgaatagcttctcaggcactctacccaccgtttaccttgttaatacaaatctttcccagacctgggtcccgaaattattttaccctgcagagcagaaatgttacggtgttcattcagtgaactcttccctagtttttaatctttgtattttctgcgtatacttcaagccaccagtaactttcccagttaccaagaaacagtgtaacacaggtcgctatttgttttgttcggaatttacgagcaatttaaccacacgtgattagcaacattaagggggctcctccaggcaaagaatccacagaatgagaggcccttggtacccaaatgaagcaacaatgaaagatcggcgaagctcagcaaggttcctgagcgccacggacgcctgctctgatttcaggttgccggcgcgcgcccgcgggtctgcctttatggacgaggcgcaagagggatccaggaaagacggtgcccttagagactcggagattagcgtgggcaaccctgccaccagctgcccctgccaccagccgcccccacaacaaaaaggaggaaacgctccgcatcccgtcaccaggacaactctgtaacccgacaccgaggctcaagattccgcatcccgggcagcgaacacaggagaaaagcacatcgcggcccggccgcggggctccaaggcgtccgtgccgccgctgttcctggggtgccgagagcgacgcggggtccaccctctccgccggcccgaggtccgaagctcggcccgccaccgctcccggccggcgcctcccgcacgtggcggccgtgattgtcccggggcggtatccctccgcgcccccgcctcagtctccccccgcccttcccgggaccctccgtgcccgggcgccgcggaaggatcgcacgcacgcgcgcgcgcacgcccagccgtgtccgcggaaaacggagggcgctgcggtaaggagcagccgccacaggcacagccgcttcgcagcctcccgccgctggtttgtcagccccgcggctgcgggcggccgggcggccgagcgcgctctgaggttcgtccctcatcgctgaacccgcgtcctcccgccgcagctcctcggggaggggggcggtcggtgcctgcgcagagccgcctcctccccgcccccgccccgcctccccccgcgccgccgccgcccgctaccgccgccgccgccgctgcgcctgctgctcctcgccgtccgcgctgcagtgcgaagggctcgaagatggccggttggcagagctacgtggataacctgatgtgcgatggctgctgccaggaggccgccattgtcggctactgcgacgccaaatacgtctgggcagccacggccgggggcgtctttcagagcattacggtgaggaccagtggcggccggtaccctggtccctgcaccggagcggggtggccggccgcgggggcaccgcagcgcggggctggaacactgagggccgagcccgcaggtgtgctaggcagcgggcgccgaggatgcggctgccgggcgggcggggaggccgaggcccggggacgccccctcacccggggctgcgctgacaggctgggggcg

SEQ ID NO: 30799 - DNA, 2300 bp, Homo sapien
accaagacagcacatggactctctttgaatatataacctaaaaattgaaactgtaaaatttaatctattatacagaatttttttcatagttgtttaaattttactgtttgcaattctagaaaaataacatcatgttggaaaagtaagcagtaatttaaaatgaattatattttgaaaaatatagaagaatgacaagaattctaaatttttgtgaatattttacccaagaaatgtgttttagaatcttttgagatttgaattagaaaatattgttggtcaaattctttcactgtttaaagccaacaataaaagaataggaaaagaatgtagttatttccaactctgtgctataacaataagatagtaacgtctagaaattatatcttaaaaccttcagagtaaattaataaaaattcaacatacttcaagttatcactgtattttttctataattaccttttcgtttactgtttcaatttattgaattatacatacaatgaagagcacaataaatgtacatacagcttgatgaattctcacatagtgagcctgtgttacaagtaatctattattaacttttaagatgatacagtgctatgatcgaaggactaaaatgatcaacatcaccataaaaggcagagtcataaacaagaacaattaagtgtaattaaatcaggtgggaggcacacttacaaaaatgaaacaatttttggttcacattttacaccacacaggtattctgtatctttagaacatgagaaaatacatattctcagtctgataggtctctgacttgggggtttcttttactgtactttttttctctctagtagctgaacattttaaagcaatcagcagaaaaaatataaaacttcagaaccaattagacttttaaaagcaacgttcttgccctttccagagatacattccttaatcctcctacaaatcatgacctcacacgataactttaagggtgaacatcaacttatctacattttggtgctttctttcccttaagtggcagatggtttctattaacctaaaattgaagtcattgttgggggacccctaattccatgtctagtcctagtgcccagaggctaccaaagacgatacgaatagcttctcaggcactctacccaccgtttaccttgttaatacaaatctttcccagacctgggtcccgaaattattttaccctgcagagcagaaatgttacggtgttcattcagtgaactcttccctagtttttaatctttgtattttctgcgtatacttcaagccaccagtaactttcccagttaccaagaaacagtgtaacacaggtcgctatttgttttgttcggaatttacgagcaatttaaccacacgtgattagcaacattaagggggctcctccaggcaaagaatccacagaatgagaggcccttggtacccaaatgaagcaacaatgaaagatcggcgaagctcagcaaggttcctgagcgccacggacgcctgctctgatttcaggttgccggcgcgcgcccgcgggtctgcctttatggacgaggcgcaagagggatccaggaaagacggtgcccttagagactcggagattagcgtgggcaaccctgccaccagctgcccctgccaccagccgcccccacaacaaaaaggaggaaacgctccgcatcccgtcaccaggacaactctgtaacccgacaccgaggctcaagattccgcatcccgggcagcgaacacaggagaaaagcacatcgcggcccggccgcggggctccaaggcgtccgtgccgccgctgttcctggggtgccgagagcgacgcggggtccaccctctccgccggcccgaggtccgaagctcggcccgccaccgctcccggccggcgcctcccgcacgtggcggccgtgattgtcccggggcggtatccctccgcgcccccgcctcagtctccccccgcccttcccgggaccctccgtgcccgggcgccgcggaaggatcgcacgcacgcgcgcgcgcacgcccagccgtgtccgcggaaaacggagggcgctgcggtaaggagcagccgccacaggcacagccgcttcgcagcctcccgccgctggtttgtcagccccgcggctgcgggcggccgggcggccgagcgcgctctgaggttcgtccctcatcgctgaacccgcgtcctcccgccgcagctcctcggggaggggggcggtcggtgcctgcgcagagccgcctcctccccgcccccgccccgcctccccccgcgccgccgccgcccgctaccgccgccgccg

SEQ ID NO: 30800 - DNA, 2300 bp, Homo sapien
taagattagttgtgaaggatgagtaggagttcttcaaacaaagaagggtggaaggaaattccaggcatgttcagagatgtggagattggagacagcaagaataaacacagtttctgccaaggggcacagtttctggaaagtaggggggagggccattttaaaggggaatggcatgtaatcataatcatcactaatgctcacatagtgcttgccacgcaccaggctatattctaagcactttacatatacaaatgcatttttttttttttttttttttttttgagacggagtctcactctttcgcccaagctggactgcagtggcgctatcccggctcactgcaagctccgcctcttgggttcatgccattctcctgcctcagcctcccgagtagctgggattacaggcgcccaccaccacgcccggctaatggtctcgatctcctgacctcgtgatccgcccgcctcggcctcccaaagtgctgggattacaggcgtgtacaaatgcatttaatcctcacagccaccctgaaaggtaggtgaaattatcacccccaattgcaacaaagaacagaggcacaaaaatgcaaagcaactcggtcagtatttcatggcttatactttcaacactgtgctattagactatctttcaaaagtgtgtgtgtgtgcatgtgtgtgaaagagagaacatgaaaaactccaaagacagaaacaaagagaccaaagtttggggaaacatataaattttggaaaaaattaaaccaatggaggggctttattctagagaagagggctgagaaggcagcatgaagaaaatgagcctcagtaatattaaggagcctgtacgttaactcaagtaagaattttctgccaattagaagtaagctaagtcagacacgcgtcacccaagggagctgccaactctacttgctgcaggttgtgctccttggaaatgttttgaattggtctgaatcctgccagctgacttgagcaggatgtgaagaagacacataagtttgttggaatgtgtaaactctttgagtgcacatgttcgataaatattaattgatggcaaaccaaatttagtgctataactaagattagtaacattaattgagaacacttctcattttatacatagttgttatgtttcatggccaacaggtaaaaattctataaggaaaattttgcattttctatcttctcttttttaaggactttggtatagataagctatcactggttattaagaagttccatgttcaatttgcaatccacttctggcaaggtaaaaagaactttgtgatattagtttaattactaatcttttccccatttcatcttgttttttcaacacttatttcctccccatattcactatttaaaaataaattattgcagtatatgtatcgttgaaaatgacaaatttttctgaaacaagatagggtataattaaatacacatgtaaaccagatgttacttggagactacttgcagattaggtaaaaattagtttatccccaacctcaggacctcaaggtatctccatgatttctgcactcctgtgggccatgtcagttcagccctatttattcatttttttagctcattctttcaacaagtacttactgacctcctactacatcccaggcattattataggcaataacaacaacacaatggtgcaaaacacaggcaagttcctgttgtggcagaatttaaattccagtgggtgagaggcaaacaaacgaaagggaggaattcaatgcaagaaaagagattttcagatagtgaaaagtttgatgaagaaagtgaaacagggtcctgtgagctcctgagatgtagtgaatttccccttgggggttagggaagtcttcccttgaaggtggctgctggctgaggcctggatggccagcttggcagcctgtaaatctggaggaggggttcctggcaaagggaaccaccagggccaaagctttgaggccaggctgagctgcgcacatttcaaagacaagggaggcctgagtggctgagattagttgcactcaggagagaaagggtggctatgggggatgagcagccggaaggggccagatcacacagggctttgtaaccagaagaaggaggtggacgtttcttctaagtgggagtcctaagggatctgattgctgatttttaagaggtcagtgtttctgttttgtggagagaagattgaacagaagcagaaatgaaagcagaacacccattaagagattcttgcgttgagagcgaggctgcttgaactacaaggtactggacatt

SEQ ID NO: 30801 - DNA, 2300 bp, Homo sapien
tcagaattcttatttctttgtagcagtttgatgtaataaattctgtacattttttaagggcaaatgtataaaagtagctagggcttttaaacttttggaaaacaatattttcaagagaactattaaacacaaatccttaaccatctaaatgacacttttaaaagttataaatcatatgcttttcctaagatgtcttttaacatctttagccccctccttaccagaaatttagtccacttctggatctcttctaaattatctttatctttcctttcatctcataatatatcattttaaggagaaatggtcttacagattactttaagatttttcctctaaatgtacgatttaagagtatcataacgagtaatcaagaagtttatatgataagataatgtaaagggatgagcaggcatataatactcatttttccaaaagcaccaccatcaacactacccattataaccaccttaaacatctggtaaatcaatccaaaattaaattaagcttttataaattcatattgggtttaaccatttgatctaacttattgatggaaaactgcctctaacaattactgaaattacagacttagaaatgaaacattccattagctatctctgccacaatagcataacgttacattttgttccattactttcgcccagccccttaagaaatagggattttatgtcgtcttatttcacattctgactccagtcacttgggtttggagggcatggtttccactaaagttaaaagacctagctctataaattacaactaaagacctaaaaaattctctgcaaatttaattctcaaaacatcttttgggataaaaagtatttctattcttcaaagattagagaaccgagttcaacgatttactgatttaagttatcattatgtgattgctaacgctgcagtagatatgaaatcacgatttccattaagacttagattttacctaaatgacgactgctttagtatgtcaaagtttaggagcccatccccatttttttaaactgcttaaaagaatggccttagcatgccaaagtttaagagcccatccccatttttttttaactgcttaaaagaatggccttaccattttctttggccaggaactaactacaagatgataaatttgccagtactttcttttcatagttgttctttgcattggaacaggaaagggtgctttatcactcgttacggttgttcatggcccaatccaaatcatataatacgctggctgctactaacagttttagaataaacaaaaagaagaactataatgcagtaggttctacatttataaagcccatgagctgatttcgtgccgaaagtaaaacagtctcaagagtttaaatgaatcctggaatcacagcaaattcaggaaatttaggaatatgttggtaacccttaagctttttaaaaactgactacaccctgggcaagtaaccaccccctgatgccgttgtgggagacagaatttctggcaggaagataattttctgactcaatctggcttgccgttcttgtttaatcatccccatttctctgaacattttactcctctgactacaatggtcaacatttattttcagaagttttaaagtgatttagttcttccagccgcacctctttttatcccatctaagtcttccccagcccccattcctatcgccctcgtttcactaagattttgctaaacattagacacaagcacatgacctccagtcttccactgtctcggaacaaaccgacataaaaacatctgattagttccattgtaagcttccctaggcttagaatttaaaatggtctttagctcgtcaatgcttaaagaacctacaacacaaaatttaaattttaaaaattttaaataaagaaaccgctcccttttttaacctttagccccgcccattgccccccaccccaggttccacgcgaaactgcaggaaaccggagggggcggagcggtgacgtcacgacgccggtgcgtcacggaacggcggcggctgcggcgctggcggtggctgcggcagcggcggcattttagtcggcagcggcggcggcagcggggctgctgctcctcccagcatccctggcgcggccatttcagccccatcttggcccagcggagggagctgcagccgccgcttcagcagtttgaatttcagtttcttcggggtttaggaattgggcgcaccgaggaggagccggagaagccaccaccgctacctcacacagccggggcgcctccggtcccgtgccagcggtctgccgccgccgcc

SEQ ID NO: 30802 - DNA, 2300 bp, Homo sapien
agccccttaagaaatagggattttatgtcgtcttatttcacattctgactccagtcacttgggtttggagggcatggtttccactaaagttaaaagacctagctctataaattacaactaaagacctaaaaaattctctgcaaatttaattctcaaaacatcttttgggataaaaagtatttctattcttcaaagattagagaaccgagttcaacgatttactgatttaagttatcattatgtgattgctaacgctgcagtagatatgaaatcacgatttccattaagacttagattttacctaaatgacgactgctttagtatgtcaaagtttaggagcccatccccatttttttaaactgcttaaaagaatggccttagcatgccaaagtttaagagcccatccccatttttttttaactgcttaaaagaatggccttaccattttctttggccaggaactaactacaagatgataaatttgccagtactttcttttcatagttgttctttgcattggaacaggaaagggtgctttatcactcgttacggttgttcatggcccaatccaaatcatataatacgctggctgctactaacagttttagaataaacaaaaagaagaactataatgcagtaggttctacatttataaagcccatgagctgatttcgtgccgaaagtaaaacagtctcaagagtttaaatgaatcctggaatcacagcaaattcaggaaatttaggaatatgttggtaacccttaagctttttaaaaactgactacaccctgggcaagtaaccaccccctgatgccgttgtgggagacagaatttctggcaggaagataattttctgactcaatctggcttgccgttcttgtttaatcatccccatttctctgaacattttactcctctgactacaatggtcaacatttattttcagaagttttaaagtgatttagttcttccagccgcacctctttttatcccatctaagtcttccccagcccccattcctatcgccctcgtttcactaagattttgctaaacattagacacaagcacatgacctccagtcttccactgtctcggaacaaaccgacataaaaacatctgattagttccattgtaagcttccctaggcttagaatttaaaatggtctttagctcgtcaatgcttaaagaacctacaacacaaaatttaaattttaaaaattttaaataaagaaaccgctcccttttttaacctttagccccgcccattgccccccaccccaggttccacgcgaaactgcaggaaaccggagggggcggagcggtgacgtcacgacgccggtgcgtcacggaacggcggcggctgcggcgctggcggtggctgcggcagcggcggcattttagtcggcagcggcggcggcagcggggctgctgctcctcccagcatccctggcgcggccatttcagccccatcttggcccagcggagggagctgcagccgccgcttcagcagtttgaatttcagtttcttcggggtttaggaattgggcgcaccgaggaggagccggagaagccaccaccgctacctcacacagccggggcgcctccggtcccgtgccagcggtctgccgccgccgcccctctctgagagaagccgcgaggggaggccgagaccgccgtcgccgcccgcccgcaggggtggttccccctgtaaggggaggaccgagccggctttcccctcccccagagcgggtttccgcctgaggcagtcgacatgtccctggggctgagctccggctagagccggggagggagggccgcctgcccgcgccacagccccaccgcccgcccgcggaccttcagccagctccggcccgcggctcccggctgaattaggcatctccgactccggactcgccgctccttccctcagtcagagagcccagcgctgacgccggcaccggcctgaggagcccgagcggggcagcaccgcccctcacgccgccgccaccgcctcctcctcctcctcttcgccctcccactcccacccccagccaaggcctgctgaccgcgccgagcgccgagctggactgaccacggctgcccggagacgagagaggaagcagccggcccgcccctgggttcgcgctctcgccgcctctgagggaattgaattgaggcgccgcggctgcgagagctaaaaaggaaggaggagccgccgcgggactgagacgggggcagagccgaagagaccgacacagagaaggaaacgaggaggaggatgtctcaccgggcggccagcgcc

SEQ ID NO: 30803 - DNA, 2300 bp, Homo sapien
tataataagaagtgaagacaggcctgtctgaataaataaaacaatgaaatatccctgagttatttttttatcttagcttcgctgaactttatgtctaagtatccaagagaacttgcagataagtaatcattttacaaagaacttaaagcaccaaagccaacaggtttttccagcatagaattattttggtttataagcatccttttaaggcctggcctgtaacacatgcatgtttcctcattctcacaaagctgaaattcaatcatcttcaggttatataaactgcttggctctcatccatttatcaggaaagcttccaattggtaagtgaagaagaaaggcaaagtgaaacgttaaacagaaatctcagtaattttagaatgtggaaaacaaacatctacttcaatattaacagcttgcatattaaaatgataaatgaagagaggaaagaccttttttttgtaatctatttgcaaaggcaagtgtctgttactcttaggggacagcaggctaccccgacactttttttttaaaccatgtatcaaacgtttcttttattaacctaaaaacatttgactcacacattaaaatgccaatcaggtaatttcctctatagtgaatcaattctttgcacaagctttattttataaaatatactcaattttgacattaagacattagattctggtatatgttaaatcaagttctaacatctatagtacatatttataattttctttgcaaagactgataatggagttacaaaacattctaaattctcatttcgttaggttttgtccggtcttaacatttattccaactggatcattaccaagacctgacctcctttttgatctcctgtgagtacaaattaagctgggagaagtttctggagcaccaccctctgtgcatatgtggaacaagtaatttggttcagacgaaacagaattatgtggagtcctcggcaggtgggttgagaactacgcaggtaggactcactactgaccggtcaccacgtcatcccaaatcctttcaacccaagactctacctgatgggagcccccaagccacttaccagaaccacagacaacaaaaatgaagagagccaataaccagggtcctacagacgccttctcttcgggggcatttctctgcaaaagcgaaaatccaccatttcagatgcagagaaaccactcggaccccaggctcccacgcctgcacgccggtcgccggccccctcacctcacaggtctccccttccgttcccgagcccccacagtctggcggttcgcagactcgggcccctacccctccacggcaccagcccacggtcggccggatccgggagaaaacgcgacgcggccccagggacccggactcagctccggctgcggaacgcagaggggcgcccgctctttccttaccgaggtcttggcgacgttgccgcgctgggtgatgttcttgctgtgcttctcgttggccatacggatcctttgcttggcgaccatcttcgcggcgccaccacctgccccggccacccctcggactcgctcactcgcctgcctcctctggagccgctgcgaggctcggctcgtggtgcccgcgccgccggagcgccgaggttctcaggccagacgctagctacggccgctgggcctgggcgccgcaagcgcgaggtctgagcacaagccgggcgccggccgccgactgactgaccgagcggggcaggtgcgcaggaggaagagaactggccgccgggtcgttctcgcgccgccgtcgccgccgctttggccgccgccgtgagcgcggagtgaaagaggaaggaaacgcaacgcaacaacgggaatgtgcagcccgccgcctcgatctactttgggttcggctgccaacgtcagcactagacggactccgccccgcggaagtgcgcgcccctcccgctggagaaggagggcgaaagcaggcgcaccctcccaagctctgtcaagcgtcgccctagatttgcgcgtgcgcgtttgggcgccttttccgcgtcactccgtaaccggaagtgaattggccccgaggctgatggctccggaaacaccaattcgctgtctccacgcatgaggagacgtgtaggggccgggttcggccctggtgaactctcacccgagcggtttctctttccgggacaacatggcgccgtccacgccgctcttgacaggtgagttctgaagaagcgagggactctctttcttcagactagtttcttatttttgtctttgcctttgagaactacccgaggagccggggagtctgat

SEQ ID NO: 30804 - DNA, 2300 bp, Homo sapien
gtttgcgctcttatgaggctctaatgcccccactgatctgacaggaggggaagctcaagtggtaatgcttgcccagtaccagtccggcccagggggttggggacccctgatttagagtatctattgtctaccaggcactgcactagtactgagaagacagatatgaataagaccctgtcgctgacattgaaggactcacagtctagcaggggagaaaggcaagtgaatgtctaattatcctacttagtaagtgaaataaaatttcaaatatatttcaggtacaaaaatagcccaggaagtgactgactctatctgggtagagtgacgaaaggcttcacagagcaatgatatctaaaatgaattttaatttcaacagatgaaaaagagtttgccaaatcaacaagaggcataggatagtactagactgaagaaacaggttgttcaaagggactcagaagcagttcagtattgatggagcaccaaataagatgggatggcaaggaaataaatgagtctcaagagcaattcaaagattataaatggttacataactatgctacataggatggaatctaccctgtaagcagagaggaactacctactgtaggcatttttaaaggaggggttatttatcagattttagaatgtaattttttcattagagttcaaataagcatttagtattaaaaattgtgaataacaagctacctttacaaacctaaaaaaaaatttattatgtaactttgccttttaaacagtctttgcctggtatattatctagaagattatactcggcgtttgataaatgatgactaaactgcagaagacagactgagcatcagtgggcatggcgcttaataacaaagattttaaaatgtaaaaatagaaatgtagactggcaaaaagtgcaaaaatgttttaaggttcctttcgcgggggggaagggagggaatagcctccctccttaaatgcagacaacctttctcttaatgactttttccttctatatagttatcagaacttaaccaaaaccttcttttccttcccgactctcttttccttacgtaatactcatatgcagactcttagccacaccctagtaaagcaacttccccagcattttccaatctaagtttattatctcctccaacactacagtctttagcttcaaaatttcaagagtcctctaatgttctatttctaatatgctcataaccatttcaaaatcaaatgttgctagaatatctctatcatgctcactgctacaccctctcccaaccacaccttcatcatttgaaacctgcattacagctccactctccctattcagtcctacaaacctcattaaggcaggaaggccagaatctggaattacttaagtccaggtgtatttaaagtgcgtgatcattctagaggactaactcatgtttgtctttgttcttattgtagacctaaatgacttcacaagggcccgtgtaacaccagtattgcagacccatgtgtcacaaattcaactagcacattgtttttctcccccttcttctatttctgtagaagatgaatccgcaggcaagaatgatggatgggtgaaagggagggggaatacgaaagcccagaggcggagacttcacttccgattgccacgctatatcaagaaagccaacagtctggcctttccgcaagccacaagaaaaggcagatcagactccccggctcctcgggtagttctcaaaggcaaagacaaaaataagaaactagtctgaagaaagagagtccctcgcttcttcagaactcacctgtcaagagcggcgtggacggcgccatgttgtcccggaaagagaaaccgctcgggtgagagttcaccagggccgaacccggcccctacacgtctcctcatgcgtggagacagcgaattggtgtttccggagccatcagcctcggggccaattcacttccggttacggagtgacgcggaaaaggcgcccaaacgcgcacgcgcaaatctagggcgacgcttgacagagcttgggagggtgcgcctgctttcgccctccttctccagcgggaggggcgcgcacttccgcggggcggagtccgtctagtgctgacgttggcagccgaacccaaagtagatcgaggcggcgggctgcacattcccgttgttgcgttgcgtttccttcctctttcactccgcgctcacggcggcggccaaagcggcggcgacggcggcgcgagaacgacccggcggccagttctcttcctcctgcgcacctgccccgctcggtcagtcagtcggcggc

SEQ ID NO: 30805 - DNA, 2300 bp, Homo sapien
ttctcaatgttccatctgctattctactaccctgcagggattgttcaggccccctcccttccctacacatcaagctcggggatttgccccgccgaggactggcaaattgactttactcacatgcttcaagtcaggaaactaaaatacctcttggtttgggtagacatttcactgggtgggtagaggcctttcccacagggtctaagaaggccaccgcggtcatttcttcccttctgtcagacataattcctcagtttggccttcccacctcctctctttccttgaaaatcactgaagcctcgacttactcactgctgaaaaaggaggactttgtatatttttaaatgaagagtgttgtttttacctaaatcaatctggcctggtatatgacaacataaaaaaacttaaggatagagatagagcccaaaaactctccaaccaagcagacaacaacgttgaacccccttggacactctctaattggatgtcctgggtactcccaattcttagtcctttaatacctatttttctccttcttttattcggaccttgtgtctttcatttagtttctcaattcatacaaaactgcatccaggccatctccaataattctatacgacaaatgctccttctaacaaccccacaatatcaccccttacccccaaatctttcttcagttgaatctctcccactgtgggttcccacgccgcccctaatctcgctcgaagcagccctgagaaacatcgcctattatctctccataccacccccaaaaattttcgctgccccaacactttaccactattttgttttatttttcttattaatataagaagacaggaatgtcaggcctctgagcctaagctaagccatcatatccccagtgacctgcacatatacatccagatggcctgaagcaactgaagatccacagaagtgaaaatagccttaactgataacattccaccattgtgatttgtttctgccccaccctaactgatcaatgtactttgttgatcagtaatctcccccacccttaagaaggttctttgtaattctccccacccttgagaatgtactttgtgagatccaacccctgcccccaaaatattgctcttaactccaccgcctatcccaaaacctataagaaccaatgataatcccaccaccctttgctgactcccttttcggactcggcccgcttgcacccaggtgaaataaacagctgtgttgctcacacaaagcctgtttggtagtctcttcacacggacatgtgaaacactgtggtcaattttttttctttttaataataattcttttttagaaatatgtgcttaaataattgtaagccaggcatagttgcctgtgcctgtattcctaaccacttgggaagctgaggcaggactgcttgagcccaggggtgtgaggctgcagtaagctatgatcacgccactgaactccagcctgggtgacagtgagaccgtgtttaaaaatatatatatacagatgaaatgatatgatgtctgagatttgcttccaaatatgcctaggaagggaagaagtgtttagagatatagacaaatcaagattgtcaaaatgtatagtaactgttaaagcttgctaaggtagttattctatttttggatatgtttggaattgtccaaaggtttcctaaaacttatgtttaatattctttcaggagaaagcaatattgtaagatcaaagaaaaggccataacagcgcacccaaaaaatttcagcattaccattctgagggtcaggagtctcctcccttccatccgccaacacttgaatcaggactataaagtaggtgtttccaagtctcaggcaggtaaatggataaattgcaaaactggatgcagaactcacatctgcctcatacataggccctgtgacaccccaccagctcctttgctccctttctgcctttctcatgccgtcccagagtcttgcacactaccaagatggtggtgagtcaggacagtgaaacaggtcggctcttcactccaggagtgtgcgcgggcgccgggccgcgcaggcgcattactgctcccctcccccgaccttggctgatcgcgcctgcgcagtggggagcagctcgctcctgggctttgggctggctgcagtctgtctgagggcggccgaagtggctggctcatttaagatgaggcttctgctgcttctcctagtggcggcgtctgcgatggtccggagcgaggcctcggccaatctgggcggcgtgcccagcaagagattaaagatgcagtacgccacggggcc

SEQ ID NO: 30806 - DNA, 2300 bp, Homo sapien
aaaagcaaacgtaaaaggggtattttggaaaagcaaaaatacaaccaagagataaaagtaggatacagaaaaattaaataatttgaaaactgcaattttttaacacttaaatccgtaagtatcacaacccttaacaatctttaggttagtaagatgattaccaccttctaatttaaaaattaaggaaaaaagttaatggataaaccattctcccatttgcagtattacatgaaagatgatatattccagaaacatagtacattgtacagggaggtttttttttttttttttgagacggagtttcgctcttgttgcccaggctggagtgcaatggcgcgttctcggctcaccgcaacctccgcttcccgggttcaagcgattctcctgcctcagcctcccaagtagttgggattacaggcatgcgccaccacgccaggctaatttttgtatttttagtagagatgggggtttctccatgttggtcaggctggtctcgaactcccgacctcaggtgatccgctagcctcggcctccaaagtgctgggattacaggcgtgagccagcgagcccggccttgtttgtttttaatcaggagaaattgcaatgttttagttttcactcaaaaaaataaagtctcaccatcttattttctaactcaaacatcaccttaagccgatttttaaaaattattttaaaggtttgcttggtcttcagtgagtaagtaaaaagctagttggagaagtagaaaatcaaaactttaatatactaatacatgaagttcttaaaagaaggttttaaatgaatgatgtccaacaccaacattccaatgtatccggactctgatgatttactaatctggctattctgggatggtcggtttatcctgagaaaatgtcatctttggaggtgtaagattctcatttctataattttacaattttggtgttttttcccccatcttcagagcctttcaatccccacccgcaaccccacttaccgtataaaatgcatcattgccctgcttctaacgattaggttaaaaacaaaatcatttaaagaacactgtcgaaaactgccgagatctgctggatacacaagacaactgaaaggtagaaagagatgccagagcaggcaactcctgggaggcaggtgaggagggaatgcgagcgaactgtcaatgtttagaagaacaacgtgctccttttctgacactttggaaatggcaaacagaaccagcatccccagaccttccttccaccccctccagctgtcagacgccccattcgcaaactcaacagtccccccagcaagttcaggagaaaaacggcgtctgtcactcccggatcctctccaatgacccgaattaaccttcatctagccaggcagcgaagccgcccggcattaccccggaaaagagggcagaaaaagtgaactgacaaacggttggcgctcctccgccgacgcggcgcctactcatccccatctccgcaggcagccggggtggctatggcgtgacgccgccaaccagtcctccgtactaacaggtgtcccccagtcttcgcctttcagcgtttaaccttctcgcgccctccttccccattcccactgttctaggaggcaaaaaacaagtgagcagttatacctggaaaaggagggcggcctgaccgcgctaaggggccgcgagaaggctggctgtggaagggcgccggcacagttctacgaggccagcgaagatgcggccatttaggccgcgaagccggggcctcgcgtagccaatggcgccgagcagaggcgcggcggggtggccggggcccagtgcacatactcaccaaatctggaacttgagcagcggccccgtggcgtactgcatctttaatctcttgctgggcacgccgcccagattggccgaggcctcgctccggaccatcgcagacgccgccactaggagaagcagcagaagcctcatcttaaatgagccagccacttcggccgccctcagacagactgcagccagcccaaagcccaggagcgagctgctccccactgcgcaggcgcgatcagccaaggtcgggggaggggagcagtaatgcgcctgcgcggcccggcgcccgcgcacactcctggagtgaagagccgacctgtttcactgtcctgactcaccaccatcttggtagtgtgcaagactctgggacggcatgagaaaggcagaaagggagcaaaggagctggtggggtgtcacagggcctatgtatgaggcagatgtgagttctgcatccagttttgcaatttatccatttacc

SEQ ID NO: 30807 - DNA, 2300 bp, Homo sapien
gaaggtcgaagctgcagtgaactgagattgagccactgcactccagtctgggtgccacagcaaatcccgttctcaaaataataataataataataataataataataacaagaggcattcttgcgttattaggctggggtggctcatctgtaatttcagcactttgggaggccacattgggaggatagcttgagcccaggagttcaagaccagcctgggcaacacagtgatataagagttaaaaaggaattacttaggcaaataatgagggtaaggatgtcctcagtaaggttttccttttaatgaaaagcagcccccaaatgattttcttttctaacaaagagcagcctgtaaaattgagctgcaaacatagacaagcaaactgaaagcttgtatgggtgaatgctggcagctgtgccaataggaaaaggctacagggactaggcatgttcaaaatggtggctccatcttcccttctctttgccagccacgtgtacagtaagaagcaggcaacatggtgcctaccaggcaaagactccatttgcataataagattagggtggggcagccagtttccctgtgcattatgtaaacaacacacctagtccaaccaaactatgggccctatgtaaatcagacaccgactcctcaagcctgtctataaaatccggtgccagaagtcccatttgggctcctctgtctctcccaggagagagctattctcccttctctttcttttgcctattaaacctctgccttttttttttttttttttttttgacatggagtctcgctctgtcactcaggctggagtgcagtggcgcgatctcagctcattgcaagctctgcctcctgggttcaagcaattctcctgcctcagcctcctgattagctgggattacaggcatgtgccaccacgcctggctaatttttgtatttttagtagagatggggtttcaccatattggtcaggctgatctagaactcttgaccttgtgatcttcccgccttggcctcctaaagtgctgggattacaggtgtgagccaccgtgcccggcctaaacctctgctcttaaactcactccttgtgtgtgtgtgtctgtgtgcttaattttcctggcatgaggcaatgaaccttgggtatcaccccagaaaatgacaccacttcaacagtgagacctcatctcttaaaaaaaaaaaagtaaaccagtgaatgctcagaatttgttctaaattgataatatagcatatttcttggtattttagtcattttgtacactttttttgaatcctccctgtattattctggggtctctagagggaaagaactactaggatagatgtatatatgaaggggagcttattaaagagtactgacttacaccatcacaagatgaagtcccaaactaggccttctgcaaggtgaggagcaaggaagacagtctgagtcccaaaatctcaaaactagggaagccaacagtgcagccttcagtctgtgaccaaaggcctgagagcccctggcaaaccactggtgtaagtccaagagtccaaaagctgaggaacttggagtctgatgttcgaggtcaggaagcagccagaacaggagaaagttgaaagctggaagactcagcaagtctgctcgttccaccttcctctgcctgctttatcctagctgcgctggctgctgattagatggtgcccatccaggttgagggtgagtctgcctctcccagtccactgactcaaatgttaatctcctttggcaacacccacactgacaacacccaggaacaatactttgcgtccttcaatccaatcaagctgacccttgattgatactagccatcacactcctgatcctcccaccccaaaaaaacttcaaccaaaaaaacccaaaaaaattcaacaaaacaaatgaaagcaccatcattcttagttaaatttcttcatttattatatttcttattgtcttcattatatcttgctttataccagaactgtgacaaagggcaattagttttagagaaagtgaagaaaggtaggaaggttgctttaatttttcccaaacctggcttgagggaaaattcacacatccttcaagtttatgaaacaggcgacggatctttattaaactggccagcagaagaaggtcatctccacttacgtatcggaggattggaatctcctcagggtttggtagcttttcagcaaagagaaagagaaggaaactcagagtccagaagtggaactggggaggtgggaggagctgagtcatggcacttatgtggggttggattccc

SEQ ID NO: 30808 - DNA, 2300 bp, Homo sapien
agcatcatattatctctgaacggccaaaacaagagtggcatcaactcatgagaaaataagggactgttctttccgtagtaagtagatccaagggaaggagattccataaaatgttcaaaaaaggtcttaaatagagggtctaaacaaggagtacttaaacaaattaattcaccacacaattgagaaaatgccagggcagtcacagaactgagctacagcaggcacaagcggagtaagcacaagcactgtcacccttgctgtctgccagccccgtgtctcatccccacatcctgacttccagtctgctctctgaggaccctggttgaatttcctaacttctaagatagcttccagcatcaaactgttagtattgtccagaaaagaaatgagctttttcttattttctctttttaaattacacttaccttatttgtacctcaatatctgtacacatagttccctgtcctgaccctcctttcctgccgtgagcctgctggaaagcttttcactttcctctctggtcaccacattttgcccttccttttaaagcaactcagatgtctcctctcatctgtgctgcctgctcctttagcctgcaagaactctactttcaaaaatattccctagccaggcacagtagctcacgtctgtaatcctaagaactttgggaggcccagatgggaggatctcttgagcccaggagcttgagaccgagagtttgagaccagcctgggcaacatagcaagacgccatctctacaaaaagtagtcccagatactcgggaggctgaggcgggaggatcagcttgagccgggaggaggaggttgcggtgagctgagatagcaccactgcactccagcctgagcgacagggtaagaccctgtctcaaaataaatataatacaggccaggcactgtggctcacgcctgtaatcccagcactttgggaggctgaggcaggcagatcacgaggtcaggagatcgagaccatcctggctaacacggtgaaaccccatctctactgaaaatgcaaaaaattagccaggcgtggtggcacgtgcctgtagtcccagctactcgggaggctgaggcaggagaattgcttgaacccaggaggctgaggttgcagggagccgatatggtgccactgcactccagcctgggtgacagagcgagactccgtctcaaaataaatataatataatataatataatataatataatataatataatataatataatatataaaattggccaggcgtggtgacacacatttgttgtccttgccacttgggagaccgaggtgggaggatcactggagcccaagagttcagggctgaagtgaaccatgatgccgccactgcactccagcctgggtgacagagtgacatcctgtctctcaaaaataaaaaatgtatatattttacaaaaatgtaagtaaatacaaagtcccagaaggacgcaggtggtacctaggtggccagatgcttcaggacttttctactccaggatggatagatgggccaagtaagaagcaggacccagatcacagcaaggagcaaaatttatgggacgctaaaaatgtcgccaatcaagattaattaatattaatctaacaatatttaagataactaacatttaaggcaattttaatacgcttattaatatttaaagctattttaaaaatatccgcaaacgagggcccaagggctggcgcctgattttgtaaataaagtttcactggacgttccagcaagcatctgtctactcaataaccagactccagcatccgcaataccaaatggcaccgtgtgtgtccgtcgctagaagccacttcctccacccaagttaaaaaaaaaaaaaaaggccccaaataagctgagagacgaagaaaagatcgtttctccgcaggctgccaggggtttcagagacgctgaagagcagggacagaaagaagtctgcggtggcccccaccggccctcggcacccacattctatccggctaaccagctcctgccgctttaaatccgggaggctcggtggcgcagggcaagcagttgcccggggagaccaacgcacaacagaggctcgcgctcgcgagagccgaccggggccgcggccaaagagctggctgtaatcccgcctcccgccagccatggcccacttgcgctcgcctagcggcttcggagacccggggaagaaggaccagaaggagtcagaggaggagttagaggaggaggaggaggaggaagaggtggaggaggaggaggaagaggtggaggaggaggaggaagaggt

SEQ ID NO: 30809 - DNA, 2300 bp, Homo sapien
ttgtttttaaaatgtaaccataatagaattgtgttgttcccaagagaaagggaaggaaacagttatgctatatggagcatgaagtttcactttcaggatctagaactctggttcctatgaaagcatacgttctttcctaacgtgaaacaggctactgaaatcaaccttgaagagtagttctgggaatcaggggttctcagcctttctgtacatgtcagtggttttctgagtctctattctataagaatgcagtggggtaaagctattactttgcaagctgaaatttaaaagggccaattattcccctgcagaccaagaaccaagcttaggatgtgatcttggggatgcttttgtgtgtgcatgtgtgtgagttgtataaagctggggtgtgtgtccctcacctttggttgatcaataatccaaactattggcagggcagctcagccagttagtctggataaaccaaacttgaatgtatacataggcccagcgaccaaccaagatgtgttagttgtagaggatgagaaacaacagagagccgtaaggcctgtatcaaacttaaaacaaggcagatctgtttacctagccctttggcctacagtttgaggctcctagaaattatgggactgcctttttactgtccccacctgctctcagaatctctcatgggctggctcatgtgaaaaaaaccaacgttgaataaagtaccagagcccacatctcaagagctgccactgtttgcctgaaagaccacctcccagggccttgatttcctcatctatacaaatgagagatgaatctgcttgacttctaaggacctgtagcttctagcattctatgaaaagaagggaggctatctggaatgttattggatgccctctatctgccagttactttgcaggggtcagcttttactagtttgccttttttttttttcagatgaggaaactcatgcctacagagtggttaaatgtgaagtgacttgtcaaatcacacagctagtaagaggaccagtccaagcacctgcatctcaaaggcacagatgttttgtcctacaccttactacgtagggatttcgaatctgagtgtatactcaagattctgaatcataactcaaggttgacaccagtaacaaaaccgtctggttggatgagttcaccagatgggcctcttatgggaccatcccaaaatgacaacatacatactcactatgaaattcattggcaggaattttgtagggcatgtagggtaggaagatgggagggtgggggaaacctacaaacctagtattttgtggggtatcatcacagctctggactgcttcagttggcaaaaaaatggatgtattgccaaataactatcccacttaggtttagggtaattaattaaaggctagagtgttgccagcacctttgatatggggaaccggatgcattattagctcagatctttgggtgtggtgactcatgcctgtaatcccagcactttgggaggcagaggtgagcagatcacctgaggtcaggagttcgagaccagcctggacaacatagtgaaaccctgtctctactaaaaatacaaaaattagggccaggcgcagtggctcacgtctgtaatcccagcactttgggaggctgaggtgggtggatcacctgaggtcaggagtttgagaccagcctgaccaacatggagaaaccccgtttctactaaaaatacaaaaaagttagctgggcatggtggcacatgcctgtaatatcagctactcaggagactgaggcaggagaattgcttgaacccgggaggcagaggttgcagtgagccaagatcacgtcattgcattccagcctgggcaacaagagtgaaactcagtctcattaaaaaaaaaaaaaaaaaaaatagccaggtgtggtggcaggcacctgtaatcccagctactcaggaggctgcggcaggagaatcgcttgaacccaggaggtggaggttgcagtgagctgagattgtgccactgcactccagcctgggtgacagagcaagactctgtgtcaaaaaaaaaaaaaaaaaaatggaatgtctaatagtgtatggctttcttccgcttggggtattttttaatccattctgtggcttgttccatgcctgagaacttttgacatcctgtgcccagacttaaactcaccccttcagtgtgtgggtttagggggagaagtgaaggttgacacattcatatcaacaacatagtctactttaccatccaacgatgtattttgatatcagccaagtatttctctctacaactgtgagca

SEQ ID NO: 30810 - DNA, 2300 bp, Homo sapien
ggtcatcacacagagaggctagaagtggaaggaaagaaaatgtgttccattaataaattccaaatgctttgattttaaattaagaatgaaaaatattacatttcctccaataacagtaaaacagtaggtgatttttgtgttatcacttatattttgtgtcataaaaaggtgaaaatgaaataaatagaacatgatttaatttttctctctagaccagctaaggaaagagtttatgtaaagtttgcccacaaaatttagtgctttattataggctgaacaactgttttctgactctgttgagtgtgctaatcttaactgtttaacaagactgtaagtaggaatcaggcataatttagaggcatacagactagtagttaagaagggctcctagcgtgttcccacattctcagctgtgtgatcttgagcaaagtaacctatgtctcggtttcctcaactgtaaaatggagataacagtagtattcatcacagagagttatgataaatacttaaaactatccatgcccaacatacagtgggcactcaattaacattagttattattttatgctccctacctatccaaaaactcaggttcagccatgttactaaagagcttccaaaaacctacaaaacctagtgttgttgtgtgttcttaaaaaaacaaacaaaaccctacagtggtttacccctatcattgaggtaaatgtcttattaagccagttgaggctccccttgtgctaacgccacacccctacactcccgttatatcccctccaagtcccaatgcaatcccagaatacatgctttcactctgtgctttttagctcctgctataatgcctgcccaccccgtggtatctgaaatccttcttctcccacgagtgcttggttattgggccttgctctcttactagaatgtaaactgcatgagaaccattctcagagctccaacagtagctgacacatgataaatgctcaggaaacatttactgaacgattgaatacacctattaagttttttcaagatttataccaaattccatcaattccatgcatgtattctttctacagaagccctttgtaagattaaactttatttcttctgggctcttacgccatatttcttggacaaattgtattcattcattttaaacatccactaatatttttaaaagataagagctaatgtttaaacagtgcttatgatgggcgaggttgttttaaaagcttgaaatatattaaactcatttactcctcactgccccacctataagataggtatttttttttccacttttacagttggagggaaccatttttcactcagtcctaacagttggtccttacctctgtgtctcctataaatttccgatttctacctaaggtaaccctttccccaattccggaatcgttggctcaagcaaagtctgcagaaaaacaattttaactcggagcacacagttacatttggacatgcggttcaccccgggcaaccgtgccctctagcgcttctgctgggcgcgcagggtggccctacgcctcgcaacaaagactcggacttcggccggctctctaccaagcggacgcagcgccttacactggagtttcacccactgtcttcagagacctcacgacccaacctacgtttctgacatttctagatgatctcgaactcttagccaacgctgcccatgagctccctcctcggcctgctatacgagccaggggcgctcaattcaacgaagcttcctcctggtccgctgggaaaggaataaagggagcttacatcctccccaccgcccccctctttactcaaccccaccgttaactgtacaaaactaggtcctgtgcccgctgcagacccaactcgagcccctcgccctgctcccacccaatgcttctcgtcctgactccgaacacagaacgcgggtggccgcttcgccctcttctcctgcgtgctggtgactcagccctgagaagagaaacctctcggttttttccgactagtgcaggggcgcccgcgccccgcccctgcccgcccgcgtccggtcccacccaccgtccacgctcccgccccgcctgaagttgcctttctcgtttgagctgagggacgcgtcagccaggcaccccggggtgtggccagaggacttcggcgacgcttccccgagagtagcccccctcctcaacccagaaaagacaaccccgcggggctgcagcgagccaggcatgctcactggcgcaggcccggcccgcagcccgagcaggaagcgccggcgctaggcggccccctgcgctgccagc

SEQ ID NO: 30811 - DNA, 2300 bp, Homo sapien
tattatgagatctgatgattttccaaggggctttcccccattcactttgcacttctccttgctgctgctatggaaagaaggacatgtttgcttcctcttctgccatgattgtaagtttttttgaggctcccccagccccgcggaactgtgagtcagttaaacctcttttctttataaattaccgagtctcaggcagttctttatagcagcaggagaatggactaatatatggccactttaattttgagttgcttctagtgaagttaacacattcttccaaaacgcacacaatttgggctcataattttgacacataaaattagctggagtcccaaatggtgtcatctcagactccttgaattgtgacaatcaatttgaccctcaactcaatttagtttctctctaacccagtcagttacccaaggcctcttgagttcaattcagttaactatcaaatctaatccaactctggatctagcacagtttttccagtgacttgtcagtcactgcaaatcctgaaaggttatatgccttctcatagtacaaaaccctggattcaaaagccgaaaatgaattgagtgcttaatgagaaaagaacagagctcaacctgagaggaactcacaacatttgaggctctatgaagaagacatgggacctcaaaagagatcagcagtgcctctcctgcattccacaaggggtctcagaagttgggtctcatctggttcgcccaaactgttaaaagacaaaattccaacaaatttaacttaaagatttgaattggcttttattcatgattccagaatcaacttccaaacagtctgggtcaaaaatttgctcacacaaactcagatagctcaaaacacaaacctgtggagctttggaatctgagaacttaaccacaatccccagttgggcctggtgatgcctcacttggtcacttgctgttcctgggagtcactgaaagctctacttcagatcccacttctgacaccaatccgttaaaaggaaaagctttaggcaaattacatttaacagagtttaactgagcaagaaatgattcacaaaccagacggtccccataaccagaataggtttagatcaactccagctgcatggtcagataacgtttatggacagaaaaagaatactgatatacagaaaacaaaaattaggtgtggaaacaactggattggttatggctcagcatgtgccatatttaaaaatagcttaaggccgggcgcggtggctcatgcctgtaatcccagcactttgggaggcccaggcgggcagatcacgaggtcaggagatcgacaccatcctggctaacgcattgaaaccccgtccctactaaaaatgcaaaaaaattagccagatgtggtggcgggcacctgtggtcccagctactcaggaggctgaggcaggagaatggtgtgaacctgggatgcagagcttgcagtgagccaagatcacaccactgcattccagcctgggtgacagagtgagactccgtctccaaaaagaaaaaaaaaaaaaatagcttaaacagttggccactcataattgggtgaaacttggctgctgtgattggctgagactcagctacttgctacaagagtaggttacagtctgtttacacatcaagttagtttacagttcactgtgcatggagaaacttttagtccagacttaaactacctatggaggcaggtttaggacaaacttaattcaattaaacatgtccttttgattatagtcatcttagagggcatgaattggtatctcatgtggttttgatttgtagttctttaatggctgatgcttgatggtctcttggccaacccagcctctccccgtcttcttgcttgtagctctcagaataactggtgaatgctctgtgaatgcaacaccctgagatagggaaggactgcctgaaataccctggactttgttcctatccttactaggaaatgtaacatcttgagatagggagaaactgtctgggacagcttgggctctttttccctcccctagaaacaagatgtcctcatgattcatattcttctgaagtatatagcccagggtggactgcttctcaaggtagctcagctggagtgcaagctgggaatgcagtcaaggcttcatccaccccaggcagctttcctgagccttgggagactggctctcaatgaatccaagctgcttttatcctttgctgcctatctgtaagtaatgaatctgcttcatataacttgttgcatgtgaatgggttctgtcttactggacttggacaagtaggaaa

SEQ ID NO: 30812 - DNA, 2300 bp, Homo sapien
cactcactaagtataaatcttggtcatggtacatgcctctgtgcctcagtttttaataatggtacctacctcatagggctgttgagagaattaaatcagataagtgcttaaataactattaatatttattattattcacattcccttttggcttttttcccaaatagcagagtggtgcacatatgtcttcatttatttggcttgttttttcacctcacatcacattttgatgaataattccatacatgttgttatagatttgcttcattctttgtaatcattgactaatattccattgtatgaatatgctactgctaaacatgtacgttatttccaacctcttattatcaagaaatgctgcaatgaatatccttgtaatactttagtggattcatgtgcaaaaatattcataggataaaatcctgaaagttaaattgctgagctaaagggtatgtgcattttaatgctttatagattgcccagctgcctcaaaggaggttataacaatttacactcccaagaaaaatgcacaagggtccccatttccccataccctagctaacacaggatattgctaaatgctttcatctttgtaaacatgatgtattgaaaatggtatctcaaagttttaatgtgcatttttctgattgtgagaagataaaggaaatgtagtacaactaaacatcagcagtcaaatgacctggccatgactcctgagtgaggacactggtaaacaccatcaggatccaaacacctctgtatttacgaagaggatgctccctattggatagcactaagcttatttcatgtatgtacatatgtagttagttaattacatccagcggtggcaaagggcttgttctgacccaatgaaactttctctcctggcccccttccagcatgtggtcaggagtagagtgttgtggccatgaggcatgcatttgtacagatgactacttactcctccttgaaacatttttttccatttgcttccctgctgtctcactcatgggtctgctcctaattcacaaatcactcttttcccagtcttcttggttgggttttctcctcttctgtgcttgtagacatgggggagccccagggcttctctcttgaactacagcttctccctgggttcatctccttgggatgtctgttccaatgggtttaaatactagggctaggactagggagaggtcattgaggcacttagcacataaagtttaaggaaacattctttatcaggcccatgcaagtgcaggactggccctggagggtgactaccaccttaccttttccaccctaggcaccttgtttgccttaccctagccccagtcctctttaacaccccagtcttctccctggacctccagaaacataaatcctatttgacatttctacttggaggttttaaggtaactcaaacgtaaaatatctaagacagaactcttgcatcacttcccatcctggggcccaagcctgtctcttctactagtctatctcagttaacagcatcaccatttattcagttgctcaggacaaaaaatttgaagtaatccttgactcttctttttttttttttgagacggattctcactctgttgcccaggctggagtgcagtggtgggaccttggctcactgcaacctctgcctcctgggttcaagcaattctcctgcctcagtcttctgacctcgtgatccactcgcctcggcctcccaaagtgctgggattacaggcgtgagccaccgcacccggcctggattcttttttttttttttaaacaagtcctatcttccatctccaaaatgtatcccaaatctgacaacctctcccaccgtaggccagcccccatctctcccctctgaaaatagcctcccttagatctctggacatttgttcttccccacccccttgtgatcactattcagcattcagaatgatcttttaatattatgaaggagactgtgttcctctcctacttaaaattctctagtggcttcctaataaatttagaataaaaagccaactcctcgccatggtcaccaggccaggatccagtgggtacaacaatctgttcccagcacaataatcccacttctgcctccccaccattcaccaggctccactgcactggctcattcctgcctcagttgtgcttcttttccctggaaagttctttctgtagatctttaaagggtgatttccttctcaacattcaggtgtcagctcgtttcactttcctgaccatgcccatccactcagagatcactcaaaatcccattaccctattttatttct

SEQ ID NO: 30813 - DNA, 2300 bp, Homo sapien
ttttaacatgtatagtatatacagtacacttaatatgtatagtctattgtatattgatggagctgtcactgcagaatgaacaagtaaatggaagattttcttcactaggctagggggagaatgtcaggggtatctgggagctaatgaaattctgtgagataagtgagggtactgtttaaaccccaccagttctgcaagtcctcacagaaagcaaaaggaggggcacccaattagaacaacttcatccttagacaggacaagcataggacacaaccacaaaaatcattcgctaaaccccagaagaatgtggctgtgtaaggattaaatgagacaaagcatataaagtgcttagtatgtagtaagtgttcagaaaacatcttattattgttttgaaacatgtcctatggcatgagtaaagtttatctccatttcactgtagaaaatgtaaaggctccagaaaattcaccagtaccttctccgcttttgtctaaattcatctgtgagaagctttactcacgctttggctgccggtgactcacggttaaatcatctctctcaacttttttccttttcggttttttaatacagttgcatatcacatgacattctgctttgttttcttccttccccttccccaggaaaactaagcaactctaacagccccattaccttaatgaataaaagccattcagtgaaaagaactggtatccacttcatcaattaaaaagctaacaaccaattcttggaaattttctggagccctatgaaaattcatatcacttagtaacctatgtgagctgaaggttggtgtccaatgactgctaagaagatataaggaatgttgcagaaatataaatagaccagcactgaaatttaattaggcactgcatatgttaataataaattcaattaatttagccttctacctatactagaaagaaaaaaaaaacctgggcaaaataataattcattttaaatgcttcagttggtaacctcctttcctgaagagtgatttatgcagtaatttactgactgtgtcttcataaggttgttccaaaccagcccttctgaaataataataacttctgaatgtgtgttgtaagagatataacaaatgacttcctattaattttcatttaatgagttgcctattcacatggtaatttttaaaaattctcttcttaagataaacaggttataaatactgtggattacacttccatttcacaaaaatcacaacaagaaaatctctctcatattctctacatgatttgcaggtcaatcagtttaaaatgttctatactaaataggcatccatttctttcccagttagcacagcagatcattttaaatttctatagccaaatgattccaaattagttaaaaatgaaaactgaatatttagcagcaggaaaggtcttagcaggaataatgggagggagtggggagcaggaaacaaaatcatgagaaaggtggcaacctggttaaatacggagcccatgaccttggttctttttataaagaacaaaaagcataaagatcattctttacagctttcctatttccccaagtttacttttttaaaaagactccataattttttacataaatattaatacttaagcatcttaattgccaatatttccaaaaaccttaattatgtaacaatgaattaactctatattataataaaaagcaagtataaaataataaaaactaggaagaagaaattgctcagagtcataggtttttcatatggttcacaccgatttaaaaagtcctgcagtaaacacggcaaaattctcaaatataattcctcgcaacactgggaagagtctgcctaaagcattaaataactcaaatgcaattgctacttacatgagaaccgaaagggccttgctcccaacccacactgcctcacaccctctccgtggaaaagcccgtactgcatttcacccataaacttgtccagctcctgccctgaggcattgacgagcagagctcccgttttgcagaggacagtggctttgatccacaacggtgtccccaaggctgtcacaactccgagggcacatgcaaaactgaacactccggccatgcaaaaaatgattttcttctgttggcttggcatgatgagaaacggcttctgtgagggcgaggttcaaaaacaagacctttgtgagcaatgggaagggactgcctctttgactgcatttattacggaagctgaacggacagctcccagctgaaaaggcaacttcaccatcgacggttctcgccaggttaaatgtcagtagatg

SEQ ID NO: 30814 - DNA, 2300 bp, Homo sapien
tggaaatgttctgtctcttccaattacagaatatgttgatttagtaagctcagctctgcttagacatcttaaactaagttttctagggtgactgtggcacatatatgcccaaataaccacttatcaggggcactggcacccccttgttttgctagtggaccatgatagcgattattctaaatccagtggtgaattcattggagggccaaataaactgagatgagttgcttattctgtgttctagcaattattctaaatccagtggtgaattcattggaaggccaaataaactgggatgagttgcttattctgtgttaagttatacaaaataaaaaagacttactaatattgtaaactttattttaagtgcctctttggaatcttctatatgcccagttcttctgtggccatgttttatattgcccctcttctccccgaaggtacattggcattctagaatgagttctatacttagttgtctgtccttaacgagactggctgttgcgactcctaggagaggcgagctgtgagagaagtttaccagtactccgagtctatacctcaaagttcccttcgaagtgtgcataatgtagagactcatttatgctgaaaatggtgtgaaataagtcttcatttattaatttcctctaagctgtcatgcttaaaggtggatcaaaagaatagaagctagcatacacatgtgcttttggccaactgaaaaagttctatttactgatgtctgtgttcttcaaacactcaatatgtgtaactaataatgggctagtctgcccctgttactcctagacgaacccaacccaaactgaaatgtttgccatcttttcaaggtcaggggctttgcttggaatagaacatcaacctcagaagtagaagacctggatttgaatcccagctccactactctcttcagcaagttgcttaaactctctgagcctcaattcccttatatataagatacgaataattgctttttcttcttctttcttctttcttattcttcttccttcttcctttctcctcctcctcctccttcttctcctcctccctcctcttcttcttcctcttcttcattactttatatgctaattatgagaattacatatgataatttaggtagaatacttcacaagttgccagacataagttcttactaaacattaactttgtaggtcagagctcaggacaataacatggcatataataaacattcactagacacttcacacacacacacacacacacacacacacacacacacacacacacagtcctgtgtctgtagaaggaggaatctcattggaaatgcaaagttaaaaagctgttactgaattctgaactttagtttccaggtcttgaccgtttaaccagacctacctgctgcttaatctttgctcataactgtctctagtctcccaaacagattacctttgctgagacctgtgcatttttatgatgaatccatagagtcacctatctgaccaccatccctctttccatcaatatgcccttatctttacagatcctggtattccttggacccagaaacacattcccttgctattatcctaaagcagctaagcctgttaaaggaaagcatttagaaatctagatatctgctcctgcattttcatatttctgtatgccaagaaaaatttgaatcaaattctctattgatacattaggtataaaccatggatctgggagaaattaagttggaaggacaaggacccatggttgatccagagcacttaatattcgtgtaggaccaaattctgtttaatatttttatcctgctgtaattaaaaatttttgacatcaactatcaatacaggtacatatgttctccctacctctgctaaagctccttcccccaccaccaaaaacaataacaaacaaaaaacaaaaataaaaacatcgataagtgaacttctcaagttgctgaaaatgtaccatcagattcaagcctgtttctgaaagtttcaactcacccaatcagacaaaaggctgaggaagggaaacatttatcaagttacactgaggactccatctgttatcttcgacctttgttaccaagtgacacagaggagatacttgaaggcagtttgaaagacttgttttacagattcttagtccaaagatttccaattagggagaagaagcagcagaaaaggagaaaagccaagtatgagtgatgatgaggccttcatctactgacatttaacctggcgagaaccgtcgatggtgaagttgccttttcagctgggagctgtccgttcagcttc

SEQ ID NO: 30815 - DNA, 2300 bp, Homo sapien
gagggagttaagaagggacaacaacagggagagggctattattttcccttcttcccaaacaccaggggcacactactgacacattttgattttaagataaaattcttatgggcagataagattttaagtgcttcaaagtgtttcagttggaggcgcttgcttaggcatcccaagggaagaactgagattacatttctcccccaaactaggggtgtttgattcagtagcagcgcaggctgttattcccaaagtaccactaatgatgcaatcatcagtccatccacacatcgcctacctatcatccattccataagccaacatttttgaatgctcaccatgtgtcaggtcccatacagtgtttctgagttgcaacaatgagtaaaactgtccttactagtgtatgtcagtgagttgggaatgggggagaaagatgaaacaaaaatagtaactttaatttttatagctgagagatgaatatttgagggctccttatatgatttcttcagctttttgtatgtttaataatttccctaataaagttagataataaaaaaaaccctttcggccgggcgcggtggctcacgcctgtaatcccagcactttgggaggccgaggtgggcggattgcgaggtcaggagatcgagaccatcctagctaacactgtgaaaccccgtctctactaaaaaaaagaaatacaaaaaaaattagccgggcgtggtggcgggcgcctgtagccccagctacgcgggaggctgaggcaggagaatggcgtgaacccaggaggcggagcttgcagtgagccgagatctcgccactgcactccagcctgggcgacagagcgaggctctgtctcaaaaaacaaccaaccaaccaaacaaagaaaacaacaacaacaaaaaactgtcctttctttcaaacaagggagctacatttgatagatgcctgtatcacaagggcaagtccagccatgaaattaatcccaggatattagtggaagagaagaccctggggcaagatggggaaggtggtcaggaaatgccctccagtgaagttaggtaaatgctctctagaagtaattgttcagattaaggaagccaaaagctaaacacctgactcagcctcaaactgggtttggaggtgctcacaggtcaggatcaggagtgaggaactagcctctaccacattaccttcactttatttatctccttcttccccctttgcttaaatgtcaacgaacatcaaagttgatgttcagattcaaccagcatttccagagcacctactatgtatcaaaggcttccggttagaatctgcctttaccaccttacagagagggaaggccgagaatgcctcaagccgtggagaacgtgagtccatcaggcaaggacaggttaggaacccagtccctccaagtccaagtcagggaaaacaggtcagaaacttagaatcagtcgtgggttcaaattccgactcgtttcgtggctttcggcaagtgagtggtcctctctgagctggctcaatttctccatccataaaaagggtacagtaagaccgtggaaggttgtaaggaccagagattctgactatcaagatcctggcacgtagcgaaggctccataaatggcagccatcattcttggccaagtgcgggcgcattctcccgggcacgcctcccgcggggtccctcaggacaggccgagcccgcctccgcggctccggtctcgcagagctcgcgccaggtggcccagcatcttggtgcccgcgccccgaagcgaggagcgagggcgggttggatgaccaaggtctgccctggaggatcaccccccccgccccttccacgctcccggcgcaggtgaggttttcggcccaggccacggggaccgcgacctctggggaggtcgaggcggagggtgcagcggggggcttggagcagggctccagagggcgctccctccctcgcccaggttcaccccagggccagcctcggcgccggggcccgcgggctgcgcgctctgcggctgcgaaaacccggagaggcggattggagcgcgctcaccgcgctctcagccaactcctccgcggtccggccgccgagctgggcatgctcagtgcggacgccgcgccgccgtccgccaactcggaagctcgcgctcccgggccgtgggggcgagaacgccggcggcgagccggcgtcgctcgccgcccccagacagtggcaaacttcgcggcgttcccggagctcgtccgggcgaggcagataccgcacaaataaaatcaaatccaagtcccccatcccaaccc

SEQ ID NO: 30816 - DNA, 2300 bp, Homo sapien
atgtcaacgaacatcaaagttgatgttcagattcaaccagcatttccagagcacctactatgtatcaaaggcttccggttagaatctgcctttaccaccttacagagagggaaggccgagaatgcctcaagccgtggagaacgtgagtccatcaggcaaggacaggttaggaacccagtccctccaagtccaagtcagggaaaacaggtcagaaacttagaatcagtcgtgggttcaaattccgactcgtttcgtggctttcggcaagtgagtggtcctctctgagctggctcaatttctccatccataaaaagggtacagtaagaccgtggaaggttgtaaggaccagagattctgactatcaagatcctggcacgtagcgaaggctccataaatggcagccatcattcttggccaagtgcgggcgcattctcccgggcacgcctcccgcggggtccctcaggacaggccgagcccgcctccgcggctccggtctcgcagagctcgcgccaggtggcccagcatcttggtgcccgcgccccgaagcgaggagcgagggcgggttggatgaccaaggtctgccctggaggatcaccccccccgccccttccacgctcccggcgcaggtgaggttttcggcccaggccacggggaccgcgacctctggggaggtcgaggcggagggtgcagcggggggcttggagcagggctccagagggcgctccctccctcgcccaggttcaccccagggccagcctcggcgccggggcccgcgggctgcgcgctctgcggctgcgaaaacccggagaggcggattggagcgcgctcaccgcgctctcagccaactcctccgcggtccggccgccgagctgggcatgctcagtgcggacgccgcgccgccgtccgccaactcggaagctcgcgctcccgggccgtgggggcgagaacgccggcggcgagccggcgtcgctcgccgcccccagacagtggcaaacttcgcggcgttcccggagctcgtccgggcgaggcagataccgcacaaataaaatcaaatccaagtcccccatcccaacccgaatgatggaggctgcggcggccggagtgaccccgccgccgccagccccagcccgctagccgcggaccaacaggtaaagtgttgggggttgggggcggaagggaagaggagctggggccgtggggaggcggcgggctggaggagcccgagacgcctgcgggctggctgcccccgtcggcgctcacagccatcgctcctcacccccttccccagcccctggagggactgtaaagggttaagtcggccccacgccaccgtgagcacggccccctccagccgccgcgaccgccagcagcgcgcctcggcgcctgcccggagccgccgaggggaccgtagctgcggatgcgccactggaacctggcgggcgtctaggaggcaccggccgcttcccaccggccgcatccctgcgtctcgcgccccctccagacctgcctctgcctgcactggcccggtccgtgtccaggtggcggggtctgcggggcgcgtggcggcgggggaagggtccctgccggggaagagaggcgggggcggtccgctccacagcttcttcccgggaggggagggccaccctcgccttgggcgagcacttcagccaccagcctaggcgccaagaaaagtttttttttttttttttccagtgccccacccccacccccatcctgcgcccagctggggtgggtttgggtccattggtgaaaaaagtcacacgttcccatcagctgctcctccccctggagacaaggtaggggggagcagaggaggcaggcgccgcggaggaccctggccgacctctagtccctccgccgccgccaccggagcggtgcgtcccggggctcgagcgcagccgagtacccgccgaaggctgtccccatcagtgcgtgtctgctgccgggcagcggcagcatccaacctgctttattcctcctgcctgcagcgccacagcgagcgagcgagcgaggagggggagagagggagtctgtctgcaaagtgctgctccctggtgctcagaggcggctgctccagctccaactctcattcatttcgccggttaacatgagagatcatggccgccttcgggcttctcagctatgagcagagaccgctgaagcgcccccggctcgggccgcccgacgtctacccacaggaccccaagcagaaggaggtaagggcgccggcggcctccccggcaaccggggccgcgctctgcagcactgacccggggcca

SEQ ID NO: 30817 - DNA, 2300 bp, Homo sapien
aacaaaaagtactgccatgaccaaggtaagggaaaaataacttcacctcacttcttcccgcttgggtgtgtattagtgatgacatgcaacttcccggaacactaagtacagtcacaaacacttgtcctcagtgaaacagatagaaaaaagtggcttatagaaaatcaaatgaaactagtattaaaaaatgaaaactacatgtatttccactgtgaataaacttccacacaaagccaggttgcctaagctcattctcagaaggaggaatatgattcatctattaaaagattaattctcactattctaaaaattaaatagaactctgagaacaagggcacttcagtgctttcacatttggcaatccagacacagaaactgtggtctgggtagatttttaagtacaattgtttgtacttttcaattgtgtctacaaccttaaagtgaaccgaggaagtaaacatataaagagacctaactaaaaaaagcaaaacagaaactgtcaaaaatctttcatcccagtttttctccatgccatggtaaaatcattcaccactgtttgcagtcaactccactcatctctaaattctctccctttcatctcctctaccctccagtggatgtaaaccctgatcacttctcacttacttgtctgcaaatatatcttttctacaagtatgttcttcagtgagtcctgtacaatgttgaagcatacatatcttaaaagaaagatcctttcctagcactatgatgatgaagttcacagtggttcttaacataaaatgtttgagaaacatttgctttttccctcctagtttataatttatggtcttcactggcaaaaataataattatatgaatttgggagaatgtcagaatacctgagacgtgaccaatatcatcataagcatctttacatttttttcaaaagtctccttagactttccctaaattctccctagctagatacttctcatttcatcttttgagacatttttctttttaaaaactaataccaagagattaattttagatcctggaaaggtatcttcttttttcttatccagaaaactgaccaagtattattaaaagaaaccaaagcacctaccaagccaatgaagcattagaagaaaccagaccctaaataaccaggcaatggctttgcattaacacatcaactttgaaccagaaaattcagaactcttgaaaatatgtttgttaggtcccccagcatgctaggcttctttcaaacattcagttagttctgccacagacacaatgaacatttaaccaaacaacttaaatacacactgtagggttcctttacacacaatctattaattactaaatactattccaattcatcaggctgtttgagtcaaacagacaaatacttattacaagtctaatctcataaattgaatatataatatattcttcaatgaaaaattataaactataaaatagtatgaataacatctaagtggaaatacataagcatagaaaaaatttaaaacttatgtaccaaaaatattaacagtaattatctctctgcataatgatgttccttttttatttctatttccagatttttctataatgaacataaaataagataaataaaatgtatacattagctgactctgtaaaacacatctttttgtttacttctttttttaataataggtgtctcagcaggaataaaaactgcaactattttttaaattttaactttgaaatgctgtgttactatatatactgaaaaaatatttgcttaaacaccttatatctttaattattaatccccatcaaggcatgaagagtgatattctttgaaatcattatgacacaaaacataccttggatactttaaaaaaaaaaaaaggctaggtactaaatgaagatcttttctctaaaaaatatgacaaataaattgcttaagaaagcatacatgaaattgtatacattaaaaaaacttctttaggagactttcataaagttaaactacttgcaaaccacagtttcatctacgtcaatatgcaacattttaaaaccacacaaaaaggaaaggaaatttttagtaaagccagcagcctgcaatggggttgctactgctgcggctaaccaaacagctcatgcttctctgaagacttgcagcaaggcttgctgaggctcacagaagatagccccaggtatgtctttttaaacacttaatatattcaaatgcttttccgtggaaaacaaaattgtgatttttcagtatttaaggcttataagtagaaaaagccaagctgtataaaaaa

SEQ ID NO: 30818 - DNA, 2300 bp, Homo sapien
cagcaacctgatgtaacatctccatgcctcagtttccttgtctattaagaaaaaggtggggaagaagtagtagacagacctactttactcatggagccattgtgagtaatcaagctaaaacacacagagtgtttagaacagtacatgcaaatcagcgtttaatgttctgaagacactggcccatcccaagatgaggcccatgactctggcaagcttccagacacaactgtccccctgggtgggccctttagctttccatttctccatactccctctactcccaagtgtcttacacagagtccaacccatttgtaccacctgccacgaggggaccacctgtagggctatccttttggccttggactttgcaactcctggcattaagaggcaagcaagcagctccagtcaaagaaattatcatgttctccccagtcatactcaataacatctatgtgaaacaccccacggggaagtcaagaagcaacaaattatcatgttctccccagtcatactcaataacatctatgtgaaacaccccacggggaagtcaagaagcacaaaagggacccggaacaattaatgggtgtttttgagactgtcagagtaaacagcatctcctgcaataaatcagggaagtcttgagagtcgcaccttagagatacggttcctgccaaatcatcaatttaatcagcaaaatgtttacatctggaggactctgcaatgtgccctggtaataaccaggctctagcggctcctcctcacatccacttgtccttaagtttatttacctaccagatctcactgcagctgaagctaacaagcctctctatgcacatcagtattcttagcccctcaatcaaagcatcagtgaggactattggggcccgctgggggtctgaagaagagtccctctggcagggagaaatggcgaacttctctaaacaagctctgtgtctcacaggtctttgccaaggatcaacagtgactagcaagtctgtgagacagaaagtaagaaaatactcttcatgagggaaataactgtttgggtatgtgtcagtcactactccatctccaatgtccagaacactgcctcctacgtagcaagtacatataaagcaactagaatagtaacgggcatgtcataagccagttataattattataactaaatgtatagctatgtttttaaggcaagctgaactttactagttgttacccataatttggcaatggaacagcctaagtaaatacacttaaaatgcaggaaccttataaagtaagcttttcagccccttgtcttctttctttctggttctgagttatacactttgaagaggactttgtagccatcttctgaaaacttccaaatctaatggcactaatagtcaatgggaaagacagtggagcactgcaggacatcaccaattatattacagagcctgaaaggaactaaaaatatgaagactttcaaaatagtaacacagcacaaacaccaaaatgttaacacacgaggagtttatctgaagtcctacttgtgatctatttatcagtaatgttcaaatatgggaaaattaatgtgggaaaaatgacaatgcaacacctcttatctagaatatgtcgacattggtgtcaaaatacttctttattctgttaattccgcatttccaggtagctccaactacccatctctgcacgttatactgtgaagctgctgacaattttctgagggtgcttcagaaagaaccatatcttacacatcagttctccacctcataccacatgttgaatttgacaatggcaaaggttagaaaagaaaacaggtttttgcctggctgtgcatcagatgatgtagggatgtggggaaaagtaggaggagaaataagaaagcaggactgtttttgcattactggaggaaaggaactagctcagaagtcagcctaacacccacagagattaaaacgtctcttccttcctctttgtttccacgtcccagtcttcaataaattctatctgacaacagcagcagagggacccactatcttgtggtttctgtcaagttcctgattttcatccgtagttgaagatgagcaagaactctgtaacagtgttaccttggagcctacaatgagaggtatttcaaaatgagtgaagcatgactctcacagatgaaggcctagacgcaggtaagaaaacagcttttccatgaaatgacttgcatgtatgtgaatggtgcatgggaacagaaaagatttctgagctgggcagcaacaaagctgaggaacactgaaccattgccactc

SEQ ID NO: 30819 - DNA, 2300 bp, Homo sapien
gaaaaagtgcatcctatcccaagcccacttcaggagaaaaagggggccacctactgtagtgaagggacatcaccttatttcctacttaacaccatcacacataaagttaaagatgcttcattatacaggaaaatttcataggcccctcacaagcccttcttcgcacttagaagggcctatgataaccctttcacagtagggccctctcttttttttaaaaggtctttattcttataacagaagcctgtcaaatatctgtcagaataagctccctactaagattttatacacatcactggaaatttggggtgataatcctcagtacttgcagcaaagttctttgcacaacatacttttatgggggccataagagatgcttctccctttgactgatgcctttagtacttaacagttagttgttctggcagtaaaatgtcaaattatgagcagtacctcatttattatttatgaatcatcatgaaaaaatggcaaaaaggtcaacacaaggacaaatctcccaaactaaagtctgcatagcataacccttctgctcaaaatacaacaaactggtttcaaaaaaaaaaaaagaagaaaagaaaagaaactggcttcaaatgctaaatcaatggggaagtataaaatagcacagagagagtcaaaactaaatgaaggattgtttgtaaatctgcaaattcttaaaagattaggccattattaagttggctaattgttattcaaacaccttccccaggactagctacttttccgtaacatacttaatccacccaaagcagaatgtaaaaaaaaaaaaaattaaaattgtaggtgtctgtttttgtatggttaggaagcagataggaaaatacaaaaaatataattttgatacccaactcttgatttttaagttaaacacccatttgtttttctgtaaaaacataaggaaaatcaactagtacgtacacattatttccttaagacacaagtaaacactaagtaatacctattatagatttattcactccaaaaaagttttcacctttgattattttcatttatcttcatccacaataacaggttttgattccatttgatgaaattttatttttttaaatgtatttaaatgttgcattcaagaaaatatcagaatctttgagattctcatctgaaagcaagaaaattatttacaaatcagaaaaagtggccgggcgcagtggctcacacatgtaatcccagcactttgggaggctgaggcgggcggatcatgaggtcaggagttcaggaccagcctggccaacatagagaaaccccgtctctactaaaaatacaaaaaattagccgggtgtagtcgtgggcacctgtaatcctacctactcaggaggctgaggcaggagaatcacttgaatccgggaggtggaggttgcagcaagctgagatcatgccactgcataccagcccgggcaacagtgtgagactccgtctcacaaaaaaaaaaaaaaaaaaaaaaaaaaaaaagtgatatgattatataaatttgtcattgttggatgcttttttaaagcaataaaataaattgttttatgttaaaggtcagcattcaaaggagtcagtgaacccagcccctgaataatttaacatattttgaatacttatcattgtgtatgtgtaaaaatatgtctattgtgtatgtgtaaaaatatgtctacagatttcattagtttcataagactacaagtttccaaagttatcaattacaacaatactctttaaataatatgtagaataatattttcaaagaattcatctgtcataaagcatattcttatttcttttaatccaaaatttaattggcaggaaggctgcaaatacatgttttctagatagcaataggaggctggaaaaaaaaaatgacctaaaaattggatctgatgagttagtaggccccaacccgagacttcatcccccactccttaagcagacttctggcagtctaagctccagccctctgtgtttccttcaggtgaatcaccatctgattcctgcaggttcaggaaatactcttccccagtcgacaaatctcacctactcttagttatgagtcatttacattagcaagagagcaagttgttccagtagtcgcctggcaggagaatttgaaagggtgccccaaaggacaatctctaaaggggtaagggagatacctaccttgtctggtaggggagatgtttcgttttcatgctttaccagaaaatccacttccctgccgaccttagtttcaaagcttattcttaattagagacaag

SEQ ID NO: 30820 - DNA, 2300 bp, Homo sapien
tttcactgtatcttctttgattcttctctcctttcgtgagacatcaccatatgtatgcacaacattccaattttctttcaatttcatttaacaagaaacctacatgatacctaccacatgacagacattattctaagcactggtgaatgttcactcattttattcttttaacaacactgtaaagcaaatactattatttatttttattgtaaagataaggcaaccatttcatagtgggcataagcagcttgcctaaggtcataagaaaagaaagaattggaaaaaggaattgagcccaggcactctggcgcctaaacattctgctgagcagcttctcagctgtgtcttcaagggcaaaaggcctccccagcaggcaatagtgctgctgtaaactaaggaaaaatcagctaatacataagaagcacaaacacatagaaatgaatgatctattggatatttactatagtcaaacactttgacatctaccacatttaagagactctatttccataactctagaaacaggcactgtaagtcagttcctctttggaaagtttcccacacttcagtgttttgaaatttgaccaagaagtgatttccagttttcagattatgaaattatcctgcacagaatttatcttgcttaaagaaaaactattccagatcttcctttagattatggatttggggctataggaaaatttacaattaattttgtaggttaaatttctctacttaagaaataaaggattttttttcctctgctgaagcaaacaaaaagatatacatttatgtttaagacatacatgtatgttctattaatgaaatcttgaatctatactcccaaggattaatttatttcagtcaaagagaaatttttcaaactgtgccgttattgggtagtctaatcaaaactattagacactgtattgcctcatattttaaaatgtccagggggatattaagtttttcttctcagaattcaaagccaagtcacccaaaactttgtgatcaactaacactagtctcgtctaactccatggtaacacttgtggcaagaaacatgaaatgaaactcaccatgaactccacatcctccgtaagatctcctaatttccgcttttcctatgcctacctggcaagtagatttctgccatggacaacaactttctctatgcaaaagcaccattacatctttcaaacttgaagagaattaaagcaaaaaaaatgcacagatattggcccaatgttgattgatgaaattcctgaagtcctctgcactcgaaatacaccaaatacaaaaaagatttctaaaaatggccctctactaagtgaaagagtataatatctctatctggatttgcaattcattcccatggcaatgggactaaaagccactaaaagtggctaacattttttagtgcctcctatatgtcaagcactattccaggcaaccaattcattcttaataacacagtgtgttagatactattttcaaacccattacacagatgaggaaattgagacacagagctgttgaatcatttatctataatctaatcccaattaattggtggaactgggattctaactccaaaaatctggatctaatagtcttcacctctcagaaaacatcatgttaactctcagagatccccaaaccagaagactaagtcaaatacctacaaaaataaacataccgtcttcctgaacacaaattactggaaaatccagtttacaaggatacagaagattattctgtctgattttaggtagtcttattctcctacttgattgtaatttgggactattttcttcatctttctactttccactatatacaagaggcactcaaaaagttcactgaacatgcagatcaagaagataaacttcaagaaagttatgaagaaatttaaagataattgcaaataagcttctttattcaagtcacagattaacagtatgaaagtttgaactaaaatagagtattagcaaatgtcccaaaggtctaaatatgaagaggttctaatgggtcacattacataagtaaaaataaggaaggaaatccactataagaaagcagaacatttgcttcacatgctcatttgtaggctgaactaatgactgccgccataagaagacagagagaactgagtatcctcccaaaggtgaatttcaatttttgttattatgagtgtgcttgcttatataaaagaatatgcttaagggaaaaaaggtgctttaaagttaatattctacaaaccatagtttatgagcataagaaattacataatttacagc

SEQ ID NO: 30821 - DNA, 2300 bp, Homo sapien
ttattaataaagtgagttaatccatgacagtgtaagaaattaaatattgacaattattatttgaagtacatacagcataaaagctctttttaaaattttgagactccaacaaataaggaaggctaagatttgtttacaatagtcatatttaaaaataacaatacaaccctttccaagagtttaatatcaaactaatccctttaagatgaccaacatttggggattattatgtgtctgaagtgactgatattaatagcttcaagttctaaatggcaacaaaattcttattccatttaaatcagtggtcctcacatttgagtgtaccaagcatcaatggaaggctcactaaaatacagatgcagggtggggcaccccagagttttttattcactcagctagattggtgcccaaaaatgtgcatttctagcaagttcccaagtgatgcagagctgctgctctgcactgtgaaaaccaatgaagatatttaacatgtaaagacatagacaaatactcaaaacgcagaagaaaaaaccaaaacgtgttcacagcaaaggcaccaacacaaatgattcccactgataacagaaggacactgcagtttgagacaccagggaggtgtgtttctgcaaagcaatatttacataaagttaaagcagcacaggtgttggagaggatgtggagaaataggaacacttttacactgttggtgggactataaactagttcaaccattgtggaagtcagtgtggtgattcctcagtgatctagaactagaaataccatttaacccagccatcccattactgggtatatacccaaaggattataagtcatgctgctataaagacacatgcacacgtatgtttattgcggcactattcataatagcaaagacttggaaccaacccaaaagtccaacaatgatagactggattaagaaaatgtggcacatatacaccatggaatactatgcagccataaaaaatgatgagttcatgtcctttgtagggacatggatgaaattagaaatcatcattctcagtaaactatcgcaagaacaaaaaaccaaacaccacatattctcactcataggtgggaactgaacaatgagaacacatggacacaggaagggaaacactacactctggggactgttgtggggtggggggatgggggagggatagctttaggagatatacctaatgctaaatgacgagttaatgggtgtagcacaccagcatggcacatgtatacatatgtaactaacctgcacattgtgcacatgtaccctaaaacttaacgtataataataataaaattaaaaaaaaaaagttaaagcagcaaaacactttgcccttcaatctcacccctaacatattttttgcccttctggtttcaaagttaaacaactgtaaataattgtgatacaaggatgccttaatttaatgttatattttcccaaaaactcaaagttaggtaaagaaacaaaaaaaaattgtttatatttaaattctattcaagaaaagcatgaacgacacagtatataataagcctggcaatggatacaatcacttctctaatgtaattttggaatctgctaatttataatagaaggaagctgtttcacctacaaaggagttaatcaaacacaggtttaaaataatgacattattaaccaagggaaaaacaaagggccagagacttaacatccctagccagcacgcattttgagttaacataattacttgttagaagaaaatacatcacccagtgttgtacacaatatatttcagataaattaaccacccaagaaagcaagcttaaaatcttctccaggaagcagacttcgaaggcttgatctcaacttggatttatcatttgcatagaaaataaccataactcgaagttataaatcatcaactctatagcaggtttcagtaaaaagccgcaagattttaaattgctttttaaaagatgacttctcagccatcctcatcccacatttcctgggaaataaaagcagaagtcctaaaagaggacagatagaaattcagtgtctgcatagctttgagtccagtgtttgaagacaatctctgattgtgaagccctctttttctctccttctatttctctctagagcactcaagactttactgacgaaaactcaggaaatcctctatcacaaagaggtttggcaactaaactaagacattaaaaggaaaataccagatgccactctgcaggttgcaataactactacttactggatacattcaaaccctccagaatcaacagttatc

SEQ ID NO: 30822 - DNA, 2300 bp, Homo sapien
gtgtgaggagtagaactcttgtcttggtagcctttaactacttagaatcacagtgctggccgggcgcggtggctcacgcctgtaatcccagcactttgggaggccgaggcgggcggatcacgaggtcaggagatcgagaccatcccggctaacacggtgaaaccccgtctctactaaaaatacaaaaaattagccgggcgtagtggcgggcgcctgtagtcccagctacttgggaggctgaggcaggagaatggcgtgaacccgggaggcggagcttgcagtgagccgagatcccgccactgcactccagcctgggcgacagagcgagactccgtctcaaaaaaaaaaaaaaaaaaaaaaaagaatcacagtgctagaaatgacattatcaatcatatatccaacttttcctttttgtttttagatttgtctttgtaaacataaaatattaaagtatttaaaagcaggattgaagctagctttggattttattgttagaacagttaagaagagtacccctagaataagcaatgcttattttttttaattggaattttcttcaaacctctttatgctaatttgataaacatgtcacttcttcattaatgtggaatgatttaattttttgccactattaaaaaaggaatcatgtaatttcttttttaaaaaatatattaaactgtgtcagaaaagtaacaagatgagtctccaaagaagatgccaagcaagtgtttgattaagtcaaagtgagcccaggagatctccccaccttcattgtggatatcattgtaatttaaaagttgtttagtgagaaatgtttataaaggcactttttatgatagctaaaatctggaaactactcactagaatggttaagtaaatggtggtacagtaacacattggaatactgtaaataagtgagaattattagtttttagaacacattaaaattacctcagcaacatgaatcaatcttaaaagcatactgttgattgcaagatgccagatgtggaaagcatatactatatgatttcctttatatataaagttccagtgtaggcaatagcaatctaagttgttaggtgtcaggattttgatctcctagggagggagacatgcctagagaggcctgagggagtttctgagattccattctgttactttgcattcaagtcttattgtgtatttattttattgaaattcatagaatttgtgcacttttctgtatgtatgctatactttaaaaaaaagtatccattaaaaatgtcgagagcttctattaaatggaaaataatggatctgctttatgtttatgtagttggggacgaaggacaaaaagccaggaagaacaaacaggagacatttccaacactggagactgtgttcactaaactccagctcctttcatattttgatcaacatcaagtgacatctcaggtagctatttaaagctgtttattatgcatttgcagtattctaatttacttaaaaatttttttcatgcagtatattttctcaaccttaatggttttagacatatattttataaacatacttggaagtatctcagactattgagtagttcttttaagtgtcaggttgccttcctcgaaggattaatttttattatgtactttttttgtccttatgataataatcggtgacatataaagtaatagctaatgaaatagttaggttattagagtttggtcctatattgcaattgatgagaaatctgttgatgattgaaataaaatactacgacattgagaagaaaacacatctgttttgctttacaaatccattgatattcaaatggttgtgtctaaaaattaatatttgtagttgttctaccattagaatacttaagatttaggtctgaatgacaactttttgtattttttaaaattgtagttatgaagaaatcattttctttgtacatagttttatagtttctatagaaacacgttttgactttcgtcaaagtagaatcatgtatagattcaactgtcttaaaaagtaaaaatgatttatcttagtaaaagattatttagaatattggtcttacaatatttttgtttttatttgcacagatttctaacaatgtgctagaacaaatcacaagctttgcgtcaggaacatcctatcatctccctttggctcaccacattcagctcatctttgatctcatggagccagcactgaacatcaacggactaattgacttcgcaatacaggtgtcaaagagaccatgtttctcttacttttaggaaagcaaatccaccaggcattgtgcaatt

SEQ ID NO: 30823 - DNA, 2300 bp, Homo sapien
cacacctgtaatctcagcaatttgggaggctgaggcaggtggatcacgaggtcaggagttcaagaccagcctggccaagatggtgaaactccgtctccactaaaaatacaaaaattagccaggcatgatggcaggcacctgtaatctcagctactcaggaggctgaggcagagaattgcttgaacccgggaggtggaggttgcagtgagccgagatcacgccactgcactccagcctgggtgacagagcaagactctgtcttgaaaaaaaaaaaaaaacaaagacaaaaacaaaaaaaaattagctgggcctggtggtgcatgtctgtaatcccaggtactcaggaggctgagacaggagaatcgtttgaacccgagagacagaggttgcagtgagcaaagatcgcactactgcactccagcctgggcgacagagcgagattccatctcaaaaaatataaataaacaaagtaaaacaaaataaaaccaaggttcaattgccacctgtaaattgactgtttcctaatatttgtcttgagatgagaactttttccttggtgtaaaaaccacacatccaaatggattccagatgtcttactaccaggaagtccgctgacactgcaaactcaaacttgaccatgactttagctttttttctttacacaaactggtattagattctcaggctactctaaattccctggtaaatctgattctttcatgtcttcatataaactctccctttatttgtaccacaattttccctacctcccagctaactcttaatccttcaaaatgactcgtgtcaattttcctggggaccctctattctatcccctaatactctctctgtaccatgtcacacaaatctcattacactgtaattgtctgtctacttcccccttgagggtaggaactctgtctttcatcttggtgattgtggaatgtcggtggttgcttactgttcattaaaagagtaactgaccaattttctcatattttagagaaccatctttaatatcttatataaaacaaatgtccattaaatactgcttgataggaatagagaatatcctaacaattaaaataatttttatttgaaatagcttactacaggaaggtttttttttttttttccccccccagagacagggtctcactttgttgcccaggctagggtgtagtggctattcacaggcatgagcctagcacattgcagccttaaactcctggcttcaagcaatcctcctgcctcagcctcccaagtagctggaactaaagacatgtgccaccatgctcagcttacaagaaatttttcattgataaatatattctgcttctaaatctgaagtataatcagaacttatttatgcaattttttttttacactaagcttttacttagttttctcttggtaggtttccaaaaatttacttaaattcagggaaacattttaagtcctttaaacatataaaacgtagatcttcaaagatatgacctctttatatgataatgccaatgactaagtacacttagaagacaagcatatgccttaaaaacatcaacagcaaaattaatatattttatatatcctatggtaagacaaaaaaaagtatttcatcttttgtaaataaatttatatataagaaaaaacattcactcttgcctgttttttatctatagagtcaaatccagcaattttgtttccttttgtgtcaatcaaggaacccataggttcacaagtgatgacatcacatgtctgtttcggcaaaggtagtaactgtcgaactttgtcaatactttctgatcgcttgtctcctagctctttctaaagaaaaaagagagagagagagagtgagaagtgggacagaaattacaatgaaggcaaaagttaaccagaaggaagttcccctatgaaacatttccctttttatagcttagcgcatgttctttaaccctgaacatgttctacaaggcagttccaaatagagcaatgagtgtttcatttcttctatttaagtagaaaatagaacacatacaaaggcactgttgttacacaacaaacatcatagtgctgaaatgacaaaaatccagggtagtgatcacaatcagaagacaggagctgcagaacagaacactttctcatgtccagggtcagattacaaggtaaccattgatttatttgattggtaatgcatcagatttatttggtttcttttttgcactgttttcttacaatttttttttaaaggagtctgttagtggtcggtcaaatgaatcgatttataaatttcaatgcag

SEQ ID NO: 30824 - DNA, 2300 bp, Homo sapien
cctgtacctgcagctggtactgagagcagtgacaagagggtagcatccatctgtgcaatagttttgtgtctgtaattttggttcaatttatttttctccttaggcaaccagccacagcaaggagtgactccgtatgggcatccttcacacttctgaatctgcaagaggagaagacatgacgttttatgtttgcactgaaaaacagaaaatcaaatttaatgcattagtcatcttaaaaatgtccctttttttcatttctttgacattttactatattttatgctacatctcacaaaaaaaaaaaaaggtgtttaaacaaaaagccaaggagaagttgtggtttgattttgttgaattcacctttaaagtaggtttacaaatgtgaatcatgcaggcaggcctactcccggaagagtgtgctagcagaccttttgaaattggtgctttttttgaatctcacatttctagaaagaatggattatgatggatctaaggtatttatgtatttcattcattaatgatgacgttgtttttttttttttaattttattttccaaactgtgctggaccaaactactgatttgaaaggcatgtcagatcttgacagaaacatggcctgtttattctgcattcacctgtgatggtgaaacggacatttatttgcatcgctctaatttgaaatgtttgtaatctcataagcactttataaactttgttcttatttatgtaggactcttctttgcttttgttgtggtcaaaaggtgctgaaacagattgttgcttcgtacttaaacttcttaaaccaagaacctaaaccaaggtttctttgagagccgccctaagatgtgcggaaacctgttagaagtagctgtactcaaatttgttttgaggcaagatcattgatgagagtcattgtgaaggtacaacatgtaaatcctaaaggcctgaaagaactgcagtggaatcgtccaactatttattgccagttttggttctcctgaaccttatgccaccttaaggggaaaaaaaaatccagtagctggcttgagattccagtgctcacacttgacatggtttccagagaatctggccccaaagtccagaaggctctggttttcataaaaggtgtatttgctgtttattttgtatggtaagtatttgctcttttgaatttaattattactgtcagtgtcagtcttggttgtgtattgcatatactgtatttataaattggtgcaaaaagcacaagtaaattatacatcaaatttattataaagaaatagtaactattttaactttgttcaagtatgtggtaatttgctcctattagagtaaaaaagaaaccagtaaattatcagtttgtgtaacttaagagtattctatataatatttttttagatttagatgcataaaattttgaatgtgaaaattgcagggcattttaaaacatatgtgggggatattttcccatgttctctgttatttcattttcttttgccatatgattttacatataatatagtcaagcatactgtgaatagacttgtctataatgagcagaccatgtaaatctactttttttaaaatgtagctagtacaactttagtagacattttcttttgcaaatcattatctataaataatttatatcttcctgggtgagttactcattgcaaagtttgactcatgcaaatgacctcaaatacatgtcagcttactttgctgtggcaacatccatgtgaactgctttgtacactgtgaaaatatttcactccagcctgcccattttgtgtttactctgggctggaaaagactttgccaaaacattaaaaactattcttttcactaaattaatagtctatctgctttcagaagatgtatcatctatctgtacacatttttgctggttttgtatatcagattttttcctctcaagaaacatacttagataagctaatgaagttgttttcttcaaagtaatatatctatataatgactgcattggcaaatcaaccgaaatgtgaatgttgtgcctagtgagtgagtcatgttccatcattatttctttccaaatttctttgccagttcagtttgaaccatatattttgtagctcagcattgcaaacaacagtaatactgttttaagaatgagtgttataattgcatagcatttgtatgcactttatactttgcagaggtgagttaaattattaatcattttgcacatgaaagctgtggggcatatcttttttctttttttaggtgaggaagttatgctacgactctaattaattccacga

SEQ ID NO: 30825 - DNA, 2300 bp, Homo sapien
tacacatagactttggacataaaggaaactctctcaaaaaaaactaatcttttgagatcatttgaatacaaaaaccattcttttcacatgcttaactcaaagggtcaacttcttagggtttttatattttaggcagaattaaaaaatctcatttatctccatacttggcacagttttaaaatagtaactgtaggacaggcacggtggctcacgcctgtaatcctagcactttgggaggccgagacagatggatcacctgaggtcaggagttcaggaccagctcggccaacatggtgaaaccctatctctactaaaagtacaaaaaaaaaaaaattagccgggcatggtggccgggcgcctgtaatcccagctgcttgggaggttgaggcaggagaattgcttgaacctggaaggcagaggttgcagtgaaccgagattgcaccactgcactccagcctaggcaacagagtgagactttgtctcaaaaaaaaaaaaaaaaatagtaattgtataaatatattcacactctctgtaaacaaaacagagaagggaatttttatgatgcagtggagattctagagagagacactccgttattttactcgtctgagtcccctattcgacattttaaacttcattataatcagtacttaattttttctttcctaaaattacaaagcactttgtgaaagtcacaatattaagacctccaccaagtgaaacatattcagggcccccgcattctgatgtgatgagacacatatatacaaatacacactttctctggtctgttataggcatatgaatatatatattttttgagacggagtctcgcactgtcgcccaggctggagtgcagtggcaggatctctgctcactgcaagctccgcctcccaggttcacgccattctcctacctcagcctcctgagtagctgggaccacaggcacccgccaccacatccgactaattttttgtatttttagtagagacggagtttcaccatgttagccaggatggtcttgatctcctgacctcgtgatctgcccgccttagcctcccaaagtgctgggattacaggcatgagccaccgtgcctggcctcaatattcattttatagctggctttctatataaattatatcttcaaaaatcaataattatagcttatgaggtttttttttgcaagtggcatgactttacacaatggttttccattacaggacaaaaaatgaggatgagaatttccatcttatatatctgtttattcattaatagaaaacatccatgcaaaaaaattacacatagtaaatgtgaatttgtactcatgcttaggagttgaagattttcttctaatgacacgagttgatactgaatacagctaataaatttaacttgtgatctttagttcaaaagtaaatgttaattctcaagtttttcaaatgtcatcaaaaatcacctaaattaaattgaaatttgtttagatttagaatttttaaatgctgagttatgaaatgtgagttttgtgctttggagaggctgaagatgcctctgcattaatctttattaagaattctgtcttccactctgggaaaccttctattttcaaaagtaaattatctctctcaaaaatattagtttataaaaagaaacatcaatagttctgtctgttatatgtcacaatctccagttgcatcagatcttgggtgcaggggatatcactctaagccagtttttctccaagggaagaccccctaccagtagcattagcattgtctgggaatttgttgaatcaggagctctgattttgttttaataagcaatctgttcttaaaagccctccaggtgattttgttgctaaaatttgacacttgtgttcaaacttaattatttatgttagctgggaagttttttaaagagtgggtttctacatccttggcgagacctattgaagcagaatttcaggaaaccaaagccggggaatatgcatcttaaactcgacccatgtaattctaatgcagctgatgagggatcttcattgagaacccagttagaacagtggttctttgctgcacatggaaacctttaatccggaaaattctaagaatcctgatgcccaagccatgctgcacacatattaagtcaaattctggaggtgagactcagacatcattattattttaaactccacaagtgttttaatgtttagccaagtttaagaaccaatacttttagaaagcattaggaaagaatgccagtatagcatggtggaaagcgtaaggcttgagaaccagccctgtga

SEQ ID NO: 30826 - DNA, 2300 bp, Homo sapien
gtcatcaagagacaagaaagttctaaacaatggcacattaagaatattacaggtcaccccgaaagaccaaggttattatcgctgtgtggcagccaacccatcaggggttgattttttgattttccaagtttcagtcaagatgaaaggacaaaggcccttggagcatgatggagaaacagagggatctggacttgatgagtccaatcctattgctcatcttaaggagccaccaggtgcacaactccgtacatctgctctgatggaggctgaggttggaaaacacacctcaagcacaagtaagaggcacaactatcgggaattaacactccagcgacgtggagattcaacacatcgacgttttagggagaataggaggcatttccctccctctgctaggagaattgacccacaacattgggcggcactgttggagaaagctaaaaagaatgctatgccagacaagcgagaaaataccacagtgagcccacccccagtggtcacccaactcccaaacatacctggtgaagaagacgattcctcaggcatgctcgctctacatgaggaatttatggtcccggccactaaagctttgaaccttccagcaaggacagtgactgctgactccagaacaatatctgatagtcctatgacaaacataaattatggcacagaattctctcctgttgtgaattcacaaatactaccacctgaagaacccacagatttcaaactgtctactgctattaaaactacagccatgtcaaagaatataaacccaaccatgtcaagccaaatacaaggcacaaccaatcaacattcatccactgtctttccactgctacttggagcaactgaatttcaggactctgaccagatgggaagaggaagagagcatttccaaagtagacccccaataacagtaaggactatgatcaaagatgtcaatgtcaaaatgcttagtagcaccaccaacaaactattattagagtcagtaaataccacaaatagtcatcagacatctgtaagagaagtgagtgaacccaggcacaatcacttctattctcacactactcaaatacttagcacctccacgttcccttcagatccacacacagctgctcattctcagtttccgatccctagaaatagtacagttaacatcccgctgttcagacgctttgggaggcagaggaaaattggcggaagggggcggattatcagcccatatagaactccagttctgcgacggcatagatacagcattttcaggtcaacaaccagaggttcttctgaaaaaagcactactgcattctcagccacagtgctcaatgtgacatgtctgtcctgtcttcccagggagaggctcaccactgccacagcagcattgtcttttccaagtgctgctcccatcaccttccccaaagctgacattgctagagtcccatcagaagagtctacaactctagtccagaatccactattactacttgagaacaaacccagtgtagagaaaacaacacccacaataaaatatttcaggactgaaatttcccaagtgactccaactggtgcagtcatgacatatgctccaacatccatacccatggaaaaaactcacaaagtaaacgccagttacccacgtgtgtctagcaccaatgaagctaaaagagattcagtgattacatcgtcactttcaggtgctatcaccaagccaccaatgactattatagccattacaaggttttcaagaaggaaaattccctggcaacagaactttgtaaataaccataacccaaaaggcagattaaggaatcaacataaagttagtttacaaaaaagcacagctgtgatgcttcctaaaacatctcctgctttacccagagacaaagtctcccctttccatttcaccacactttcaacaagtgtgatgcaaattccatctaataccttgactaccgctcaccacactacgaccaaaacacacaatcctggaagtcttccaacaaagaaggagcttcccttcccaccccttaaccctatgcttcctagtattataagcaaagactcaagtacaaaaagcatcatatcaacgcaaacagcaataccagcaacaactcctaccttccctgcatctgtcatcacttatgaaacccaaacagagagatctagagcacaaacaatacaaagagaacaggagcctcaaaagaagaacaggactgacccaaacatctctccagaccagagttctggcttcactacacccactgctatgacacctcctgttctaaccacagccgaaa

SEQ ID NO: 30827 - DNA, 2300 bp, Homo sapien
gacgcacccggagaaggtgggggcatgaaagcacacgacaattcttcggtgactggtgccaggcaaaaaaaaaaaacacacactgaggaaagacaatcaatagatggagacatctgtgacagatttgtccaaaaaagacaatttgaggagaagctcttgggactttggagcaaaatggagtgattagtagtagttaatattcaagtgataactttaaggagtattaagtacactactgagggaggagaaaggaaatttaaaaacctccacttagccttttgtttctgcaacagcaagcatcataataaaagaacgcttctgggttaatgtggttatgagttatagaactttgaagctgtggaagcggctccaggtctccctgaagagcattactcctggctgtaagccaaaaagaataaggctttttgctcactttggagcagagaacttttcctccctcaggtttggacacaattttccatttcctgggaagattttctgtctctgcctatgtcacaagaggactcaggacctgaaagaagagctcaggtattgccaattcctatttcattatgtacattttcagccttacgtttgtgagaatcccttattcatgtgttgtcttatgctattgatcctcttttaaataatttgaacgtgggcatacccagaacttttatttaagctgaacgagagaattaccttcatcctgctgttccttcctttgtttatctaatgataaggtggaaatgctgtctccaatcatacaaagcttatttaaaattattgtaaccaggtggttacgatggcaaaagtggtcatatgattaatcctatcttaaattttaatttggactaaattataataatacatccatcatctttttatctgtatgaaaatccaagcagttcagccccagtgttatttctcagtgtagtttgtagctaaagggtggttgctggtggaatccaacatcatgctgttccacagaacggtgggatttattacaaattatgaaggtcattttgcttggaaaagcacaataaagagtttatttcaatcctgcatttcaggagagaattaggtttgaattcctgggcttgccccacatatgggtaacagataccatttttttttttctgacaagctgagcatatttcttccctggttatgctccccacctcctgtggcagccatgagctggaggagggaccaaggaaaaaggcagagagatgtccgaagctgagcaaaagcagacagcatcatgcctgcacagggtcagcatggctcaagccctctcagctggtcagtcgctgttgcttatggtcattacttggcagtgaagtgttcaatgtgtctttttttttggcagggacttgaaaaccggttagaaagagatttattctcccttccagtggattattacaacctttaaaaaatgtttctgaagaaggtttaataaaatgaaaaaacattatatatgaaatgataaaatgtgttacaaaattgagtttgatcacatgtacacatatacacgtaaatgtatgtacacctatacatatacacacaatagatgaaaaaggctggaaaggaatacaacaacatgtttaaggattatataagtggtgagattgagtaatttttttcctttttactgcttaattacagtttccaaatgttttattatgcacagatattactgttataatcagtttcttgaaagttactctaaaagaattaatgtatataaaggaaactaaattctatatattttagttgtcacaatctttcttatggtttccagtttcccttttaatgaatgcctgagtaatagggattgctggttttcataaagaagtgagaagctgtgaagaaattttcacaacagtaaatatcccacttgatcataaagcgcagtgtgaggccagcagcacacactatagttttgtaaagagtgcatatgaccacaaagggtaggaatggaattgaccacttacgacccttaaagaaggtctcccagattcccagagtgagtgtgtggtggtcctgggactttgctccaccactctttataactctgaggtatgatgttttttcaggatgaaggtaaaaggcagaggaatcacctgcttgctggtctcctttgctgtgatctgcctggtcgccacccctgggggcaaggcctgtcctcgccgctgtgcctgttatatgcctacggaggtacactgcacatttcggtacctgacttccatcccagacagcatcccgcccaatgtggaacgcatcaatttagggtgtgt

SEQ ID NO: 30828 - DNA, 2300 bp, Homo sapien
gttctctgccaccctaggctaaattattcatgtgaattagtcctaaagatttaccactgaaacacatgaacaaagtcactatatgtattagtcagggttctctaaaggaatagaaccaacaggagatagatagatagatagatagatagatagacacatccacacacacacaaacacgggtatatctatatacctatatatagatatcgatcatacattatatttatatatccatatctatatatacatctatatatctatatacatctatatatctatatctatatatctattatctattgtattatatataacatatggatagatacatatatttatatatagttataatatataaatttctatatataattatatatacatatataatatataaagatatataaatttatatgttatatacacacatatttatatatatttataatatataaatttatatataatttattatatatacatatataatatataactatacaatatataaatttatatattgtatagttataatatataaatgtgtgtctctatccatatattagcatgtatatatgcatatgtgtgtgtgtgtgtgtgtgtgtatatatatataaaaaagtgtaaattggcccatgcaattatctaggcaaagaagtcccacagtatgctgtatataaggtggagaaccagaaccaggaaagttaatgttctataaaaccagtctgagtctgaagacctgagaactgggagcagggaggtggtgtctggtgtgagtttcagagtctaagggcataggaactaggagctctgatatccaagggcaggagaagatggatgtctgttgtggtttgttaagtgaagaagaatttaagttaggtttggtgtagtcaggtacagcacaattagactacaattacttgcagattccagaaagaggagtgtaaaatgccttgcagagccaatggaaagggtgaggcagtcaaggacactgtctctcacccagcagatgaaaagcaagtgagagatggagggacctatgggtagaaccctttattggggttcaggattacctagatgggttttccacaacagagttggattggttaatttgaaggaagcatgagtttaagtgtgagaacttgggttacatgattgtgttcaccagacttaaagcaaaaataaggcagcaaatgggaccacatctatgttgaaacagaaactgggtggagactgtctcaaaatatgtaggacatttgtgacaagctggggacggaccaagaaggtggtgctgaggcagcactaatatgaattagcgttacaacaatgtcccagcccaagaagagagtgaatttacctttccttcacatttttgttctgttcagtccatcaatggattggattctgcccacccacactggggaaggtgattttcttcattcactctaccagttcaaatgctgattttttccagaaacactctcaaagacatacctagaaatacttttttacaagctatttactgttcacaagcatcccttagctcagtcaaattgacacataaagttcatcatcatactatgtaatcctctaagaaaacagataattgcactgagcttccaggcttagtctatggaaaaattctagtttgatgcttaatagaactcggacaagttgcctcattccttgttttttaatccaaaacttgtttcaccacaagaaagttttgttaacatgtttaataatccatgataatggcattagcctggattttgacttaatatcagcaagctaaaaaaaaaaaacctgttcttaaaatatgttgcaaccaccacccaatcacaaaaatttacttcatgacttattcagtgctgtcatttaggttcatttaggtttcatttaggtttaagtctcaataataaagttgttttgggctgatgatggtatcacagggtgaagaaacactgtaagagtattacattgcatgataataatgcatgcacgccctcatgaattatgagatctgttccagtctgtgtgcttgcaaaacaagttactactgacactgtaacatttgaattgaaaattagcttcatgttgttaagatgatcatatcacctgagagagttcccaagtctacaattgctctactagttactattcagtgtttgtgaaaaattttaatctcagtactgtgaagaagctggaaaaagggatattatggggctaaaagctctctgtttggggctgctttgtgttctttttgtctctcatttttacacacccatgccagacaacat

SEQ ID NO: 30829 - DNA, 2300 bp, Homo sapien
attagcttagaagttagttccttagaaaggaaccatgattttgtatattttctattaataacttcctcttctgttgttcttatgaaatattccattttattcccacaatttaatccacttctttccccatttcctgcttaatttagattcttagtttcttctcagtgtggggttcttccctggaagaacctttggttgattagtgttgagggacagtagggcccagcctgttccaaccccttcaggtcacactgcagatagcttacacagcataagactatgcaaaccccagccagtttcaactgttttctcagatttgtaaccacaatttcaggtgaatatttgttggttaattcttattctgtcaaatacttcatcgctttcctctgcttccacctgcacatagggaagattataccacacaggccttgtagttgttggtaaattatttccaacatagatacttggaagttggtttgttgttatatttttgcctcatatttttcttcatattatgttgtccataggtttttggttttgttttatttctctgtgagttcttctaaggagatttggggattttcaaaagctgagaacctgtgtagaagattttaactcattttttcagtaaccgatagaaaaacacaaaaattaagtaaaaaaaaaaaagtttcaataacacagttaatactactgacttaatttacacaaattgaacccataccaaataatgtcataatacacattcttttaaagtaaagtacacattaaacttttttttttttaattcttggccataaagcaattatcctcaaatttaaaaagatagaaatgcagaggttaataacaacttcagacttaggttgggagttacagcattggttctcaggcctcagactcaggctgaattacattatcggctttcctggttctccagcttgaagatgacagatagtggaactactacacctctccaatcacaagagccaatttccacaatatgtttcctgttttatacatacatatatctgcatctacattcagtcgtacacccatagcaatgttttggtcagtgaaagactgcacatattgatggtggtctcaaaggattgtaatattgtatttttattatacagtttctaggtttagatgttgatatggtttggctctgtgtccccactgaaatctcatattaaaggagggtcctggtgggaagtgattgtatcatgaggcagacttaccccatgctgttcttgtgatagagttctcatgagatcttgttgtctgaaagtgtgtagcacctctcccttcacttgctctctctcctgctccaccatgtgaagttgtgccggtttccccttccaccatgattgtaagttttaaaatattctgtttgggccaggtgcggtggctcacacctgtaatcccaggagttttagaggcctaggcgcatggatcacctgaggtcaggagttcgagaccagcctggccaacatggtgaaaccccatctctattagaaatacaaaaattagccaggcgtggtggtgtgcacctgtaatctcagctacttgagaggctgaggcaggagaattgcttgaacccttgaggcggaggtagcagtgagtggagatcgtgccactgcactccagcctgggcgacagagtgagattctcatctcaaaaaaacaaaacaaaacataacaacaacgaaaaaattctgtttgttcttccttactcgaaggtttgttatttgagacatacactgcgtttcttgcactgtcacatggcctttttaaaaataaggtattcagctcttagtaattgtgcattaaatgtttgtttactaactgcctagcaacgtaataaggctgttggatttgacagaacttgcagaaaataagtgctgattgtttctcagagctcgcctttgtatttctgctaagtatatttatttagggtctgcccatgaaatgaaaactgaacagtggaatttgtactcaggaagttatgtaacactttatggcagggcttaaaacaatgaaaattcagccactgcatgtttcaaacaagtatttgctgtgttgccaaagtagaaagagcagaagggaaacatcatgggaagaaagactattttgtttctgattgcaggggtccttggggcatattatgtttatactcctctctcagataatattgaggaactctggtgactggtgtggatagctacacctgtgaaaatggtaacaaatttggtaagttcagaatttcattgtctctgtgaatatttaagtttaatcagg

SEQ ID NO: 30830 - DNA, 2300 bp, Homo sapien
ccataccagccccagtcatctggaaaagtccaaagggcaaatggaattctcaaaactcagttaaccaaactcacacttgaggttaaaaaaccttagacctccattttacccatagcactggctcatatcagagccagtccaaaggccccctccttcctcagtccattcgacttaatgtatggatgccctttcctcttacaaaacagaccccctcctgagtatcaattagaatacctcccaacactctccctcatccatcatctcctctgcgaacaagctgaccaggcccccacaaaaccccaccaaggcaccactgaccaaacactccttccaggagaatatgtcttcctaaaaatcaacaagtctcatgccaaagtgcgaaatccctttccaagtccttctcgctacctccactgcagccaaactttgagaacacaagtcttggtaccatctttccaggttaaaaagagcacctgcagctgacccatcaccaactaaccaaccagctgttccctgcaaatactccagcactcttctcagaccaattcgactccgcctaacgcccatgcctgaagaccccactcttccctcatgaaccatagcagataagttatcaccccttaccattaagtatccaaacccttattaatggaaatcatccattacgctgcccttgcaggaatcaccctacttactctactctttgccataggaatatatactgtcttgcctcctgggtggaatttcagacaaaaaaaactcaatattcgtaacctcttgcctcataatcctcctcatagcaggtataatagccaccaccaacagatagtggcccctcctaaatgtcctgtctttgcccatcctggcatttcacactcttccttcactgcatcacagaaaacctttcatggtcctacccagaacatcccaccctcacagcattccttgattggatcaccaatcttatatttcaaggggatttacaggaattcactccagatgaagccgaattctttacctttacacttgctctctgtctatttactccttcttccctcctccttctcgctaccgctccacctacagcgcaccattccacaggcacatatgatactcagtcaaactaacccctccctggccaaggcctgctggtacacccctcagaaaccgtatcaaaagatgtcttcccagctcccctcaaagactgggttctcagcaatatgaccctccacccccgctaccaaagttttggagaagtaaatgcactcaaaagttacaaactcaatcttaccacacatactgcagaacacaaggttatcttaggaacacttaccccagactcagaactcagtcaaccagcatccctatgcataaagcgtgaactttccaaaggagtgcccctaggcaccctctcctctagcttatgcaactgtaccctaacactcactcccccgacaggcatccaaacaataacagaaaaaaaccccacacaaactctcaaaatctccaacccccgtcagacccaagtcacgggagaaacatcaggattctgcaataactgacacaggccctgcatagaaatcgcagggtggaacacttgcctaaaccccgtccccacttcccaatgcatggaaatcccactgcctaacacaccctcaaacaaactacttattgacacaaaacgcttcttatggactcagcctgggtgacagaggaagattctgtatcaaaaaatatatatatatacacacacacatatatatgtatatatatgtgtgtgtgtatatatataatttgttttttccatgataagctattttaaaacaaagattctgaattctgtatgttttctatggataattttgttagagttaaagaatttgttcccgagttattactcaatacatgctgtttattggaatacagataacagcatgatcattgacaaactttgccctagtttcctattactcattaaaccttgaagttgcacttaacatgactgtatctggataacagataaaattttggccttattatgccaacccttaaactaagtgagcaactctgttttcaaagcttttgggtggagctgaagcacactgcttattaaagtacactattcaggcatatcatgtaggtttactttctgtgtttctagagaccaagaagcgggacgttcaccatgggaagaaaatcgctgtaccttctgattgtggggatcctcatagcatattatatttatacgcctctcccagataacgttgaggagccatggagaatgatgtggataaacgcac

SEQ ID NO: 30831 - DNA, 2300 bp, Homo sapien
cagtagagcattaactcaactgtgtgatcttttttgagtgtgaagcactgtgagactacacagtagcataccatgaaacccaccctgctcacagggtcataattctgaatccagccttgttcccgtgcagctatcattttgcagacctgcataaagctttgtagcagaaatactcgtgaccttttagtaagtctttcccagtaacactctagtatctcaactgagagcattcggaggaaacaggaagtaggacttgggagggaaacaaggctaccaggctacagtctagatgacgtgttctatgaaaaaggagaagcatagaccaatttttgtcttagcagccagagtgagatggtagtcaggaagtgggacgaagaaagaggaagctctcgggaactcccaccaccccacaaagggggaattactcttttcttccatcagaatggtggcagaaacctgtgaaatacatccatttgtctttgtttcttggaaggggttcatgttaatttatgtctaaaattaacaagcctggcattggttattcaaatgctttttgcccttttaaaaatatagacaaaaataatgttttaacctttcttccttctaaaagtagaaaagaattgcattactgaaaaatacctgttattaattcttagactttgttgtgcacaagggtattgtcattcaattctgtaggcagtcaagaatcagagtcggtgcttttagaatccaagtacataggcttaagctctggtccctcccgttattgattctgcaatcttgagaaagttaattgacctctctgaaccttagctttttaatctgcaaaatgagaaaaatcttaaataataacaacctcagaggattactatatgcatttgatgcataaaggtacttagtgtaatacctgcctgccacatcacaagaactcaacaaattatagatatttttatttcatgtaaatgcacatgtttgtatacataaatattcatacatgtataaatatattttacacatgtatataaagtgtgtaatatagacacatatgtatgtatatatgtatgtgtatatatacatacatatattttgagttcctgagtttttaagctgtcagatattggtgaggagaaatgcttagttaggaggatgcctgtaacagagcttctttttgggcttctgcctgtcattgctaactcaatattcaacttacatagcatttaaattgaattactgctgcctgcacaattatgggctttcttagtataatccctatgcttcacatcaagaagactgagtgtttacttgaatctaaacctaatataatgcttggaaaaagccaggtgtgcttcctgtctgaaatggtggtaatgtacttccagatgtttttcagagcattgattgggatatataaattgccatctattaaggttattttacttagcatctctctccctaatccctagctatctgatgtatcttttatgtgtttcttgattttaagcacagaaaataaaatggaaaataacttgaagctctagtatctttttgctagtacaccaacatagcatatatccaggtttccctttaaaatttcagttttatagttccctcaaagttattgaaaacagaggtttcgttattatattctcaatacagaattcactaagaaaattaattttaaaaaagaagaaaagcagaggcaactgtattcccaatataagcagtatttaccacttcttattgtgtaaatatgcaaataaaatgaaaataaggaatgcttctctgttgctttggtagtggataaaataagttcaacagtgtttttctaaaaatctatttggtaaatgtgtttcctgtgaaatgagttacttgttttttgtcattcaattgcaaaactgcatgtgaaaataaaataaatgtgaatgtgaaaataaaagcctcacaaaaattcctctgcatgaacatctctgactgggaggtttgactgaataaattattcctgggcttttgaattattaatcttggctgcaggatatgcaaataggatatgcaaataggacactgtaataaccatgtccagtggcacaacactgggtcagaagctatatccagctgctggcagagttcctgtcaagggatcaagtcttccaacagaatggtaagctacatggcaaattgtgcctctcagtgtataaagtaaggccagatttccttctaaaggtgacctgtgagcaattaaggttttcagtattaagtgtttaaattaattctttataaatagatgtaaaacagcaaaataa

SEQ ID NO: 30832 - DNA, 2300 bp, Homo sapien
ataatgattttttagtaatttccatagtttgaaatgtggttaggatgctactggcagttgaaagctgacaacatgattgaatagttttaacatgatctggtgtttgttacagtgctttaaaattttaaatattatcattcatgttataatgttatccagtgatagtcaattaggccaaatcagtggtaatttagtgttatatcacaatttatttggactcgagttatagattgaccattgctttgtgagttttcttagccattctgtttttctgtatctaatgtaaaataacattttttctccttttttatttaccaggatggttattctactgtttctaacattaaaggatcatccttgtatttctttgtattctgtcatggagtaaaaaacatgtctcatctcagtttccatttctcttttgctcccagaagtcccccctcctccagtgttgaagtagaaatataatttccccttttgcaccataagcaggttcaaaagtcctgtgtttcaccatgttgctccaaacagcaaattttctaacccacatgaaaaaagaacactacagttctaacttggaattctacaagggtttgagaacaattgaaaataaatttctaccactaggattagtccttagtggttcgcaggcattctaagcagaggggcatggaagctagctagggcaccaacctgctagcagatgcaaagtttgctctactaagaagttaggcctttaatatcacagacaatgggaggcaaaatgaagacataaaaaggcaagtagcaagcaattcagtaggctaagccagggatttgagagtctcccaaggctcctcccttcctcattccctgcatgagtcatttttccagtctgtccacacccattcacccctccatcccacactctcattcaccctccaagctgccgtcacaggaactttctgcaatacaagtccagactccatctctggcccttgctgcctaaactttcctagttcattagttttggcagtaaagttgagactcgttagatcaacacagacctacttttagtgtcatctcctgccactctcctgtactaccctaccctcgcttctcacagaaaggctgagaaggctggcagaccccttgtatataccctgctcctttcgttttctttgagacagggtcttttaatgtcacccaggctggtctcaaactcctggcctcaatcctccctccatggcctcccaaagtgctgggattacaggtgtgagccatgccatccagcctgccctgctcttttctcttctccacctggactctactcccttttgatcttgccaacttctacacacctttcaaggcaccagttaaatgtaaatcctccaggaacccttcctttgccatcctcagagccctcattggattgcttcccacatacagcacttatcccttatgcagaattaatcggtttgtctctcacctactagaggcgttatccttgagtgtagggactgtcttatccattcttgcatcactggcatagtaggcactaaatgtagttgctgaatgcttaataagaggaatggaagtcttcgtagcttggggtagatactaatgggcagatagaaagttcccatccctgttctctgagaaagtgtcagtgttcttttagtttgcttaaactgtgtgggtacttgagtccttttaaacgattaacgctgggaagaggcaccatttaattaattaatttgttctggaagggatcagtgtacaattttaactcagtgctttgtggatctagctaaaggtcaagaactaaagtcggctattagtgcctctggaagatatttctgcactttagcacctttctgatgtttttccttcacctcgagctggcctcactctcttcaacaaaaccgaacctgcaggaagaatgttgtaccatatccagcatttttgtcccaacaaacatgggacaaacgtttttcactagaatcatccttgaacaagttatccgaattccttacattcaaaggaaatcctgcccccagtctccaaaacttcatcacatcacagacgttcaggattctttccattcaaagcaaagccaagttacatcttatagcacccagtgaattatgatatggggctgcggtttatttgctctggcgacaatatggcttacttgccgtggaatatcccggtatttcagaagtaacatattatttttaaagagggagctttgctttctctaaatcacatggtgcaaagttgggaatacagtggcctgtaaattacaaatattatttaca

SEQ ID NO: 30833 - DNA, 2300 bp, Homo sapien
tctcattcaccctccaagctgccgtcacaggaactttctgcaatacaagtccagactccatctctggcccttgctgcctaaactttcctagttcattagttttggcagtaaagttgagactcgttagatcaacacagacctacttttagtgtcatctcctgccactctcctgtactaccctaccctcgcttctcacagaaaggctgagaaggctggcagaccccttgtatataccctgctcctttcgttttctttgagacagggtcttttaatgtcacccaggctggtctcaaactcctggcctcaatcctccctccatggcctcccaaagtgctgggattacaggtgtgagccatgccatccagcctgccctgctcttttctcttctccacctggactctactcccttttgatcttgccaacttctacacacctttcaaggcaccagttaaatgtaaatcctccaggaacccttcctttgccatcctcagagccctcattggattgcttcccacatacagcacttatcccttatgcagaattaatcggtttgtctctcacctactagaggcgttatccttgagtgtagggactgtcttatccattcttgcatcactggcatagtaggcactaaatgtagttgctgaatgcttaataagaggaatggaagtcttcgtagcttggggtagatactaatgggcagatagaaagttcccatccctgttctctgagaaagtgtcagtgttcttttagtttgcttaaactgtgtgggtacttgagtccttttaaacgattaacgctgggaagaggcaccatttaattaattaatttgttctggaagggatcagtgtacaattttaactcagtgctttgtggatctagctaaaggtcaagaactaaagtcggctattagtgcctctggaagatatttctgcactttagcacctttctgatgtttttccttcacctcgagctggcctcactctcttcaacaaaaccgaacctgcaggaagaatgttgtaccatatccagcatttttgtcccaacaaacatgggacaaacgtttttcactagaatcatccttgaacaagttatccgaattccttacattcaaaggaaatcctgcccccagtctccaaaacttcatcacatcacagacgttcaggattctttccattcaaagcaaagccaagttacatcttatagcacccagtgaattatgatatggggctgcggtttatttgctctggcgacaatatggcttacttgccgtggaatatcccggtatttcagaagtaacatattatttttaaagagggagctttgctttctctaaatcacatggtgcaaagttgggaatacagtggcctgtaaattacaaatattatttacaaactagaaggaaagctgacatgtgtttgtgcctgtgtgacagtttcactaaggaattccaaaactgtggatagcctgttacttgagaaaaatacacggtggcagtcttgcagatgtttttcccgcctgttagccctccaggttcaaaaactgtttggtgcattttaaggcggcagtctcaccagatcgcaggattctagtctaattggcttctaaccttcaatctaaccttgccggcttccttgcaaagcccggtgcaagggcctctttcaaaatgaacccactggtgtgcctagcagtcggtagaagaagcgggagggcgtccggtctgcacgcccgccgcgaggttacaatgctgaacgcatgagatggaagataccaacgggaggccgaggggatccacggcgcccgcgcgggctccggcttcctcctgctctcggcgccgctgggcgaccgcccatgacccgctcttgcgggctctgtccggttgacaggcgaccctgtggcccggggaagcgcgggagggcgccggcggaaagttgaagagcgtttttctcgccgccgcgtgcattaggagctcgacgagtccgccctgggcttcctggtggggctgggcgggcgggggaggggccgcgcagcagcagcggaagccagacctcggcgataagaggctgcacagcgacatgcaacagtcttttcactgcagctgaatgagttgtggcgcccacaatgctcccatgacaaggagctgacaagttccattttccgtcgcgggcatcttggaatcatgactcccacaatgccttgggcacttggtcgacagtggggccgcctctgaaaaaaaaatgtgagaggtaagtttccattttcacagtttccccgcgccgcttcattgttcggactccggc

SEQ ID NO: 30834 - DNA, 2300 bp, Homo sapien
atagaatacttaggtactaaacaccctctgtgtataaacagacactgtgttcaaacccaggaggaagggacatagtgtccaccggtgtagtatttcaaagcacgctgcagagggctcgaaagtctaaaagcattaattatgacttctctcctagcgtattaatttaagaaactcctcagagtatatggcagagtttgccatccatctgctatgacttgtgcctgtgctggtgggcacacaaagtgaagtcagcggcaacaacctttccggcagcttcttaactttaatcctggggagacatactccacggaaatacaccccagaatcccaacagccgcatactctcccggccccagagagccttaagaatacaatattactctggcagcaacacccctgtagttgtaaagtgctgtgcgaggggaaggcataagcgccaccatatacctgctcgtgttacaggctctggaatcaaagtattctcacatgacacattactaccaataacagattccggctccgtttaaaaaaaaaaaaaaaagttggggggtggctacatatttgtcctgcttttgtctaaaaaccagaacccaagtactaactacttttcattcttttcaacctttcatgaaagcaattcaaccaactgcggctccacccaaagagcttctatacttacttttcttacagtttttgagtgacgcactacaaaacgatgaaaaaaaaaagaagaagaagaaaaggaggaggcagccctctcctacagggcgtcttccgccctgtaaacttggcaaaaggcaaactggcctgaaatacagcactctccatataaggcagcccagctaaacatgtcatgcgtaatttatgggtagcaagcagagaattaacctttgcgtgcacatatttggcccagatgaaaaccgggcgggatggcagccccggggccagggatgcgggagccgccgggaagacccgcgcgccgctcgactcagagggactcacaccttcccccgacaaaggtcattaagttgtgagtacacttgcacgcacctgtttctcttctcgcccccctgtttctccctgggtcccgctgggctgccaagccgtgcgcgggctgtgccgtgacagcgtccgcagagcccgcggcagggaagggcgcaggagcggctgcggctcaccctcccgccttcccccgggcaggaggtgctgagggacgcgaaaccaactaccgcgagcggcccgcccctgcccgggagaaccgcggccggcgagcacctcctcgcacttcctccttcagccacgggcagacccgccggagtccgaacaatgaagcggcgcggggaaactgtgaaaatggaaacttacctctcacatttttttttcagaggcggccccactgtcgaccaagtgcccaaggcattgtgggagtcatgattccaagatgcccgcgacggaaaatggaacttgtcagctccttgtcatgggagcattgtgggcgccacaactcattcagctgcagtgaaaagactgttgcatgtcgctgtgcagcctcttatcgccgaggtctggcttccgctgctgctgcgcggcccctcccccgcccgcccagccccaccaggaagcccagggcggactcgtcgagctcctaatgcacgcggcggcgagaaaaacgctcttcaactttccgccggcgccctcccgcgcttccccgggccacagggtcgcctgtcaaccggacagagcccgcaagagcgggtcatgggcggtcgcccagcggcgccgagagcaggaggaagccggagcccgcgcgggcgccgtggatcccctcggcctcccgttggtatcttccatctcatgcgttcagcattgtaacctcgcggcgggcgtgcagaccggacgccctcccgcttcttctaccgactgctaggcacaccagtgggttcattttgaaagaggcccttgcaccgggctttgcaaggaagccggcaaggttagattgaaggttagaagccaattagactagaatcctgcgatctggtgagactgccgccttaaaatgcaccaaacagtttttgaacctggagggctaacaggcgggaaaaacatctgcaagactgccaccgtgtatttttctcaagtaacaggctatccacagttttggaattccttagtgaaactgtcacacaggcacaaacacatgtcagctttccttctagtttgtaaataatatttgtaatttacaggccactgtattcccaactttgcaccatgtgatttagagaaagcaaagctccctcttt

SEQ ID NO: 30835 - DNA, 2300 bp, Homo sapien
actgagatgaataatatattttttctgtccttaaaaacatatggtctagtgggtcagatatataaggaaataaaacactgtatagggcataggtgcagagataattcagagaaggcagtattacgatatggatggatagagatggggataatgacatcttggtagctttttggaggaagtaacatcttagctggctttagaggaagaaaatagttacatgtgaggcacttgaagattctgaagagaaggagtaaagacattgttgaccatgcaggtggtccattctcaaggcatgaaatcattgagtaattcttaatgcagaacaaagtttcaggaagatagacacagcttacagtttatgactggacctttgttttttttttttttttttttatagaaactggcattaagacctaggaacttttttgaaaaccaaaatatttcttgaacactggggatgaggtttttttttttttttttttgatggagtctcacactgtcttccggcctggagtgcagtggcgcaatctcggctcactgcaacattcacctcccaggttctaagtgattccaggagaatcacccagcctcccaaggagctgggattacaggtgcctgccaccatgcccggctaattttttgtatttcagtatttttagagacagggttttgccatgttgaccaggttggtctcgaacacctgacctcgtgatctgcctgcctcggcctcccaaagtgctgggattacaggtatgagccactgtgcccagccatgggttttttaaattttttttagacagagtcttgctctgtcacccaagctggagtgcagtggtgcaatctcagctcactgcagcttccgcctcccgggttcaagtgattcttctgcctcagcctcctgagtagctgggattataggtgccaccaccacgcccagctaatttttgtatttttaatagatatggggttttaccatgttggccaggctggtcttgaactcctgaccttgtgatccacccacctcagcctcccaaagtgcggggattacaggcgtgatccaccaagcttgattgattttttaaatctctatcaaaagttgtagtcgtactgtagtattttccaaatagttttggaaagtagttttttaaacgaaatttagtgttaaaatggcaatattaatcttaaacaatttaagttctagatgttcgtgttttttaatgtacgtatgtatttatatcctatactctagtttccaaaaattataaatataccatatgccaatagagcaattttggctcatgaagaagtatcatcaaatactagttatcatactgtgtcattgcctctttaaaatgtgaaaattttactttttaaagccttgttttcctcattggcaacattcaaacaaaaaataaagaagaaaaatcctgatagaaaaagtaagttgttaaaagtaaaaatgccctgctctaagaagtagtcttgtggtgctgagttaactgatcatcaggcaacaggggatccctcatcccccaccctccagctttgtttggaattgtacttctgaagtgcatcacgctgctcaaatcaaattgctcacttaatatttaatgtttctgcgatggaatcactttctcccttgaggttgacttcagatttaccagacacactgacaacactgtactccttattttccccacatgacctcagcttctgctttaaaaatgtacgaataaaggatgcttttgttcatatcttgcctgcctgtgatatattgacaaagtgtctgcgggctcaatggaatagttttacagtatgagtgctgttttcagtggaggggcaggacttgggctttagaaggaagtgaattggataggtcaggagaatgtaccatttgtaaacacccctttccttttttattcacgtgtcaggacagcaggagcaggctgttcagtgcccgtccctgcgcagagccggagggaaagcagcttggaagtcagctgcaatttttaaaccttgctttttattccctggtaatgatcttcaagtgcttagacttgtctgagaagctgttttgaaactaacatggtttagtccactaactgcatgttgggtaaattcaaaacccacatgctcgtcctcttgcagtggaataagtcacatctgatggacattttctgtgcttatagcatagtaatgaacgtctgacaggcgcgacctttcataagacaacccacactattggctttctgcccagaatattgctgcaacactatctgtgattggttatctctctatca

SEQ ID NO: 30836 - DNA, 2300 bp, Homo sapien
aacccgtcatctacattaagtatttctcctaatgctatccctcccctagccccccaccccctgacagaccccagagtgtaatgttcccctccctgtgttcatgtgttctcattgttcaactcccacttatgagttagaacatgtggtgtttgtttttctgttcctgtgttagtttgctgagaatgatggtttccagcttcatccatgtccctgcaaaggatatgaagtcatccttttttatggctgcatagtattccatggtgtgtatttgccacattttctttatccagtctctcaattgatgggcatttggatcggttccaagtctttactatagggaatagtgctgcaataaatatacgtgttcatgtgtctttatagtagaatgatttataatcctttgagtatatacccagtaatgggattgctgagtcaaatggtatttctggttctagatccttgaggaatcgccacactgtctttcacaatggttgaactaatttacagtcccaccaacagtgtaaaagtgttcctgtttctccacatcctctccaacatctgttgtttcctgactttttaatgattgcgattctaactggcatgagatggtatctcattgtggttttgatttgcatttctctaatgaacagtggtgatgagcattttttcatgtgtcttttggctgtgtatatgtcttcttttgagaaatgtgagttcatatcctttgcccactttttgatggtttttttttcttgtaaatttgtttaagtttcttgtgaattctggatatcagccctttgtcaaatggatagattgcaaaaactttctcccattctgtaggttgcctgttcacactgatgatagtttttttttttgctatgcagaagctttttagtttaattagatcacaattgtcaattttggcttttggtgttttagtcatgaagtctttgcccatgcgtatgtcctgaatggtactgccttggttttcttctagggtttttatggttttaggtcttatgtttaagtctttaatccatcttgagttgatttttgcataaggtttaaggaaggggtccagtttcagttttctgcatatggctagccagttttcccaaaatcatttattaaatagggaattcttttcccattgcttgtttttgtcaggtttgtcaaagatgagatagttgtagatgtgtggtgttatttttgaggcctctgttctgttccattggtctatatatctgttttgctagcagtaccatgctgttttggttattgtagccttgtagtacagtttgaagtcgggtagcgtgatgccaccagcattgttctttttgcttagaattgtcttggcttatacaggctcttttttggatccatatgaaatttaaagtactttttttctaattctgtgaagaaaggcagtggtagcttgatgggcatagcattgaatctatgaattactttggacagtatggccattttcatgatattgattcttcctttccatgagcatggaatattttttccatttgtttgtgtcctctcttatttccttgagcagtagtttgtagttctccttgaagaggtccttcacattccttgtaagttatattcctaggtattttattctctttgtagcaagtgtaaatgggagttcactcatgatttggttctctgtctattattggtttataggaatgcttgtgatttctgcacattgattttgtatcctgagactttgctgaagttacttatcagcttaaggaaattttgtgctgagacagtgaggttttctaaatatacattcatgtcttctgcagacagagacaatttgacttcctctcttcctatttgaatacactttatttctttctcttgcccgattgccctggccagaacctccaatgcgatgctgaataggagtggtaagagagggcatccttatcttgtgccagtattcagagggaatgcttccagcttttgcccactcagtatgatattggttgtgggtttgtcataaatagctcttattattttgagatacattcatcaatacctagcttcttgagagattttagcatgaaggggtgttgaattttattgaaggccttttctgcatctattgggataatcatgtagtttttgtcattggttctgtttatgtgatggattacgtttattgatttgcatatgttgaaccagcctagcaccccagggatgaagctgacttgattgtggtggacatgccttttgatgtgctctggattcggtttgccagtatggtattgaggata

SEQ ID NO: 30837 - DNA, 2300 bp, Homo sapien
agtggctcgatctcagctcactgcaagctccgccttctgtgttcacaccattcttctgcctcagcctcccgagtagctgggactacaggtgcccgccaccacacccggctaattttttgtatttttagtacagagggggtttcaccgtgttagccaggatggtctccatctcctgacctcgtgatctgcccacctcggcctcctaaagtgttgggattacaggcgtgagccacagcgcccagcccaaaatttattttttaacatcattttttaaaaagtctgtggtgcacttaaaacaactatcccccaattcctagtaaggtgtcagttttctgcaagtacttaatggtatctggactaagtgtacatttcaaaacactcacattatgagttaatgcatttgcaacaaacttctgagtgaagtcagatattgcctaggttgcaaataaaaaatgcaaaggagtgaggacttaagacctattgagtacccctggaacccttaatggttttctttgcttccttttctctcttaatagacaatcatcccacctaggaccatactaatcaaacaatacacaaatgtttcatgttaaggctcagaatcatagactcatataatcaggagattggaaggaaacacaaaaagtaagacttttcaagacaacctcattcacactgtttacttgaattatttactcttgttttattattaatttttatgctgttcaattgactacaattcaaaacccagtgtattcataccatgtgctaagatatgctccttcctatatgtgttcctctaaagaaccatctggatcttgtgggggatattttcctttgtggtatcaaagccaggagctcgtggttttcctttattttttaagggaacactatcatgtagcatctgggaccagaaagaaatcttgatgttatatattttacagatattttctttttggattttttttcctctaagagaaaagcttttgttaatgtgtcatgtaaaaatacattaactagtaacttgtcaagaagtgctagattccattcttgtgcgggtccatttatatatgttcctgaacagctaatatttcatttagtttccaattaaacttgctcaaatacatttttgaagtgcattgcttaaaatttacattcaaggcaagaaaacgagtttgtcagtaaatgtagtaattaaggaagtcccaagtctgtatttttaagatactagaggtaattgtaactaatcactttaacttaaagaaatagaattggaaatacccccctccccccgccaccccctaccaaaaccataccttagtcactttggaattataaccgtcttttacgtctatcaatataaatgtattgcatttggcattcaaattactttcaaagggataaatttcgaatttttttttttcattgtagcttctgatctttaaatgtactgaacaggaggatttggggagcttgtcttgtctgataggtgttaagtatctatgacgacaaatttgagctgaagcaatgtgcaatatggactagtaatatcttcacaagactattttggaaattctcacgttgatgttattaatgacgtgggtttattagcatttgggtaattaagaaaaaacagtactagaatttaaaaaaaagaaaaaaaaaggtaagaagggcgaaacagagttctccactcctctcccaaccctcattcctttggaggctcgcgccctcttggaatagcaggttcctgcatgtgccagaaatccggtcccggcaaagctagacgctctgcaatgacaggcgttcccagctagggactcctggctgcttggagcttgaaaacacctggcgtggttctcgagggccctagaggctcctgctacggactggtcggctctggggttgtaggcagaaggctctaagcggtcggaagggtttcctgtgtgtcagcaacttcactttgccgagatagctggcggaagagggaaggagcgctcgcgggccaatcgcctgccagcagccaccttggagcgcacccctctccctcgccgccgactccggtagcagcgtgccggcagaggctgaacacactcggcctcggcggagacctgctccccagaagacgcctcctgcttcccactgcgccctggaggacgcgggctggctgctgggcgagctcggcggaggcacgcccctcgcctccccgcggagtgcggactcgccccggtgcccaaactccgcccaccctctagggagctccgctctcccgcctaaccccggcactccggacagagctg

SEQ ID NO: 30838 - DNA, 2300 bp, Homo sapien
tcttaggttggccactttctagttgtggcatcgcaggcaaattattgatcatctcacagcctcagtttcctcatctttaaaatgggtaaataatcattattatgaggagtggcagtatatgtaaaacgcttggtggacattacacattgggtggatgttgacagggttctctccagcttaggcgagtttgcctctgagaggtttttctggagaattatataagcttcataacatccaagcactctgacagtcaaggtgaaagtctcctctctctactaaattggggtgaggcgcgggtgtgggcaccacccaccccacccaaggcatcaggggcagcccacgtcccgcccggttctgtgcccaaggacttcacgctgcagacgtgcacggaagctgctttggccaggggtttggaggttaactagcaaacgcagcgtgagtcacggcggcactaggaactgaaaccgtgttagccatgcccaggtttaccctccgatgcggacggtgaaaccagggagcagtgacatcaggacggggagccagcgctgacgcagctccaccgcctccctccccatcccgcacccgccgccgccgagctcagcctgcagacaggtcttgacatccctcctcagcgaggagcgagggagtcggaacaagtcggggcatctcccttgcacctcccgggagcgccagcccagccaagtctagcgattgcccggcccgccagcgaagacgcttcctctgaagcaagcttggacactcccctacccctccgggtgaaacgaattccaagtggcccatttcggctcctcgccccctcccactccctgcaaaaaaacttggcaactctgcggtttcttgcggaccaaaacctgtaattagccctttgtgctccctttaaggggcagtcgtgactggaaaccgaggagtcagaccctctcgaaaacaccaacaaagaactatatttagttctgagctctcagcctaaatgcctcttattttttcacttttacttcaaaacgccagggttggggaagtgggaggcagagggtgggggagcaacggagaaagaacagctgtgcctccgcctctccgctcaatctctataaataaccaatcgcgagcggaggctactttttagccaatgaagcgccccaaactgataaagccttggcggcagccaatgaacaacacttaggggtgtcagactcgcgccccgagaccaatgagtgcagagtctgggagaggtaatttgagctagagtgtgggtgtgtggtgcaaaagcttcctacttccaagcccaaaaacctgctctgcgactgagcatgccctgaactaactgcgggcgccctgagacttctggattgggatgtaatccggtctccgggttttgaccgcactcgagcggggaggtgggtacgacccgcgggaccctgccccgagagagctgcaggtaccagaagctacccctttcctagtcggaacagtatctcagacttggagtacctcctgttttctttgtgcaaggctgcagtgcacagagtcggtcagagaagacagagtagcgtttctgtggcgaacggtttagaaaaatctatggggcaggtttgctccgccggctgctcgtgcattccacggcacccacaggacttcgggtttccggcccccagacccacgcccgcccggggctgagtgaatggcgtccttgggcctttgataacgggagttggcaagaccacagcctactccatccctgaggcggcccgccgcgcccacgtgcttctcgcagagccgccgcccttgtccaccactcccacagctgtaaaataaagcggcctgcatgcttcctacagcgctttcctcgctcccatatacgcacacacaccccatcttccagccagttcctaactcgcgccactccccaaatcggactcaaatccggagccccgcccactgccccgccccctcccggccccgcggaaaaccaggagcggccgcttgggcaaggcgcggccggaacgcactgggcatgctcgccggggaggggcgggccgggctgcgcgcggcgagtaggaagccctcgcccagtagaggctgtgggagagagcgcgatgggccgcggcggtgggcgcacgttccgcggggactcatgccacgcgcgtcccggcccgacgcgcaattagcagccacctccgcagcccgccgccaccgcctccctgccctcccgggctgccgcagctaggagctccagccgtcgcctcgcgcaggctgcgggcattgtcctctcggttcgccgcccg

SEQ ID NO: 30839 - DNA, 2300 bp, Homo sapien
ctgccaaaatatgtgatctgtggaagcaagtccaacaatagtggtaactaatataaaataacttgaaacaagtttaatcagttgtaaatcatgtatctgaagttattgtatttgcagttcatattaatagtctacatttgagaaatatctctttaatgcacattgatggcttgaaataacatctatggctctttccttctctttgtcattctgacttttctttttcctttcctccttccttctttcccttttgattttgaatcatgaaatttctaattttaaaccatatttgatctattaaaacagcagtttcgtatggttcaaagtacacaagacatgaaataattcttaggtgatatttcaagacaataatctgatgttaatttcccaaatatcaagatggtatttaatcatatttctgaagatcttccactgaaagctgtcttgcactatgaactatatataagatataggctagttgctaagtgagcagaaacagtataattatgggttatagtggtatgtgggtcaggagtataacatgatttttaaatccctgcattattttataatgcatgtatgctgaagaaggttaagaaaggcactgggaattcatgtctactcttctaaccattgcattattggccctaacctattaaactatatgctttatctgcgatacataaagaaatgctgtcaatgtaggtatatttccaaattcttcttttctgctgatccactgattcaagaagtactttctcacatgtgctcaggacgtagtctgccaggtccatgctggccttcttgaattgctgccgtgccacttcctttggtgattgagactcaagagatccatttacctcctctctattcaaaaggatttctctagaaattctacgaccttggtataaaatccaaaactcatacatgacccctggaacttaggatattcctcaccactgccctgattgtcacacatctcaggatcttgacatatctccacacaagttctcagtgacaatgacattgattgtagcagctatagtcaatgtcattgtcactgagaacttgtaggtctgttttgctgttcccttccagcctatctccacgtagctaagaatgactggccatcaccattaggactaaaaggaggaagattttccccacccctaggccaaagagccacaaactagaatccattttgttttaggggaaatactctcattacctagtaatacatgctcttattctgcagtttcagcaagacattaacaacactgtatgtacaatctcctaccttttgggcctcatctttagccttcttgcttacagaatcacagaatttcagtcctcagagataattatagttcgacttccttattttaaaggtgaggaattcaaagaccaccacgttgctgttttcccttacaactatattgaggtacaattgacataaaataaactgcatatctttaaaatgtacaatttaataaatttggacagatatatacacccagaaaactatgagcaggaaataagcatatccatcacatccaaacttacctcatgaccctttataatctctctttctcatctctcccttcatcagctctcaccactggtgttctttttgtcactataggttagtttgcattttctagaattttatatgaatgaaatcaaactatatgttctctttttattgtctgacttactttacactgcttagttatttttgaaactcatctatgttgtatgggtatcaataactaataagtttttttttggtttttgtttgttttgagacagagtctcactctgtcacccaggctggagtgcagtggcacgatctcggctcactgcaaccaccacctcccgggttcaagtgattctcctgcctcagcctcccaagtagccaggattacaagcatgcgccaccacacctggctaattttttttatttttggtagagacggggtttcaccattttggccaggctagtctcgaactcctgaccttaagtgatccgcctgcctcggcctcccaaaatgctgggattacagacatgagacaccatgctggccaactcattagttattattgttgaataaaaaatattacatggatatcccagaattttctgtccatttactggtgataaaaattggagttgtttccaaataaagttgatatgaatatgtacgtacaagtgtttgaatagacatatattttcatttatcttaggtaaatgtataggagtggagtggctagaacatataatagctacatgtttaactttt

SEQ ID NO: 30840 - DNA, 2300 bp, Homo sapien
ccaatgtgactggaacagaatgaggcagaaaatgaatagaaagtctgtgaggttggagaagtcactgggagccagattatatagcataatggtaaaaattttagattttgctctaaacgtgatgaaaagctgttggcagtttgactgtagggactgactctgtcttatgttttatgaaatcactcaggttggaatatatttttacggtagagtcaacagtgcttgttgataaattgaagtgaggtctgcaagaaaagaggaatcagggctggtcgcggtagctcacgcctgtaatcccagcactttgggaggccaaggcagggggatcacgaggtcaggagatcgagaccatcctggctaacacggtgaaaccctgtctgtactaaaaatacaaaaaaaaaaaaaaaaaatgagccaggttttgtggcgggcacctgtagtcccagctactcgggaggctgaggcaggagaatggcgtgaacccgggaggcggagcttgcagtgagccgagattgcaccactgcactccagcctgggtgacagagcgagactccgtctcaaaaaaaaaaaaaaaaaaaaagaggaatcaagggtaatgcctatgatgtttttctgagcaacttgttgattctgaatacatatactgagatggagagcacttcaagagttgcggctttggttaagaagatcaggagttcatttgcaatgtacttaatttgatttgcctattagacattaaaatagagatgtatgtcaaggaagtaacgatatatctggattttctgagatagctacagatatacattaggaaatcgtaagcataagcatggtatttaaagccttaatacagaaggaaatttccccaggaaatcagtgcagttaaacaaggtttagaagtttgagatctcaatgttcaatgagaaaggaatgtgaggtcataacagctaatgtggtaggaagagaactaggaaaatactcgtggatgttgaaggttgttctaattatctattgatgcataacaaatgatccaaaaatttagtagcataaaacaatgcctattttatgtgtttatgattctgtggctcagcaattcaggcaggaagatgtaggcatggtttgttatgtgtggaacctcagctgaggtggcccaaataagtaagatggctgggtcacaaatctagggccttagttcttctatacccagtctctcagcatattagtttggactccattacagcatggagctctcagggtagtcaaatgccttatgggggtggtttaggattctgagaggccaaagcagaagttgccgttctcttaaatgttggcccaaacaggcacagagtcccttctgccataacttactggtcaaatcataattaacattcagcccatatttgattaaaggagaaacagaccacacctgatcatctttaattttccttgtccatctctcccacagtggttaactattaaaaattagtcagtttacagtgcaatcaccagtaagatagcagtatatacaaagtagttgggacagagagggctgtgtctggaggattaggagaaagcttgacagaagagcttcatttgggttttaaagactagatggagtttgctggatggaacagcagtagcagcatgtacaaatgcaaagcttcatggaagagtacgctgtgctaagggaaggcaaatgtgcctgcagtgtgaccaagctagaaagaagaaacttatccaatagccactggatgtcattggaaagttttactacaaaattcctcctgtaagtgtgtgggatcaatgagtatgaaaagaatagacgttaaaaaatcatataggatcatattgcaattacagtttgggaaaaaattgtctgcttaagttttggttagtgggaatcaataggaggggaaagacttcagaggactcagcaaatataggatggaataatgagttgcatttatttacttatccaatctttgttaacacttcctagaagcctggcactgaattaggatttagagaaacaaatatgaatggtgtggttcctaccccagaggggctcacagtcttgtgagtctgattttgcctcgggtttagaaaggactgtggaacatctcagagcctctcagtaggagcagaaaagttactggggagtacagatgcatgtatgtgatctgcagaagctggtcaggatccaacttgcatttactacatttccatggatgttcagttgccatcttctgcctactcctgagctttcatccaagagaaatcagtgtttgctttacaaggtaaaa

SEQ ID NO: 30841 - DNA, 2300 bp, Homo sapien
tatattttcctttcctacatacacacagtactaagcaaatctatgtataagtgtctaaaagcactaagtataaagtaaaaattcgatatgacataacatattgtcatagttttattagcagctcttttcctttcttttgagtggaacatataattgaagataggttagatttgaatagataacaataaattgaataggcactaggtctgtgagtttgtaaacttccctcagtgaaggaccagagcttggtgttttgttgttgttttggtaggtattttgttgtctgttggaaatgaggtaagaagatcctatgaagtcgtcacaaatattggttatacttgtttgtagaagcaacataatttcaagaaaagccaccttctcacatcaccttttacagcttcttaacataggtcacaggttgcattttgaattaggtgaatactccatttgtcagtcggtaaccacttctgaaattaatttattatatttccccaatataacagcaatacatgttggtatagaaaacaccttatattaaaaaaaaagtctatgtacctacatgtgagtatgtaatcagccatgtcttccacccaatgtggaaaatttctttcttaaaaattttcttaggccaggagcggtggctcacacctgcaattcccagcactttgggaggccaaggtgggtggatcacctgaaattgggagttcgagaccaccctgaccaacatggagaaaccctgtctctactaaaaatacaaaattagccgcgcgtggtggtacatgcctgtaatcccagctactcgggaggctgaggcaggagaattgcttgaaccctgaaggcggaggttgcggtgagccgagatcgcatcattggactccagcctgggcaacaagagcaaaactccgtctaaaaaaaaaaaagtttcttatacatttttcgatgccgtttctttttttctttgtttatgaaaatgtctcagatcaaagtaatatatcttcattgtccaggatatttcgttaagtatagaaaaatataaagcagcatgaaacatactatccttcatctcaccacccagagatcacatcttaatatttttggccattgcattcaatctagggcaaaaacaggcagcataacttgcacacagtggatgctcactgcatccctgctgaatgcatgaatgcagaaagagaacttggagaagggcccatttgtcttgctaatagaatcaattatacagctcttatggtctaaaattatttgtcttctcaagtttgcctcattattgtcacacagcaggagcctggccaagacacagccatctttctactatttgacaaccaagcactttggaaggaatggtcactgttttcacttcattcctgtcattcattctctcactcattaaataaatattaagtgcccaccatgtgccggaaatacggagaagaaaaaaaaacatgacccctgccctcatgcaaattactgtgtaaagacaaaagacaataaacataaacacataaatatatatatatacaaaattttataagtgcaaaaatagaagagaacaagtggctgggaaaataaacggggcaatggtataattaaggaggggacagggaaggcctttctgacgcagtgacaagtcgggtcaagaaggaacgaaagggaaggttatgaggctgtcaaactttgagtgtggccaaaaaaataatgaagaaagtgatggaggaaagactaggctgaagaagtagggcagtagtgaagtgtcttgtaagccatgctaaggattttgagttttattctatgtactgttggaaaccaatactttttttgtagtgtaaattgagcttatttttcacagataggtttcaagatgcaaagcatacaaggaccaaaaataattatatgaaaactctccctccctccggtttcctagccacccagtttccctcttcagagctgccagtctttcctacggaaagactctaggcacaaacaagcccatctatctgtttatattataatgcattttcagcactgggacgagcccatctgatttaagaccacctgaatgctgagagggcatgactctgcgttagaactctgcgctactgcccacgcatctcacaaagtctactacgccgcgcgttctcggtttcaacgcacctccaggattcagggcttcctaagctgcaattcagcagggctcccttgcttgttctcactctgtgcccccggcaacgaccccgcgcgcctacactcccgtgccgcctcagctactagtccgcaacttctag

SEQ ID NO: 30842 - DNA, 2300 bp, Homo sapien
taacataggtcacaggttgcattttgaattaggtgaatactccatttgtcagtcggtaaccacttctgaaattaatttattatatttccccaatataacagcaatacatgttggtatagaaaacaccttatattaaaaaaaaagtctatgtacctacatgtgagtatgtaatcagccatgtcttccacccaatgtggaaaatttctttcttaaaaattttcttaggccaggagcggtggctcacacctgcaattcccagcactttgggaggccaaggtgggtggatcacctgaaattgggagttcgagaccaccctgaccaacatggagaaaccctgtctctactaaaaatacaaaattagccgcgcgtggtggtacatgcctgtaatcccagctactcgggaggctgaggcaggagaattgcttgaaccctgaaggcggaggttgcggtgagccgagatcgcatcattggactccagcctgggcaacaagagcaaaactccgtctaaaaaaaaaaaagtttcttatacatttttcgatgccgtttctttttttctttgtttatgaaaatgtctcagatcaaagtaatatatcttcattgtccaggatatttcgttaagtatagaaaaatataaagcagcatgaaacatactatccttcatctcaccacccagagatcacatcttaatatttttggccattgcattcaatctagggcaaaaacaggcagcataacttgcacacagtggatgctcactgcatccctgctgaatgcatgaatgcagaaagagaacttggagaagggcccatttgtcttgctaatagaatcaattatacagctcttatggtctaaaattatttgtcttctcaagtttgcctcattattgtcacacagcaggagcctggccaagacacagccatctttctactatttgacaaccaagcactttggaaggaatggtcactgttttcacttcattcctgtcattcattctctcactcattaaataaatattaagtgcccaccatgtgccggaaatacggagaagaaaaaaaaacatgacccctgccctcatgcaaattactgtgtaaagacaaaagacaataaacataaacacataaatatatatatatacaaaattttataagtgcaaaaatagaagagaacaagtggctgggaaaataaacggggcaatggtataattaaggaggggacagggaaggcctttctgacgcagtgacaagtcgggtcaagaaggaacgaaagggaaggttatgaggctgtcaaactttgagtgtggccaaaaaaataatgaagaaagtgatggaggaaagactaggctgaagaagtagggcagtagtgaagtgtcttgtaagccatgctaaggattttgagttttattctatgtactgttggaaaccaatactttttttgtagtgtaaattgagcttatttttcacagataggtttcaagatgcaaagcatacaaggaccaaaaataattatatgaaaactctccctccctccggtttcctagccacccagtttccctcttcagagctgccagtctttcctacggaaagactctaggcacaaacaagcccatctatctgtttatattataatgcattttcagcactgggacgagcccatctgatttaagaccacctgaatgctgagagggcatgactctgcgttagaactctgcgctactgcccacgcatctcacaaagtctactacgccgcgcgttctcggtttcaacgcacctccaggattcagggcttcctaagctgcaattcagcagggctcccttgcttgttctcactctgtgcccccggcaacgaccccgcgcgcctacactcccgtgccgcctcagctactagtccgcaacttctagccccaaaacgctggagctcagaacccagctcaggtgcgctcgtcggtttcccagggagactggggctgattgtaggcacgcgggggcgggaagacagcttcttgcttctggctgcgatggaggcggatctgggcggggccgaaacgggggcggggccaagtgtgggggcgtagtcaggcgtgggggcgggccggcgccggcgccgcggtcggcggcagcgctctcctaagctctcgcggctgcgcttcggtcccggacccgggccacccacggggtagtgggtgctcctcggccccggacattgcaagccccagaaggtaaatttgcgtgggagccgcgcacctggagcgcgagggtacccatgatgagggcgggaggctggatggcgacagaagggagcgt

SEQ ID NO: 30843 - DNA, 2300 bp, Homo sapien
gcttagaaatttaaaagtgatgaatttcacttcttcccacaaagttgcactaaactcggctgtgcctgccagcatcaaagtggccaagagctggatgtacactagcaatcaagagcaaaacacagaattaaaacggaatgacttcttcgggtttcctctacgctcctcctccccactcccaacacatttactttccgcttagtgaatggcgtgccacactcctgcccacttttacctttatccttcccagactggaaaacttctccttgtcttccatcaccactttcagaacaggctgggacattctgttcttcttcttcgagctggtaggactgtcaaaatcaaagccactgaccactgccctgcgataagacgtggaccgcaagcctctccgcagagaccctgggctatccacgtcgttatcgacctcactctcctcccctgcgtgacccaggggtcctcctaggccctccaccatgctgcgcaccttgaggagtctcttgtggggctccacattttgattgttggatttacttattttaatttccgaggccagactcttcggaatgatctgctgcttccccactttgagggcggcggggctgtttgtactcaaaaccacggaaggattctcgaggagctcgttctcctgggagggcagcctttggagggggagtttttgttccgaagaacttttctggggcccaggaaagagcccccgttcggggtcctttgccttccggccggactgcgaacctgacccaggagagtcgttattagcggcaaggccatttgcagtgggcgaaggcaccgggctggcagtcaacccagtaaggtcctcctcgggggtgcagggggcgggcgcgttaggagtccgcggggggcgcagaaccggcggcggcggcggcgcaggcaaggtcaccgcgccatttgctggggatttcggggagccgccaggcaccgctttggggagcttgggtgacttgggccgtcgaagtcgaggagaggcagccctgtactccggggatgccgtcccaccattggccaccgctctccgctgggcgcccagaagcagggggctcctatgtaccgtcctgctgtccgaggcggtgggcacctgggcgggaatctgcgctgcgaggagcgtccctccgtcctccaccgggaaatccgtaattagtaacccgttggggctctggtaggactggggcctcggcttgctccggcccagaacctggtggggctgaggaatcgaccgcctccgccacaaaggggttatgctgttgctagaaaaatccacctcgctctcgccgtccatagccgggcctcgaagtcagcgccgggaggagcaacaccgagttagtcttgcctaaagaggaaagaagttaggaaactgtgcctctggacaaccggggacgcctggccgactcgcgtgctcccagaccggcggtccccctgctgctgcgcaggacacgactgcaccgcacttacccgccctttctcgggcaaaaactgcaccactgcggtgcgcggttcccggcagaaatctgggctgccgcccaggcggattaatccaatcacctccgcgtccctcccgcgccaaaagaccacccgcagcaaatgagcccgccacccattcactgagtgcaagccgaggcacaagaaacttgggacgagttcagctttcttgggaaactcgccgcgggacgctcccttctgtcgccatccagcctcccgccctcatcatgggtaccctcgcgctccaggtgcgcggctcccacgcaaatttaccttctggggcttgcaatgtccggggccgaggagcacccactaccccgtgggtggcccgggtccgggaccgaagcgcagccgcgagagcttaggagagcgctgccgccgaccgcggcgccggcgccggcccgcccccacgcctgactacgcccccacacttggccccgcccccgtttcggccccgcccagatccgcctccatcgcagccagaagcaagaagctgtcttcccgcccccgcgtgcctacaatcagccccagtctccctgggaaaccgacgagcgcacctgagctgggttctgagctccagcgttttggggctagaagttgcggactagtagctgaggcggcacgggagtgtaggcgcgcggggtcgttgccgggggcacagagtgagaacaagcaagggagccctgctgaattgcagcttaggaagccctgaatcctggaggtgcgttgaaaccgagaacgcgcggcgtagtagactttgtgagatgcgtgggcagtagcgc

SEQ ID NO: 30844 - DNA, 2300 bp, Homo sapien
tggaatacctcctgaaggacctgcctgaggctgtttcacagttaactattttttttttttttttttggtaagtaggagtgcactctaaaataatgataaaaagcatggtatagtaaatacataaaccagtaacatagtttattatcattatcaagtatcatgaactgtatataattgtatgtgctatacttttgtatttttggcagtacaatcggtttgtttacaccagcattaccatagacatgtgagtaatgtggtacactacaacatttaagatggctaggtgataggaattttttagctcctttataacatatgggaccaccgttgtagatgtggtttgtcattgatcaaaacaatattatgcaatgcgtgactgtattatgtttcctcttatgttcgcattatagcttttgtgtatgcttttcctgtagctctgtagcttctcagctttcagaccttagactttcctcattgaccaaatatctgactgccagactagatcacaccctactgacagtctgttctcacctctatataaatccttcagtttgtaggtatgtatttgtgtaagatcattatgttctcaaacttatagtgacttgccatcacattttgagtaaaaatcaaagtcctttaatggctgaggcaaggccctacatgatcagccctctggtcacccacaactcccatcttcttcttcttttttttattttgagatggggtccagtctggagtgtagtggcatgatctcggctcactgcaacttctgcttcccaggttcaagcagttcttctgcctcagcctcccgagtagctgggaccacaggggtgcaccaccacactcggctaatttgttgtatttttgatagaggcaggatctcactatgttgcccaggctggtctcgaactcctgacctcaagtgatctgcccatgtcagcctcccaaagtgctgagattacaagtgtgagccaccatgcccgccggcctcaactcccatcttctgtactttccccccatttccttgtactccagccatgcagtcctccttgctgctcttggtacatacagacataccaagtagactcatgccccagggctttgcacttgctgtgtccctgatgagatgctgtttgggcactagttcttcatcagagtcaacatcaagggccttttctttgtagttttgatacaggtggctcactttctcacctgttctatgtctttacttaattgtcactccagtgaggccttcctaaactaccctacttaacatctacatgccctcctcccagcgctttctaccccccttccctgtttcatgtttcttcatgacacttatcagcatcaaaatactatcaaagttatttgcttatttattgcagttctctcatgctttagtatcagctcctgaatattgagatttttagtgtctattattgtatttcacgtgctaagctgttgccggttcctagtaggtgttttctaagtaacagttgaatgaataaatgcatgagtgaatttgacagtttttttaattaaactgttagctcatgagaggtggatgagggcatgagagctcatgaggcatcagaggtgtctttcttttgttttccattttactctcagcccttggcacgtcatagatacacaataaatgtttattaaatagataaatgaatggtgatggaccttaaataaaagataggatgtaatttaacctaaattacagtgatttaacaggcctgactgtccttcatgagtagtggacagagacatggaaactgcttctgttggcattctctgtatgggctggtccccttcccctgcagttgagtttgagatagagctatgtgaatgagaaaatcacttttctgtaattattcttcagggactaaatctgtttgtctctctgtttataaaattggaggccaaacattgggtacatatgatgtttatttagaacaagtaacataatgattgagaacaattagtgacacataggccttgttttcttgcagaaaatgctgtcctgtatcaaaactacaaggaaaaggcccttgacattgattctgatgaagagtcagagcccaaagaacagaagtcagatgaaaaaattgtgattcaccataagccattgagatccacatggagccaactctctgcggtgagtgtttatcttcttttctatctgtggtaggaaaaaaacaagttttggaaattatgtgtggatttggcttttgttcttttctgccagtgatcctgtaactaaggagaaagactctttttagattgtgaaa

SEQ ID NO: 30845 - DNA, 2300 bp, Homo sapien
ctgctactctcccagcacctcaaggtgttcatcgaccctccctaaccccatcagttaagggttattgtggaggctccattacataggcactattgattaaatcattgttccttggcaattgaactcaaactcttctcttcttatgactggagataggcaggcatggctgaaagttccagctctgcaatcatgccttggtctttctggcatgctgagagccatgctgaagctatctaagggtccccagctaccagtcatctcactggcatacaaaagacactcctgtcactggagattccaggtatttcaaggagctgtgttccaaggaccagggatgaagaccaaatacttattattaccacacctgtgttatagatcctgtattgtaattggctgcatgcctcccatcaaccgctccactgtgagtgttgggagggaaaggatcatttcttactaaattttgtttaatgagctaacctctccttggcatataattcagcttcttctgttttggttcaagtattatgctaccgtttctctacacacacttagacacacacacacacacacacacacacacacccctatacacatactattgtacagtcagtgtggttaaaattccactgataggaatataccccagagacttgaaaacagacacaagaatagatattcgtatgcagatgttcatagcagcattattccaggtagccaaaaactggaaactactcaagtctccatcagcagatgaatggataaacaattgctatctatatgacatatataatgatatatatcatatgtgtattatagatatatacacttgtatgtgtatatctatttaggtgaccctaaattgctatctatttatacactaaatctggtaaccctggccgggtgcagtggctcacacctgtaatcccaacacttcgggaagccaaggtgggtagatcagttgaggtcaggagttagagaccagcctggccgatatggtgaaaccccgtctctactaaaaaacataaaaattagccaggcatggtggcacatgcctgtaatcccagctactcaggaggctgaggcaggagaatcacttgatcccgggaggcagaagttgcagtgaggtgagataatgccagtgcactccagcctgggtgacagagtgaggccctttctcagaagaaagaaagaaagagggaaagggagggagggatttaaatatcatgtatattatcagatttaaaataatgtgattgtttttattttgagaaaaaaacatatactgttagatttatttcagacttttttttttttttttttttttttttttgagacggagtctctgtcgccaggctggagtccagtggcgtgatctcggctcactgcaacctccgcctcctgggttcaagcgattctcttgcctcagcctcctgagtagatgggactacagctgcgtgccaccacacctgtctaatttttgtatttttaggagagacggcgtttcaccatgttggccaggatggtctcgatcccttcaactcataatccacccgcttcggcctcccagagtgctgggattacacatgtgagccaccacacctcctggcctcagacttattttttaagcatttatttaggtgttttgctcatgtatttttccatacaataaaatatataagcattcactccccttcccataaagaattcttgaaaaataatgaaatatgtttagtctaaagtacctgaaggcagagcagatcaatgtttgaagccaaacacttgaagcaataacttgatttttttttttttttttttggttttgtcttgtcttgaactcctggcctcaagtgatcttcctgcctcagcctcccaaagtgctgagattataggcgtgagccacaatgctcatcctcaaggaggtgttaatatgatagatttaaacttagataaaatttttatagattttaaaaatattttttagttggtactgtgtactgttgaattttcaaaccccgtgtaataacattacatgaggctaatctgttatctgttagagtgtatgaaagaagtgttaatttttttttccctttggtttttcaggttctttatagagttggaagcaagacatcagaataatatcttcatagatgacataagtgacattgtggaaaaacacacagcatccacatttgacccatatgtgaaatactgcacaaatgaagtctaccaacaacgaacactacaaaaattgttgtaagcaatgtcgaatgctacagttttaatcatctaacctagtttta

SEQ ID NO: 30846 - DNA, 2300 bp, Homo sapien
gtagagacggtttcaccatgttggccaggctggtctcaaactcctggcctcaagttatctgcccaccttggcctcccaaagtactgggatcacaggtgtgagccaccacacctggcctctgtgcttttaactcttacagcctgctttctagatactccatttgtatgtttcataagttcctcaaagtccacatgtaaaaataaaacacattaacttgccctgcccctcacccccaaaatgttccttgtcctgtgtttctcatctcaggatacaatgtgcctccccatgggttaataattcaaatcttaaacttggagtcgtttaacccttccaattctccacattcaatgaatcatcaaatttaagtaattttatcttctaatgtctcctgattccaattctttccacatgtaatgccctgtcatcccattttgcctcccctacatcacattaactagtttccctgtatccactcttgtctccgctatttatttccaattgaagcagtcaaaataaccactgctctgcataaacatatcactgttctttaagtggcacataagttttccataatcagacccctatctacctctttggccttccccatcaggctttaagattcagggtagttgttttaagttctccgatgtctcacatcattatctgtctttacacattgttcctttcacctgccatacttttcttctgcccattagtctggcaaaagtctacttatctcaaaagttgttgcataactcacctaactccaaaattaaattcttttgctgtagtatctcttggctcttagggaggaaatactttttgtctactttcttagattcagtgtttgcaggccccagacttaaagtgacaaaacagattagcaaaagaaaagacagacttaaccacatacataatagagttcacagaaaaaggtgattcagggaggtagagttctgacttatctaccatcttataaagggaaggaaaggggaaaacagcacgtatggaaaaaacaaatgacttttagtaaaaataaatgacaccttaaaacagatgccagatatgatagctttgtgacaatgtctattcaagtgtgttgccagcttctaacctccagtgataagagtcagtcttcctgggtttccctcccagggaggagcttgatttgaattcctccgtgtggttctgcatttagacaggtagatttcagaaactcaaatgtctttgctcaaaataatttttaggccacaatggtgtattgtagaccccttcctggcatacagcatttccctttcttaattcactgcacaaagatagcctttgtctttcccttaagactgtaggcaaataaaagctcatgccatacttgctttgttcagtgagtattcccagcacctttacatcagttaactgtaacatgagctggatatctcctggtgtacatccaagcctgtgtggcccaattacttgattattcaagaacagcttgtacaaaacactcagtgtgctggttaataaacagtatgtggcttcatatgaacacatgaatcttcaaagtagtttatttacattgcctaagagctctgcaccgaatttgggtagacacgctcatcttaacactattggataaacgtactaaatagtgacaacactttcaaggaggtaaggggattttaaattacatatttgaatagttgtcaggctgttttcaagactagaagaactcattttttagagacttttctttagaagacggcgaattgatccaagggttcttttgtttcaatcaacgtttactaccctaggacctaagtgcaaaaaaactgcggatttaccaggaataagaaagtaaaaaccaaaagctattggctcacttgctgggcctagggaaagaaaatctacgagcctttggctggctgttgctccagaggtacaaagataaacaactcgggggctcagacagaacctgatccctgccaccctccagaccaccggggtcgtcctcccgtgacgtcaccagaaaccactgcttgtgacgctaaatggcccgccctcttgtgcggtgctacggaagcaaaacggaagtgggcgcacagtggcttccgggcccggacgccatttccagcggttgctggttctgacgggttgtagtctgccaggacaatgagttatgactaccatcagaactggggccgtgatgggggtccccgcagctccggtgggggctatggaggggggccagcagggggtcatggaggtaaccgaggctccggaggaggcggcggcggcggaggggg

SEQ ID NO: 30847 - DNA, 2300 bp, Homo sapien
atttgctgagtaagggggaaaatcaaacaatcaacatatcaagataagtgaaatacctgctgtgtttattgaagggtgtggctggtaatgactaatgcaaccattttctacttgaacagattcgggttcaaaatgatacttcagttatttctaaaatgaaaagaatgatcgcagttctattactacttccagttattaaatcattatcaatatcaactatttcctttcccttcccctgtttccatttaaacctccagcactatgtgggagaatgcagccatctggtcatgaggctaagctgagaagaatgctgccctaaagcatcctgggaaatgctggaccagaagtacttctgttagatacttctttgctaaatcacgcatcttgcaaaattgaccattaagagatacaactattgtatgtcccaaatactctggttaaaaatgtagggtgatcttccttttaggccctatgtaatatcttccgactttatggatacttagacatataatttattcgaatgacagcctgcttacttgataccattgacagaaaatagttataaataaatgtctaaagctagtgtgactctatccaaagattctgtataatcccgtttagagtaatgaggactataacgacaatcttaagtacactatttttttaaaagaaatctgatacatctgactcttatgcatgggattgatgatattcttcctccaatggattatgaagcagaaagtctaggtaagaataaaagcagtcccttagttactggagtagcttagacctctcacaggttatatttgtagttcacatcaagcctgagcaagtatttggactaattttacatgttgaaaccaaaggggaagcttagcaagtacaccgtttcttgctttgaaagagtcagtctaagatatacgtatatcattttgttcacacactgaactcccctccctttttttcctgcttctctcctgcttggagctgactcctccttcctgcagctccgaggatcacaggctgattgaagaacacagcggttcagatgggattctgtgcacaagctccctctgactggctcgcgctcgccctctctctctctctctctgtctctctctctctctccaccttcaaagctgaaacctacctgacaatctcctgcctttgaatccagctctggaaccaaatgcatcattttactgctcttaaaagtgaacagagtttgattatctcaagctacaagctgctttgctccataagaaggaccccaaaggatccagacatcattggtttttaatgtacctgaagagttttgttttgtttatttttttggctttcttccctgaaacttgatggtgggaaggagtttttgctttgtttttaattggaatgttgaaaagttatctgttcgggtttttttttttttatgcttgaaatggaacctaatttttaaatatagcttgagtcagatctaaaggagacatggctgaccattttctgcaggactgacaaggagaacatctagaggggaacttggtaggaggaatgaaatctgatttgcagcagccggtctttcttttgagaaaattatcagactcattgataagggaaattaaatattgaccaaggacaatgtctttatttctcagtaacttatcaacaaatgactctagcctgtggaaagagaatcataattctacggaccttttaaatccgccaggaaccctgaatatctatcttttttgcttgacatgtctcatgacttttgcagccttggtgggcagcatttattcactaatttccctgctgaaaatgcagaacagaactgttgtgtccatgcttgtggcttcctggtctgtggatgatctcatgagcgtcctgtcggtgaccatcttcatgtttttgcagtggccaaacgaggtccccggttacttccaatttctgtgcaccacctctgccttaatgtatttatgccagggcctctctagcaacttgaaggcgactctcctagtctcttacaacttttatacgatgcacagaggtgtggggagccagacagcctccagaagatcgggccaggtgctcggcgtggtgctgaccgtgtgggcagccagtctgctgctctcggcgctcccgctgtgcggctggggcgccttcgtgcgcacgccctggggctgcctggtggactgctccagctcctacgtactattcctctctatcgtgtacgctttggccttcggactcctcgtgggcctctcagtcccactcactcaccgattgctgtgttcggaggagcc

SEQ ID NO: 30848 - DNA, 2300 bp, Homo sapien
gtttctaatcaactttaatgaaatcaagatattgtaagggagatgtgggtagtccaagctacttaagaggctgaggctgaaggattgcttgagcccagagttagagaccagcctgggcaacacagtcagaccctcatctaaacaaaaaaaaacgaacaacagcaacaacaacaaaaaacagaaagaaaagagaaaaagaaaaaaatatttgttctgggaaaccagttaccaatccatactgtcgactatcagctgaaagtcagagtctaaaattaactctaagtaggcattttttttttcttttgtcatacattttaagtaaatccttttttttcctttaaaagagtcctcaccgccaggcatgattgctaacacctgtaattccagcactttgggagaccgaggtgtgtagatcacttgaggccaggagtttgagaccagcctggccaatatggagaaaccccgaaagtaaaagtacacacacacacacacacacacacacacacacacgcaagcaaaattagctcggtgtggtggtgcgtgcctgtatttccagttgctcaggaggctgaggcaggagaatcgcttgaacccaggaggcagagatcacaccactgcactccagcctgggcgacagcacgagactctgtaggaaaaaaaaattccagttgagatgctttccagggcgctagtcaagccccgcatgcttatttgtgggagtgaaaacaccaatatttcgggattgttgtgaggactaaatagtgtctgtaagatgcacagagaaagcgtaaatagacgtcaatagcacttgttaggtctacacactccatttttcctctatattaatcgaattatttaaagattggttagctttttggggaaatgtctctccattgtattccacttattaggatgaactaccttttctccttgcttttcagctttctctgctatgaaaaagatggaaaattttttagcacaaggggactcttctcaagcagcaaatcattttgatattaaaaacagataattgcaaacccagttttatttcagtatgaattccgcagtggagtgtgaatatgtgtgtgtatgtgtgtgtgtgtgtgtgtgtgtgtgtgtgtgtaattacctgtgattcaaaagaggaaagggatcagtattaaaggtacttgtacactggaagcaaaaaaaaaaggaagtttagttcctctgagctccttggcaattatagctgctaaaggtagcttttacaaagaaactgcctttgtgcctaaagtatttatttccttgtttgtatttacccctttgaggaggaatcgctgtgtcttgagtgaaaggggtacgctgcttgcttgcattaaactgtgagggtccaggcgcattacggctgatttcagtaggtagagcagacacactttagtttatttttctctttctcactccccaccctcaacctccgatgtacacacgttttaagattccctgaagtcaggaggtgggagcggagagtttcagttcagatcttgacatgagagtacttcgaccaaggaaaagaaagggaagaaagagggaagcggggtggagaaagcaggagcaaggaaggaaagaaggaaacggggagggagagtaagaaaaaagaaaacgaaggagggagggagagaggacatttaaatgaagaaggaaggaagcttggattcagggaggaaagggagcgggaaagagagcgaaagaagagcgtgagaagaggcaagcattatagtctccggtccacaggggagagatggagccccctcaggactagagaatcccgaagagcccgtgtattgttttcttgaaagccccgaagctaagcaattctaaaaatgtttagcaaagcccttttgggaatggtgagatggggggtggggaggatgggacattttcattgccaccgcccgccccccgtctccccggccccctcacatgaagtgactggatttgggagacctagcggaaaccttcaggtcacccagggaactgctcctctctctggtcctgcagcggcgaggcggggtagggggtggggggggtgggccgtgagagcgccgagacgcgcggggcgcggagatgtgcaagtggcgaagcttgaccgagagcaggctggagcagccgcccaactcctggcgcgggatctgctgaggggtcacggtgagtctctgtgggtgcgggtcggagggatgcccaggtgcctcgtcgccccacggcccgggcggaggcgggtccggaacctcccccaagtccggcctcagcctggagcccgc

SEQ ID NO: 30849 - DNA, 2300 bp, Homo sapien
aaacagaaagaaaagagaaaaagaaaaaaatatttgttctgggaaaccagttaccaatccatactgtcgactatcagctgaaagtcagagtctaaaattaactctaagtaggcattttttttttcttttgtcatacattttaagtaaatccttttttttcctttaaaagagtcctcaccgccaggcatgattgctaacacctgtaattccagcactttgggagaccgaggtgtgtagatcacttgaggccaggagtttgagaccagcctggccaatatggagaaaccccgaaagtaaaagtacacacacacacacacacacacacacacacacacgcaagcaaaattagctcggtgtggtggtgcgtgcctgtatttccagttgctcaggaggctgaggcaggagaatcgcttgaacccaggaggcagagatcacaccactgcactccagcctgggcgacagcacgagactctgtaggaaaaaaaaattccagttgagatgctttccagggcgctagtcaagccccgcatgcttatttgtgggagtgaaaacaccaatatttcgggattgttgtgaggactaaatagtgtctgtaagatgcacagagaaagcgtaaatagacgtcaatagcacttgttaggtctacacactccatttttcctctatattaatcgaattatttaaagattggttagctttttggggaaatgtctctccattgtattccacttattaggatgaactaccttttctccttgcttttcagctttctctgctatgaaaaagatggaaaattttttagcacaaggggactcttctcaagcagcaaatcattttgatattaaaaacagataattgcaaacccagttttatttcagtatgaattccgcagtggagtgtgaatatgtgtgtgtatgtgtgtgtgtgtgtgtgtgtgtgtgtgtgtgtaattacctgtgattcaaaagaggaaagggatcagtattaaaggtacttgtacactggaagcaaaaaaaaaaggaagtttagttcctctgagctccttggcaattatagctgctaaaggtagcttttacaaagaaactgcctttgtgcctaaagtatttatttccttgtttgtatttacccctttgaggaggaatcgctgtgtcttgagtgaaaggggtacgctgcttgcttgcattaaactgtgagggtccaggcgcattacggctgatttcagtaggtagagcagacacactttagtttatttttctctttctcactccccaccctcaacctccgatgtacacacgttttaagattccctgaagtcaggaggtgggagcggagagtttcagttcagatcttgacatgagagtacttcgaccaaggaaaagaaagggaagaaagagggaagcggggtggagaaagcaggagcaaggaaggaaagaaggaaacggggagggagagtaagaaaaaagaaaacgaaggagggagggagagaggacatttaaatgaagaaggaaggaagcttggattcagggaggaaagggagcgggaaagagagcgaaagaagagcgtgagaagaggcaagcattatagtctccggtccacaggggagagatggagccccctcaggactagagaatcccgaagagcccgtgtattgttttcttgaaagccccgaagctaagcaattctaaaaatgtttagcaaagcccttttgggaatggtgagatggggggtggggaggatgggacattttcattgccaccgcccgccccccgtctccccggccccctcacatgaagtgactggatttgggagacctagcggaaaccttcaggtcacccagggaactgctcctctctctggtcctgcagcggcgaggcggggtagggggtggggggggtgggccgtgagagcgccgagacgcgcggggcgcggagatgtgcaagtggcgaagcttgaccgagagcaggctggagcagccgcccaactcctggcgcgggatctgctgaggggtcacggtgagtctctgtgggtgcgggtcggagggatgcccaggtgcctcgtcgccccacggcccgggcggaggcgggtccggaacctcccccaagtccggcctcagcctggagcccgcgcgccttgggcggatgcacggactgagaggcgcttggctgggctctcagcccgccactgccacccggccccgtgcgctcattggtcgggatgtgtcggctcagcagcctccaacttctcccgaatcccactggtgagtcccaggagagcgagctgagggagaaaggtccaaaggg

SEQ ID NO: 30850 - DNA, 2300 bp, Homo sapien
cctggccaatatggagaaaccccgaaagtaaaagtacacacacacacacacacacacacacacacacacgcaagcaaaattagctcggtgtggtggtgcgtgcctgtatttccagttgctcaggaggctgaggcaggagaatcgcttgaacccaggaggcagagatcacaccactgcactccagcctgggcgacagcacgagactctgtaggaaaaaaaaattccagttgagatgctttccagggcgctagtcaagccccgcatgcttatttgtgggagtgaaaacaccaatatttcgggattgttgtgaggactaaatagtgtctgtaagatgcacagagaaagcgtaaatagacgtcaatagcacttgttaggtctacacactccatttttcctctatattaatcgaattatttaaagattggttagctttttggggaaatgtctctccattgtattccacttattaggatgaactaccttttctccttgcttttcagctttctctgctatgaaaaagatggaaaattttttagcacaaggggactcttctcaagcagcaaatcattttgatattaaaaacagataattgcaaacccagttttatttcagtatgaattccgcagtggagtgtgaatatgtgtgtgtatgtgtgtgtgtgtgtgtgtgtgtgtgtgtgtgtaattacctgtgattcaaaagaggaaagggatcagtattaaaggtacttgtacactggaagcaaaaaaaaaaggaagtttagttcctctgagctccttggcaattatagctgctaaaggtagcttttacaaagaaactgcctttgtgcctaaagtatttatttccttgtttgtatttacccctttgaggaggaatcgctgtgtcttgagtgaaaggggtacgctgcttgcttgcattaaactgtgagggtccaggcgcattacggctgatttcagtaggtagagcagacacactttagtttatttttctctttctcactccccaccctcaacctccgatgtacacacgttttaagattccctgaagtcaggaggtgggagcggagagtttcagttcagatcttgacatgagagtacttcgaccaaggaaaagaaagggaagaaagagggaagcggggtggagaaagcaggagcaaggaaggaaagaaggaaacggggagggagagtaagaaaaaagaaaacgaaggagggagggagagaggacatttaaatgaagaaggaaggaagcttggattcagggaggaaagggagcgggaaagagagcgaaagaagagcgtgagaagaggcaagcattatagtctccggtccacaggggagagatggagccccctcaggactagagaatcccgaagagcccgtgtattgttttcttgaaagccccgaagctaagcaattctaaaaatgtttagcaaagcccttttgggaatggtgagatggggggtggggaggatgggacattttcattgccaccgcccgccccccgtctccccggccccctcacatgaagtgactggatttgggagacctagcggaaaccttcaggtcacccagggaactgctcctctctctggtcctgcagcggcgaggcggggtagggggtggggggggtgggccgtgagagcgccgagacgcgcggggcgcggagatgtgcaagtggcgaagcttgaccgagagcaggctggagcagccgcccaactcctggcgcgggatctgctgaggggtcacggtgagtctctgtgggtgcgggtcggagggatgcccaggtgcctcgtcgccccacggcccgggcggaggcgggtccggaacctcccccaagtccggcctcagcctggagcccgcgcgccttgggcggatgcacggactgagaggcgcttggctgggctctcagcccgccactgccacccggccccgtgcgctcattggtcgggatgtgtcggctcagcagcctccaacttctcccgaatcccactggtgagtcccaggagagcgagctgagggagaaaggtccaaagggcgcgagcgcccagggcgctgggagcccgtgggacgggcacggggagggcagagccagccgaggggagcggctgccgggaggtgcgctgagcagggtccgcagctaaggtccagcgcgatccgagcgcccaggaccctgcggccgtggaggaggcgtgccctgggaaggagccgctactgggacctgaagagtgaggggagggagaggggcccagagggtgacctggaggagggctctggaagtcacgtcaggttggctcttcaggt

SEQ ID NO: 30851 - DNA, 2300 bp, Homo sapien
gaggcagagatcacaccactgcactccagcctgggcgacagcacgagactctgtaggaaaaaaaaattccagttgagatgctttccagggcgctagtcaagccccgcatgcttatttgtgggagtgaaaacaccaatatttcgggattgttgtgaggactaaatagtgtctgtaagatgcacagagaaagcgtaaatagacgtcaatagcacttgttaggtctacacactccatttttcctctatattaatcgaattatttaaagattggttagctttttggggaaatgtctctccattgtattccacttattaggatgaactaccttttctccttgcttttcagctttctctgctatgaaaaagatggaaaattttttagcacaaggggactcttctcaagcagcaaatcattttgatattaaaaacagataattgcaaacccagttttatttcagtatgaattccgcagtggagtgtgaatatgtgtgtgtatgtgtgtgtgtgtgtgtgtgtgtgtgtgtgtgtaattacctgtgattcaaaagaggaaagggatcagtattaaaggtacttgtacactggaagcaaaaaaaaaaggaagtttagttcctctgagctccttggcaattatagctgctaaaggtagcttttacaaagaaactgcctttgtgcctaaagtatttatttccttgtttgtatttacccctttgaggaggaatcgctgtgtcttgagtgaaaggggtacgctgcttgcttgcattaaactgtgagggtccaggcgcattacggctgatttcagtaggtagagcagacacactttagtttatttttctctttctcactccccaccctcaacctccgatgtacacacgttttaagattccctgaagtcaggaggtgggagcggagagtttcagttcagatcttgacatgagagtacttcgaccaaggaaaagaaagggaagaaagagggaagcggggtggagaaagcaggagcaaggaaggaaagaaggaaacggggagggagagtaagaaaaaagaaaacgaaggagggagggagagaggacatttaaatgaagaaggaaggaagcttggattcagggaggaaagggagcgggaaagagagcgaaagaagagcgtgagaagaggcaagcattatagtctccggtccacaggggagagatggagccccctcaggactagagaatcccgaagagcccgtgtattgttttcttgaaagccccgaagctaagcaattctaaaaatgtttagcaaagcccttttgggaatggtgagatggggggtggggaggatgggacattttcattgccaccgcccgccccccgtctccccggccccctcacatgaagtgactggatttgggagacctagcggaaaccttcaggtcacccagggaactgctcctctctctggtcctgcagcggcgaggcggggtagggggtggggggggtgggccgtgagagcgccgagacgcgcggggcgcggagatgtgcaagtggcgaagcttgaccgagagcaggctggagcagccgcccaactcctggcgcgggatctgctgaggggtcacggtgagtctctgtgggtgcgggtcggagggatgcccaggtgcctcgtcgccccacggcccgggcggaggcgggtccggaacctcccccaagtccggcctcagcctggagcccgcgcgccttgggcggatgcacggactgagaggcgcttggctgggctctcagcccgccactgccacccggccccgtgcgctcattggtcgggatgtgtcggctcagcagcctccaacttctcccgaatcccactggtgagtcccaggagagcgagctgagggagaaaggtccaaagggcgcgagcgcccagggcgctgggagcccgtgggacgggcacggggagggcagagccagccgaggggagcggctgccgggaggtgcgctgagcagggtccgcagctaaggtccagcgcgatccgagcgcccaggaccctgcggccgtggaggaggcgtgccctgggaaggagccgctactgggacctgaagagtgaggggagggagaggggcccagagggtgacctggaggagggctctggaagtcacgtcaggttggctcttcaggttcatttccatagttccctgcggcctctgccttggggagttatgttttgttaccgagatccgcgctaccagattgcaccggggctgatttgggggctgggaatttgccattctgctgtacagacactgatttttttttcttctttttaaaaagcaa

SEQ ID NO: 30852 - DNA, 2300 bp, Homo sapien
gtcataaacaccaaatgttaactaagaaagtaagtgaagccctagtgtgttgttgatctattcaggatcaaattaggtagagtctttggatggaaagaggatgggcagaatgggcatggagagctgagtgcacaccaggctgagtatttctgcagtgcccactctctgcggtgttatctgaagacgtttctttcttttaggtgttttttgtttgttgttttaacttaattttgagatttataaatataaatcctaaaaatactttttaagaaaaatatagaattaagtcgtgggtttggacattattaccgaagtacttgttcccatatgataaaatctaagaaaaaatcctttggaaaaaattaataaaataaaaacaaaaacatgcagctcttccagtcagtgatgctgatggcttaccctgtcaaccagggagcttgctccctagtgtgaggaatgcccaggatgacaggatgactgtctttagccagtagctaggcatcctgaattgggaagaaggttgcattaatgaatcaaagctcctctctaacataaagaatccttgagtcccgcaacctgaaagactaaagaccaatgcaaattcctaatttctaagctcttttaattcctacataaacagtcacttttgactacattatagaagtgatttttttttggctcatgaacaatggaaatttgtttctcacagttctggagaccggaagtctaagatcagggtgccagcatgatcaggttctggtgagggccatcttctggtttgcagactgcagacttctccttgtactctcacatggtccaaatagtgaatttgtttttcaatatttcagatgtaagaaatggacatttgtttttttcaatcaaattaagccaaactctgagctcttagaccaagctaggagatgagccatttactttcagtggtttttcaacgtactctttcagggttattcaggaatctgatatcatcacacaggcatagaaattagagaatagcctccatcttcagcccaccgtggtcactgctgagatccctacagtccaaatgctccagctggagtcagtggttccatttccttccaatgctcatgagctccagagcctccactcttcatgtccaggttctccaacaaccacacgccatgctatcagagggcctctcggggccttgctcagagcaggaagcatcttcttgtcattcacacaacctgccattactggaacctaccccattcttgggaaggccaatcatctccctgacaagtggactaatatataaattccccagcttctgactccacttcacctcaaccctcccacaccaggagattatttttcgtctttaagactcatctaggaatcctaaaaaacaaacaaccagaaaagattacatcctccatgaaagataggagagttgtggtggagagggatagagaagttagttgatgcgttgatgggtgacatattagaaagtcagacttacaaaaaatccatatggatctctcttttctggaatgaggaaagggaaagaaaatgctttctttctcttccagttggtccataatatcaaacaaacaacagaaacactaagtcgtgtttttcttcctaataccctattgcttctctacaggtaatcactgtgaccaaccaggtcacaggttaattcattcagtatgtactgagtcctgtgctggactttgggggtgcagcagtgagcaagacatacacagtacagcatcttccctcagcatctgtgggggtttggttccaggctccctgcagatatcaaaatttgtggatgctcaactccttgatataaatggtgtagtatttgcatataacctatacaccttctccctcctatactttgtcacctctagattacttataatacctaatacaatgtaaatgctatgtaaatatttgttatactgtattctttagggattaatgataagaaaagtaagtccatacgttcagtagacaaaatatttcccccacatatgttcagccgcatttggttgaatccacagatgtggaactcaaggatacaaaggctgtattttgccctcatagaaattagtctagtgggtgtgtcaggaagtaaaaaaggagaacaaatcattgtaaatgtggtaagtgctttgatagggatagtccctgtaagaggagttagtttagatggcattcaaagaagggggccaaggaaggaatatttaagcaaaggcatgaaggctgaggagttagccatgtactgactggtgagtaactttccagggagt

SEQ ID NO: 30853 - DNA, 2300 bp, Homo sapien
ttcagctctatcggattagttttggtctttctttaaatgaccatttcatctttcatctcctgtatcatttcactgtattccttagaattcttggattgggttttgactttcttctgaattttgatgatcttcatttctatccatattctgaattatatttctgtcacgtcagccatttcagcctggttaagaaccattgctagggaactagtgcagttgtttagaggtaagaagacactctagctttttgagttgccaaagttcttgtgctatttttttctcatctttgtgggctgatgttccttcaatctttgaagttgctgtcctttggattttttttttaatcctctttgacatccttgggagtttaattatggtataaggtaagttcagttaactggcttcatttctggaagattttagggagcaaagcctcagctcggaactcctgagatgcatactctaacttttaggggctggtatcaggcccctggctttgttctgtgaccccctcaaggttaggatcctgctgccctggagaggccaaggtgttcccagactgctggtcacaacactccaataggtggtgccatccaaagcacttttttgggcactggcagcaagatccatcctcattctaatgtgccatcagcagtgacagcacactggtgtacatgctcatagactgaggcagggcactgattgccacagaggtgctggcctctgtgtgggcattcacagtggtggtagtggtggtggcatggcaaggggtacaggagctaccagcatctatgtggccagcagcagtgtcagtgtggaggtggggctttggcaggcacagggctgatgttctctgtgcatgcaattgcaccagcagcaatggcagctcaggacaggaaatagggctgctggtctccttttgtgcattccccattgacaatggtgtcacggtaggagggtagggtccattcatggcagcagcagtggcatgctggagtgcacatgcacacatgcgccagcggggaagaggaggcaaagtatgcattccccccaatcaagtaatgtgggggttagctgtgggcgagtgcatgccagcaaaatgcatgggggaggctgtggtatgggggagatgggtgggctagcacaggtcagcagggcctgttctgctggagatctccaatggtcaggcatggtctgccagtgcaggagctatgatgcagttccctcagaggcaccctggctgggcatccaaggctgcagtacaagcaggtgcacccaggctggggccccggaagaggccagcagacaggggtgcacttaggtcagattggccccattccatgggcatgatcatcctgctatattctgatccaacagttcatgtaaggctaaagtatcctagggaagcaaggcaacccttgagggataggtgcttctggccatgatctgctgtagacattgcttcacaaaaccctctgagctccataccggctggaattctgctcctactacctctctaagcagctctccctgccaactcaagtgtccatgagggatgtggggtctcctgctgccagatttccagaggtccatggtgagagcaggttgctccttgcctgctcaactcaccctttccccaggagttattgggggccaggaatgagtccccatgtgtgggagcccagtctagtgttcccagcctccttgcccttcagcccagcatctgtgttctccctccatttattttcaatgccttctctgaagatctgtttggaatgcaccagtcctctggatttcctggtcccttggtggcagatgttctttcccactgtgtctagtcagccatcttgcctccctcacatttccatggtcagaagcttaaccagatcttctgatcaatgtcccaaaggctgtaatcaacatctgaggtacgaaggtcttcttccaagctcacctgggctgggctgtctgctccccatttcaatgctaggtgccacaggctcagggcctcttgggctctgggaggagacgcagtggaagacaaggccattatgaggtcacaccagagtcgcctagcactgttgccacctcatggtctccagcatccaaggagagtgtgggcagctggagccaggtcctcctcctcctccttctcctcttcttcctccttcgtttcttcctttcctcctccacctgcctattgcagagcagcagaaagcaaaggagctagaaaagggtgaaatcaattctttttctgtaacctttttgctttgcttttattaagttcttaaggcttttgg

SEQ ID NO: 30854 - DNA, 2300 bp, Homo sapien
tttaaagaaaaaccaaatatttaaatttttcggctcacatatctctgaagaatctaatgtcaccttgagaataagggatttgagagctaaatgtttaagacagtatgtaaagtaaaaaagtagaaaatgttcctaattagtatgtcctaagagaaagattagaaaacggtcaaatataggcccttgggtttataagctcaaagtgaaaccagtctattaatgaataaaacatcctttcctgattaaatattataaaacttatattttttaaaaaatttactgatgatataaccaaggaaatgagattctaggttgaattcttttctgaagtctgagaaattcatgttgattaagttagttttttctcttcttctttccatagaaaagtaaggaaaataaatgatgaattataaactaatccctcctcaaactccaaattgacagcaataatgttaataatagtcaatttcatgtcaagaagaaagcttaatataattgaaatggaaatgagtatttaaaatgtagaaaccttttcatatgtttcaggcaaattattttattttattatgtatgtttgtgctctttgtgggtaccacactgtttgttttaaatatcatttttttccttaagataattagtgttcatttgaacttactgaattaacattttttatatttaaatgagatcaataacatttttatttcttctctctcttttggcctcagttaacctttgtttaacgtattattatttaatattgaaaaaaatacccaactttgccaggtaagcaagggattttgttgcataaacaatacgtagtttttctgcttacctgacatagccagacattttttcaatattaaataatatattgagagagagactgaggagagagatgacaacttgacataaatgatataaatgtgccagattcttggctgcacactctaatctataggtacattatttgaggtagaaagtcaaatgttcttcttgcctgtgagagtgggaggattctgaattcatataatagcaaggagttcagtgtcactgaagttatcactgcaaatggaagagtagagaaataagggtttttaggtgtctaaacaaagagttgggatttttattgtctaggagatgaagaactattggtggatttttgagcagtgatggaacatggtcatttgcaaggcaatatcactcttggaactctgtggagataaatttgatcaggccagacctgcctttacaggtcttaatcttatgtcaaattttttttgggaagatgctcacagggtcactctgcaaaacttttccagccagatccccaatttaaagttattccaatgagaatatagagaatagtctaggtcagttacataaaccagtttggactttgaaaaatgaaatgtcctatttttatacattgctaataaaaacaacaagcttatgactgcttcctaaaaattctaggcgacgtctgtattgttttagtttctagtacatttatattaacactttttgttttagaatagttcaaagaaaggggcaccatttcattttatgttttccacctgtaaagtaataaagaactgtctacatttcatacagactttcatttcatctttatgcgactcccatgagtaggtattattatcctcattttaaaactaaagaagctgattcccaggttaagcaacttggctttcattacagaaagagctggaatttgaacccaagtctctccaacatcaaaatcctttctttctaatatatcacccttctccttgatagcacttgtataggtggaatgttgtttttcctctgtacaccttctttatagaacattttcttcatgttacctaaaggcatggtgcaaattaaaaacctgcgaatatctgcattaggataattcagcttacctaattgtttaggtcatgtagcccctcgtttcctccataataatagaataaagagccagaggagttctgctttcccatgacttacatcactctgcagacaattggcagccaggagacgggcagctgccgcaatcttcagatttctctctatttaaagttcaaagagacgctggataacaaaagaaagaggtaagcgtggcctgacctagccacccaccaacaggaataatggctgaaaaaggtaagatttaaggcataggattctcttggcaaaaaaaaaaaaaaggcttcttgactttggttcatttatgtttcttggtgtttcccagtcactctaaaaaatgtgatatctatgctaaatgaccattaaccatatat

SEQ ID NO: 30855 - DNA, 2300 bp, Homo sapien
aaaactctgaagcatttagtcacctaacctattgaagaagggtgagctcacctgggccttgagtacctgaatcaagtcaactttagaagatgaaactggggggaaaggggagatacccaagagaatgtgtcatactcagtaataagtaaggtagcttgttaatatccactatcagttttgggtataggtgactaatatccttctacactgccattattgaacttaatgtctactttcagaaatgtatcctaggtgatctcccagcctattcctccactctgaatatttcagtctcaatatacaaaagggtttgatccctttgaacatgcagcaggcatagacgtgtctggaacatgaggtacaaatctgagaaactaacagtccagcttacctgattcctaaagaacaacccccatttctatccccacatctctatgtctgggttccccaaccccagcttccatcttgcctgtttttcctgggttaacctaatggacacaattattagcatctccatagtctgaaatttgtaaattaatgtgcatcagtatctgctctggaaagctgtggatgatgcatcagtatttagcagttacatcaagcaatttagtcacctagatttgtgatttggttggtggcctttcagatgggatgtctggcagtaggaagatacctcctcctggatcatggctcagctggctctgagttcccactttaatttctggcttagtggaagctaggaagtgattcagtggaagtgaaattgaatctcaaagcatttcctaaataagcaggtgtccttttttggttgaggcagactctggctccctaaggcagacagaggggatacaaagtatattcctactgttttcaggctgtctttgtttccggagtaaaagatggaatagaattttttttcctcagtctagcaccacttagtaaatttctttccagtttattataattatttttaagttttagcttttgatagcattgcaagtctttttttccttttgctgtcacaagcaatttaactgagagctgttagaccactgtcatttgaaacaggcatctctgctaccatctaccatctgtttaactgttattaaagtctcagataatgtgtatgattctaaaatacacagtagtaagttattttgtgttcatttatctgcctagagtctgagaagttgattctttgaaaaataagccaagttgtagtttatctttcaggagggaaaattttcttggtcaatctccagccttctacttatttgtagtctaccgttttgattatgagttctggaaaactctgtataacagaaacttctcttaaattgttatgaattgttacataagagccacgatttctcatctgatccttcaaatagatgttcccaggaagttgcttgatattggatttcaagaaatactctatttcctcaggaattggtatgttgtgattaaatacaactctgccgtcggtgattgtgattcagactcccacatggtggggattcagtgagttgtgtttcaacagcatagtgatttggggcacatgttttataatcctatacatggacagtgagaatattgttgctgtgtgtggcagacacgtggtattgattgctgattctgaacacagcagccattctcctacccctttttctaagctgacagaacctgactttcatgagtgaggctgcaaatgtcagatgcccccttgcagctagaggtaggcatatgacccagttctgactagtgaagcataattggaagtctattgagaggctcttaggaaagattctcttccttgataaagagtcagggtgggagaagagaagctccacagcacctgattagaaaaaagaggcagagagaccccaaccctctcttcctgcctatgaatattgatgtgagaagaagtggtatttggagctactggagtcattatgtgacaaaaagatgtccttagcaagtaagggatggcactcaagccactgaaacacccctggacttatctccctccaaaccttgcagtagttattccctgtagttaccgatatcctgttcttctctactcctggacacacagggacacagcatttctccaccaaagcatggctccatgactcggtagatgaaatgaaatgttgccagaagcgtcgtgtgctatctcgtgtttgactctctacctgctcttcccctgcagtagtaatcgtgggagcatgtatatttacggaggtgtcataagatcaaacagcctggaaggaagagccaatgcctgaaaaacagctgct

SEQ ID NO: 30856 - DNA, 2300 bp, Homo sapien
agtgggaaatgcagtgtctcagatggttgatgagttacctgtactaactgggctgtgatcccagcgacttctaggcaggctacattcatttggtaccaatgtttttaactgaaaatctaaaaattgtgaatggattttaaagctacctataggactgaaaaggcgaccatgtaaatgcattctagttctttcctgatgctgttgtcttggttatagaactcatttgaggtttacaaatcaataggttgtcctctggtcatgtcaagtaattggggacttggttaccagtatgaattttcaggaccacacgggatttggagggactgttaaagcattgaatggggcctagaaatgtcccgtgctctttgccagaaaatctgtatagctggaagcttcctcatctgtgaatgtgggataaaaataatacctatctcataaataaatatatatcttatccttagaaagctgcctggtacgcagtaaatgctcagaaatgttggctaatattaatgttattatgactacaacctaactaataaggaatggaccatttcagcatgaattagggagtgtaaagtttattttcatatctgtcagcaagggcgtggaggtgggggtaaggatcctaatttctaagactcgtgaagttttataccataacttcctgtgtttagtcctggatttctgtttgtgctgcttgttggggtcttgcctctcatctaagtagacacaaatgtaaataattcaaaaatgattcttgaattctaggaatcccaggttaactacagattatctctagcatttatcacattgagggaaacaattacattctgaatttgtttaaaacttgagccagggccaggcgcggtggctcacgcctgtaatcccagcactttgggaggccgaggcgggtggatcatgaggtcaggagatcgagaccatcctggctaacaaggtgaaaccccgtctctactaaaaatacaaaaaattagccgggcgcggtggccggcgcctgtagtcccagctactcgggaggctgaggcaggagaatggcgtgaacccgggaagcggagcttgcagtgagccgagattgcgccactgcagtccgcagtccggcctgggcgacagagcgagactccgtctcaaaaaaaaaaaaaaaaaaaaaacaaacttgagccagaaataaattaaaatctgaaagtgttctatatcacctccatcttctctgctaaataaatgtccatttatgagtcatactctttattcctttcaagatgtgttcgggttgggatccacacatcacagtgtagtggatattggttgaacaatgaatgagcataagactaaaaatccccaaaactaagagaaagggtttatagacatgtatgcattttttcttttgtgtttacttgtgacaccctcttcaatgagccccaattgtgttttgttgtgttttgtttttttcctttacagtggagccctttaatactcaaccccagttatactatattgcactttctaggagctacaaaggtagtttctcagcatggtgctttgttctggctggcatatttctttttaagtggttatggcagcatgctttttcatatcactccatcttcctgcttaccactttgaaacatgcatctgttgctttaaggcgcctgaagttcatagcagtctatgagctgtggagacttttcctaccactttgtcatctctgggtaggaaacttctgggaaagcttgatgtaagaatggaaggctgaagtccttgcaaagtaaggttgataagatgtgcatgaagttgtgcaaacatgctgtgagctgctgctttcttggtttgaatatatttcaatggctgtacgattttggtttatattcatttttcatggagctgtcattttcaaggcaagttgttgatgtgatggcatttgcttaacttgtggttggttcttttgtgtcttcagaacagacaactccagggtctgaagggactgttcaataagaatcctaggcacagttcttcagaaaacaattcccattatgtacggaagcgatccattggagatagaattctgcgacgcacagctagcgccccagccaaaggcaggaaaaagagcaaaatgggcttccaagaaatggtggagataaaggattctgtgtccgaggccacaagagatcaagatggcgtgctgaggaggaccacacgcagtttgcaagcacgccctgtctctatgcctgttgacagaaaccttctgggagctttgtcgctgcctgtatctgaaacagcaaaagaca

SEQ ID NO: 30857 - DNA, 2300 bp, Homo sapien
atcttgaacactgcattctaatgggtctttacaaccctgatttctacaggtcctagccaaatgggtgaagtaattttgcctttatttcccaatgtatgaagtagggtgttgagaaggcctgccacctatgtatcttggaagatcctctggtgatttgacaatttacttcaagtttgggaactcttagaagaaaagcacttcaaattaaaagagttaataaacttgtttagtacattttaaaagttcagccttttcctctcctttcttaactttggttgcatctttatatcagggtttctcaaccttggcactaatgacattgtgtactgataattttttttttttttttttttttttggtagagagctgtcctgtgcagcgtagggtggaaagcaacatcctcagcttctattcattatgtgccaatagcacccctgaagtgtgaccaccaaaaatgtcttcagatattgacaagcgtctcctgtactggggggaataattgcctcgttccctgttgagaagcacagctttacactaaacatcatcaagcactaattaggcttttttttttttttttttttttttttttttttttttctgaggcagccttgctctgtcgcccatgctggagtgcagtggcatgatctcagctcactgcaacctccgcctcctgggttcaagcgattctcttgcctcagcctcctgagtatctgggattaccggcacgtgccacaatgcctggctaatttttgtatttttagtagagacagtgtttcactatattgcccaggctggtctcgaactcctggcctcaagtgatctgcctgcttcggcctcccaaagtgctgggattacaggcatgagccaccactccctgccactaatagattttttgtaaatgaattgacaatgtgaaaattccttgttaaaactccctgatgtgactgcaggacaactcagggttgtcagtttgttgttgctgttgcttttccctcttctagcactttagggtaaaacctatgtgaagaaatgaatagcaaacagattgtagtcgagtaaggaaacctacctcagccacaaaggctcatctgtaagatggcccacagcatcaggttttactaatgaggagagaaggtaggtctggcggtcatagcccgtattgtggaacttgtgcttgtcatgaaagcctggaaaaagtttttctgcacattgatatattaggtgatttaaatattggtatatgttgatatattaggtgatttaaatatattgcctattatgtctgaagacatgtaacggaaaactagaaaaaagtcaatgaacctgaatttgaaataatttcttattctgaggaaaaaataaggttgagagaggagtaaaatcatgtaatcagccctgatctcctttctgccttagccaccaactcctttaggtaattatttacatggatctcatgttttctgtgcagaaacctgagtgctggtgtagaatgaatgcttggctggtttttatttttattttttgacaaagactagtatataattctatcaaagtgattttgaaatgtgcgacgtaggatgctataaaacacagaattcccttatgttattttatcctcaatcataattttcaaggtgggggttaattatatattttagagtcaatagcttcatttaatgacattcagtggtctcttagaagctgttagacttttgaataaataagacaaaattacattatatgagtttactttctttagacttctcatctcttttaaaattttctcttcttttaaaagaaacataatatatctaccattgtttcctgatgcaaaatattagaaaagccatcccatgtggattggtattttgttcatccattatgcttagcaaagtatatttgctcagaggaattttttaaatgcatttctaatctttctcattttagaagcattttaaccatcatcagtatcgcaaatactgtcactaggattgtaacaacacagtgaatactgaatcattttcaaaagtccctgtgagttgcctgcacctgacgcctctggactgtgttgctcttttctcaggtttcctgttatattgtctatcgagaatcactgcagtatccagcagcaaaggaagattgctcagtacctgaaaggaatattcggagacaaactggacctgtcatctgttgatacaggggagtgcaagcagcttccaagccctcaaagtttgaaaggcaaaattctagtgaaggtaattacttcaagtaatgcaataaaagacattcattatcagcta

SEQ ID NO: 30858 - DNA, 2300 bp, Homo sapien
tgtttattgatatgatctattgtcagtggtcagtgaagttctaataggcttttctgggaattttggcttggttggtttgatttggtggttttgtcttgaacctttaattcctcgtgtgagatggttaatgtggctgtcaagaattcaactatgtagctttcattgcctaaaagagtgatgctcagtggtggccgaatatactaatttatatcaaactcaatctcaacttttgttctgtgctttaaagtgagcatttcaagtttgtgtgtttattttaagtaattttttttttttgaggcaaagttttgctcctgttgcccaggctggagtgcaatggcgtgatctcacctcactgcaacctccttctcccgggttcaagcaattctcctgccttaacctcccaaatacctgagattacaggtgcctgccaccacgcctggctaatttttgtatttttagtagagatggggtttcaccatgttggccaggctggtctcgagctcctgacctcaggtgatccacccgcctcggcctcccaaagtgctgggattacagtcatgagccaccgcgcccagccttcttaagtaatattttattatttgggaatttgatatgtcagataaaatgagtaaacgcaacctatacttcatcttctttgtagtattgaatcctgaaactatacttaattttttgcagttcctccttgatttctttgaggaaaggaaagacttcatggagtaaattgtgaacatttgttatgttgaagtgacctttaataggcaccctatgcatacaatgttaaggtgttggatgagattatctttcctagttaagataaaatatttagccaaaaaagcagaagtctaatgttgctgaggtttgtttattgtgtttcttttatctgttgtttctaacagcatactgcttgataaggtaggtactcagaactaggtattttgagtgctctaatggtttatacataagtctgtatattagttggtaatctttgtgaaataaaagctatttctggttgatataataaaaaaatatttggaagggtactggataacttgcagaatcaaggggaaaatgggatcatttgtcagtcttaggaagaataagaattatgacaactgtcacatcttagagtagccaactaggagtatctcagttgttgaatggttcagttctgttttcaagcaatgatatgctcaggatttatgttcttgggagggagtcagatttgctccaagcttaagtcaggtgtgtctactctttcactggggtgattggcaggccatcaaaggcacacaaaatggtagaggatgtttctaaaggaaaagttggggcaccattaccaaacaaggggaaacaggcaaaaataacagattcctatatccagcaagatttgtctcaaagcagagtggatttaaatgacaactttaacttggactataagtgatttggatattacctggattcattcaacaagttattcttctagaagggttatcttagcagtttaatgcatcagcaagtgttttatgttcaactgtgaaaacttgatttttttctgattacatttacagaaatttatttagctattttcaaacatcacaaatatgtaacatgaattcatatgtaatcattatcccattttaacaacagtcagcattttgccaatcttgtttctgttgattgcatttaaagcattattataagatacttttataattggttctataaaaactcacaagacttatcatgtctgagaacttactttaagaacataaatccaagtatcaaatggtcttaagtctcataccaaaaaacagaacagaagatagccctatgaagtattgcattatttacctggaagtagatttttttttttttttttctgttagtaaggctttttactgacttaagcctgttgaatcaattccttaacaactcacttttcagattacctctaccaaatttgttctggtccttggagtctttgcaggtgaatcagaggttttatttgactctaaaacctggacaccagtatgcctgtgcattgtgtgatagctggatacactctaatttcttttgcagttgaaagatgcatgagtgtgatgcagtccgggacacagatgatcaagctgaaacgtggaaccaaagggcttgtccgcctcttttacctggatgagcaccggacacgcctccgatggcgaccctctaggaagagtgagaaggcaaaaagtaaaacaaatctttgaattctttgcttggctggacatagtaacacacgggtt

SEQ ID NO: 30859 - DNA, 2300 bp, Homo sapien
ggaggttatttgctactgctgaagaattggatatttaataataagtagatatctctaggctctcaaaaatctgtgagtgctcctttgtggtcaaacagacacttatgggccatggctgctttttaaaagcttgcccacctgccctatgaagctgctatgtgctccccctgggtaagtggcttggccctcaacggtgccccagagccactcagaataaacctgccatgtgcttgtgtggttgggctccatatccaatcctgcatgtcagccttttcagggaggagcctggggcttcaggagcaagaggtgagagggatgaaaaacttattatgagcaagactcccagtgggtaaagtgagcacataaaaagtttgtccccttcctctttcttgaccccagattggagtggggagggggatctttggaaggaagcctttccaaaacttcttgggagctgggagtgctttggtcttcacctcttttcaggaccgagcaagagataaacccaagatgcctcttgctttttgggcatgtttggttctgggcagacaaaggaacgagatattcgttacttggtgttaccaattttgtgttaagaaaacaccattgtctttttgtataaaattatctgggagtattaaatacttggattatttagcaggaatgggtatttctcagatatgtcacattttggggtgccatcttgtgttcggaccactaattaattcagattaagcaatgaagtccactcctttcctgggttgatgtaaagaatttcaagattaataatagtaaaacaataataatatataattgtgattctaagcactttatgtgtattaaattaattactgcaataacattttgaagtagaaactattactatgcccactgtacaaataaggaaatggaggagcagagaatttaagtaaattgcccaaagtctcacagctagttggtggcagagtcagtctttgaacctaggcagataggctcctaaactcttaatggctattttgtatagtgatgtatgtatgtatggtagattgaatcttgcaagaaggatattttcatcatgtatttaattgtgtgtgcccacatatacctttgaaatccaagtttccctagagtatttgaaagtaaatagtgtagtttgcaatttggggcaggggatgtgcaaattgggacacaggtgaattggatctgggatagagcttggcaccttggaatcaagggatgagttagcaatctaggctgggtggccctggtgggaattgcctaaagggcctgacactggtatatgcagaatgggagatgctgggagtcctaagggccacaggtgggtgagggacagctgaagctgggagaagaaaatggcaatagggtcgatattagaaagggaatgctggaatgagagagttaatactcaggatgagaggcttagttacaatgcctcaatgcaagactactgtaaattgctactgtatctgcttatgtgtctgtctgtctacctatctcttcaaagaagttgaataaagttgcaaataatgtttacatagactttagggaaaattgcactataataatgtgtggtttcattcactaaaaactgacttttttagacccattcatgctgtctaccttgtccacgtccacaggcatgtgattttttttttaaacatgagaaatagcctccaccgagtaagtgttttcaaactgtaacctcattccttctaagttggaaacattccagtcttttctgtgatcattgctatgtttgtgtgtgaataaaatcaggacaaaaaaacaaggaaaaccctcaacgctttgaatatgcacttaacctgacttgcacaaaagtagcctatagggcagtcgtagcttatttcttaatggattgtgtttgcctccgatggagtgatgtttgcttctgagagtgtgtgtctgtgtgtgtgcttctgtgtctctgtgtgtgcatgttcattttctgtattcagtctgcgtcactcccacggtaatcagtgtttctcaatgacctctgaaggtgaggagggtttctttgatggataaagacctacacttcccagacattaaatgtgcataatgccttgagggctttaacgcgctgcacgaagcatgcatgtctcatacccaaagtagccacagcgcctgcattcccacaatagcggcagccccgagcagatgcttccagcgtgcttatctggctgtgcttttcactttgggacaaagttctataatcatatctcatggatttattttctccacactataaagcctga

SEQ ID NO: 30860 - DNA, 2300 bp, Homo sapien
ggtatgggacattggaaaaccaaaaggagtaatgttaggcaaatgattgcctaagaaatccacacttcctttccttttattaactaaatttattttaaatctagtaacacagagatatttttatttgaaatagtgattatggattaatatgtatctttgtagatggattttccccaatatcatttgtgttccacccttgatggaaatttgtaggtatttttgtgatttggccaattgcctgtataagagacagtgttgtggttaactgcacagagtgagccaactggctgagttgaatgcctgcacaacatcccagtttatcacttcttggctaggtgaccttagctactgccttaatcattctgtgcatacttgctctgtaaaactgggattaataatagtgcctacctcatgagttgctgggaggatgaagggagttaatgtctgagaagcacctagaacaatacctggcgcatagcaagcaagacccaagtgtcaacgattcttatttacttactttcttgtcttttctttttattgagacaagagtcttgctctgtggcccaggctggagtgcagtggtgcgatcttggttcactgcaacctctgcctcctgggttcaagcgattcttctgcctcagtctcctgagtagctgggactacaggcgcatgccaccacgactggctaattttttgtatttttagtagagatggggtttcactgtgttagccaggatggtctcgatctcctgatctcatgattcaacctcctcagcctcccaaagtgctgggattacaggcgtaagccaccacgcccggctgttatttactttctattggctataacacagagacaatacactccttgaagccaccactcataatatgtattgttaggaatacaacatagtctgttttgacttttaaaggtaatatttgcataaagtaaaaaaaaaaaaaaaactccagtagtataattgcactctccaatataatagccactagccatatgtgactaaattaattaaaattaataaagttaaaaattcagttccttgatttcagtagccacatttcatgcaggcaatacccacatgaagctacaggacatttctatcactgaaaaatgtttattagaggtggcagattgtgaaacctcttgccctttcctaccttccgtttcccggggtagtcactgttactagtttcttgtatagtatttagtatttatttatttttttagatggagtcttgctctgttacccaggctggagtgtagtggcacgatcttggctcactgcaacctccgcttcccaggttcaagcgattctcctgcctcagcctcttgagtagctgggattataggcgcataccaccaggttcagctaatttttgtattttcagtagagacggaatttcgccatgtgggccaggctggtctcgaacccctgacctcaagtaatccgcccgcctcggcctcccaaagtgttggtattacaggcaggagccaccacacccggcctcaatatatatttttattacataaatgttaccatattatttgcactgctctgtatctaatttttgttttatttaaaatgtattaactactgttttctaacagctcaaagatttagagcatgtgatattaggctttcagagcagctcttaaaactttaaagcacaatttgaatataagaaatatgcataggtttcaaggacaggtcgtatttggttaaaaaatatgcatatgctgttccttgggagcaggtggaaggaatgaattacttcaatttccttccttgtgtggcacctgcgaaaaccacgttgcagctgagtgaattgaagtcaccagctgacaatcatcctactagcttgatagggaatgcttcagcccccacagtgctgctcagagatctcctgcatcgtggaatcaccctgcataaaagcggttggggcactgttaagacgtctgatatctggggcccgcccactggcgactgcaggtcgcggggccaccccggtccgcggggaaggggaccccgccgccttcccgaggtgagcggcgccccctgccgccagccggaggagctcagggccgctcgcaggaggccgggaacatggcggggcagcccgcggccaccggctcgccgtctgccgacaaggacggaatggagcccaacgtcgtggctcggatctcgcagtgggcagacgaccacctgcgcctagtccgggtactggggccacgcagtctgggcgggtggtgggcgcggggcggcacagagcgaccctgagaacaa

SEQ ID NO: 30861 - DNA, 2300 bp, Homo sapien
ctcatcaagtatttcctttttttttggaaaaaaaaaaaacacctactgattgtgaatggctttattggctgcttcctttaactcccacaactctctgaaatagatgttatgaactctattttaattttcatcaaaatggaggcttaggttaagtaatctgtccaaggcacaactactgttagagccagggtttgaatccagcacaatataaatcccactcatggttgttttggtttaatcttgattggacttaaatgacaccgttcttttctttaacacccagactggagtgcaatggcatgatctcggctcactgcaacctccgcctcccgggttcaaacgattctccagccccagcctcccgagtatctgggactacaggcatgagccaccacacccagctgatttttgtatttttagtagagacagggtttcaccatattggccaggcttgtcttgaacccctgacctcaagtgatctgcccgcctcagcctctcaaagtgttgggattacaggtgtgagccaccgcgcccggccaacactgttcttttctgcaatctattcttctacttaacaaagattagaggactttacagttgccttttttttttttttccagacggagtctcactctgtcgccaggttggattgcagtggcacgatcccggttcactgcaacctccgcctcccaggttcaagcgagtctcctgtctcagcctcccaagtagctggggctacaggcgcgcgccaccaggccgagctaattttttgtatttttagtagagacggggtttcaccgtgttggccaggatggtctcaatctcttgacctcgtgatccacccgcctcggcctcccaaagttctgggattataggcgtgagccactgtgcctagcctgccattacgtttgtaatcccagcactttgggaggccgaggcaggcggatcacgaggtcaggagttcgagaccagcctggccaacatagtgaaaccccgtctctactaaaaatacaaaaattagccgggcgtggtggcgcgtgcctgtagtcccagctactcgggaggctgaggcaggagaatcgcttgaacccgggaggtggaggctgcagcgagccgagatggccctactgaacaccagcccaggcgacagtgtgagattcctctcaaaagaaaaaaaaataataatctttctgccagaggtgagagagcagaaaaaaaattaatcagattctcaaattcctgtacgtctcttagtagagacgggtttctccttgttggtcaggctgatcttgaactcccaatctcaggtgatccgcccgcctcggccttccaaagtgctgggattacaggcgtgagccaccgcgcccggccacaagacgttttattgcaacataaaaacaggatgtaacgagtcttccaatcaccaatgtaattagagttggttaccaagtttccccacgcgtcttccaccatgagggagaaacggactgcagacaaacctagcaccccttgagcagtttaattcgtactataaatatgtaggcaccgtaaggacgcgattctccagtttgccaggcctttttctatccttttgggggcacaaggcgaccttgcctcctgattcaaaaacttcgtaaacgtcaatccttctacccttttctggtcagcccacgaaagcagcagcatggcacaactcccagcctagagttcgggcactgcctgtcgtcagcataacgaagaaacctacacccacgaagacttcagaccccacgtgattacatcactcaaccaccagcgctggcctggaggaacccgctgtcacgtgaccgctcgtgcccaatgaccgaggcccacgctttccagaccgccacagtcgctgtcacagggcctgagtttgggcggcgccccgccccggccgcacggtgcgccggcgttaatcctccccgaaggttccggcagccaagattgcaggttcccaccaagcattgtttccgaactgggccacgagagcgtgtccctgattggcttgctctggaggctgggaagggacctgttagagactgggaccacttcctgaagcgcgaggcaggaagttatatgctttttctggagtcctgtagagaaagtgctctctgccgcattgatagcagcgagagctggaggtgttgggtcgggagaccagccgttcgatcccgccgcaggtaggagctggtttccatcctggcaccacggcacacacctccagcctcgagcccggcgctgctgcccgggggtctccttcaggctctttgacgccgttc

SEQ ID NO: 30862 - DNA, 2300 bp, Homo sapien
cccaggttcaagaattctcctgcctcagcctcccaagtagctggattacaggtgtccaccaccacacctggctaattttttgtatttttaagtagagacagggtttcaccatgttggccaagctggtctcgaactcctgacctcaggtgatccacctgccttggcctgtcaaagtgctgggattacaggtgtgagccaccgcacctggccaacaagtctgtatttttaaacaagtgctccaaggaagagtaagatgagaaaaggattaggaatagaaatactgaagaaatccaacacttaaagctcctgaaggccagacataggaaaaggagctagcaaaggcaaccaagagcaatcacagagataaaaagacaactttttggtgcattttaaggaaaatccagtttcaacaaagagggatgggtcaatagagtcagaagctaaagaagaaagaatatcaggatcctatattgtgtgcatgccaacattcttagccattaagcacaggtgaccactagaatttatttatttatttgtttattttgagatggagtttcgctgttgtcacccaggctggtgtgcaatggcatgatcttggctccctgcaacctccacctcccgggttcaagcgattctcctgcctcagcctcccgagtagctgggattataggcgcatgccaccacgcctggctaatttttgtatttttagtagagacaggtttcatgatgttggccagcctgttctggaactctgacctcaggtaatccacccgcctaggcctcccaaagtgctgggattacaggtgtgagccaccacgcccagcctagaatatatttaaactaagcattgtttaagatagatgggacttagccaatccttaatgccagtatatcacatcacattccactccattaggggtggatgtttatgtaagttgaggttctcctattggttactgcactcttctttagattgtgcatacagacctacccagagaagccagtatccatggctttggagagttcaaatattcaattttccgttcaaaaaaaggtaagcgaaatacttaagtctcaggcccactaggaccttaagcctttcgtttttgtaaatatttcactaataaactgtctacactttcccagattgggcaggccttacattctatatatactgagaggcacattatctcactaagcctcaatttcctcatttgtaaaaaggataagaacatcaatcctaccttactactttcacgggattggttaaagttagcttttaaagtattttctcactctggctccttaataccctagctacagtctgacacaagaatgactgcagcaaaatgttggctgtattataataaaaatatttgtggaaaggctttgttagctggaagccatctcaagtattattctttataccccaatctcgatttaggcctctaggtaaccaaattcaaagtaacacctcatcatcatgatggttgccaaggggtaggtggagggactgcagccccttccccacaaacaattccaataaaaacactgttgtgcaaacagagcttcacgaccagttccctgggccagctgctcaccagattaccactcccaaactcccttttctttggaaatactgcacctgctgtatttgtggggagctgtataacttttgaagtatctaagtgatcagttcctacaatgacatccttgagatatggccacggaactttccaaagcagccttggcctccttcatgtccagcaacctgagataaggccacgccaccggctaagagttccgccaggggcccagctctcaggaggcctcttcggtgccgccagcctcccgaagtcatccaaggtagcaggcaaatccggcagcagcaaactagctcggattcggcttcggtttttctcctggccggcgccacaggcccctcctccggggcgggctcctcggtgcgagggcaggaggggcggagccggtggatgccgcgggctcctcctcccaagggcgggccgcgggagacccggccggctttgccggcggggaccgggctgggggcggggccgggcgccgcgagcccctcctctcgagggccggccggtttggcggcggctgcggagggtatctgaggctcggctgccaagccgaacgggctctggctcctcccagtggccggccggggcggaagcaggaggcgggggcagcgtgcgcgctgctggtcttctctcccgcggcgctggggcccgcgctccgctgctgttgctccattcggcgcttttctggcggct

SEQ ID NO: 30863 - DNA, 2300 bp, Homo sapien
gtgtgaagctcatccagattcaaggggctgagaaacaggccccacctctcaatgacaggagtgtcaaagaattagttttaaaactggcacaagtagataattatctctatttttatagatgaagaaaataaagcatatgggagttaagaaatttgtctaggatcacagcactggtacgtgatggagttaggatttgaacccaagcagtctgactccagagcagagctcttaaacacaacagcactgcaagccaaggacattgggaagccctctgtctctttggctgaatgagcatagtgccctttccacagttccattgcagagccccccattgaaacatctccaagaatattaaactggggtgattatctccagtctacacttcggggagtctagttgctatgcatataatgttgccagaactcctcaatgactcaagggatgggagcaaagagagtagttgaagaggctgtcgcctgctggtgctaaaagttcctaagaccccacagcatcagatgggactgaccctgctagttggtatcagttgcctcctttgatacatgcttcaggctgcacattacttggtggttacagttctaaccctagactatcctggacagtaatatcaaacaggtttcacccaaatgtgcaagagcccacatggctgttaattggttaatattgatattggttaattaacagccatagggatcctcaaagacctttggcaggtctttgagagtgacagtggactaagggcaagtgaaagggggcaaggcgtacattaaaggaagcaagataatccaagacagcagtagatgacttgttaccaagccatgtgaccgaggtgaccacattagttcagatagtaaagggatgagaatagcagtgaaggaaattcttcctccataccgtggtggcagaggaggccttatgacagcctattgacagactttccaaaagagctaactgcactttcctatctctttaagaaggcatgcttctttcctccttcctctcctgctcttctcagggactctaaggacttgctataactctacaatttttaacttacggttttgtcatggaaagaaaaatacatgcaccttcccaagttctttacatgcagcaggcactgagatagttgatccagaagagacttaagttgattgagggggagggtgcctggtgcttaacgggtcactaaacaactctgtgatagacccctaggtggacactgacatcattatctcctaaactaaaacagagtgagatccatgggtgtgtgtgggtcaaccccatgcatcttaaccatagggccatcagcttggctttctttgtttctcccaaactagttttcatgtacactgggcacacacatacacatccatgcacatacaggctcccaccattccctcccactcttctgttttttcacaccagttttggccttcaccttcccaattatcagatgattctcatggcttctatttgtcagaagtgctgggaggggcagttactgaatcggttatgagggattaccattctcacattaggaatgaaagagtgcctgacatacgttatgtggttcactgacattcaaagaaatataaaataaatttaaaatgttcaggtttgcacaagagaaataatctttcccttgcattgatactgttgaacttatttgaggaaattcacattaaaacttttaaaactccaaagggactctaatcaggaatggctaatgagcctccagaaatcttttataactctaacatgattatcgaatgtaatttaccaaacctatatgaccaaaagttcagagttgtcactattaaataaagcaaaagtcctaactttgcggaagaaacagccactgccaaacttcagtattacaaagttgttgggagttgtttttaaaatttccgtgttcgaagataccacaggtattggccagcttacctcttcactaggaaaggttagagatacattttcatcccaagccacagactgggctcaattacagctttgtggcaggataaggttaagagaggtggagtgggcagggacgagggagggaggcagaagcagaaaaatcaattcagattactttgatgacagtgacttccagtcttctctgaaagatctccacgatgctggcagcccggacaggggcagcggggagtcagatctcagaggagaacaccaagttaaggagacagtctgggttttctgtagcagggaaagacaaatctcccaagaaagcctcagaaaacgctaaagacagcagccttagtccc

SEQ ID NO: 30864 - DNA, 2300 bp, Homo sapien
aggaggtgagctttaagggagcatgtgcgcgtgtgtgaagattcatgtcagcagagatgtaagatgtgatggcaggtgggaggtgtgagtgtgaagctgttagaccgaatgaacagtttatgtccaggagtcacagttggaggagagtcacagctggaatcatgtggtggaaaaacccatatgtgaggagtttctttgcttttttttttttaaactttctattttgagataactgtttattcatatgcaggtataagcagcaatagagagattccatatatcctttgcctagtttccccaaatgatggtatcttgccttgccacagttcaatagcacaatcaggaaactgatgatgacacaagcccctgcccttattcagatttttccaatattatatgcactcatttttgagtaatttatatttagttccatgcagtttggttacatgtattgattgatgtgaccactaccataatcaagacacaacagttccattataagaatcccacctctacacttttatagccatagccatcttcttcccttttgtcttttctaacccatgacaattatgaatttgttattcctctctagctacaattttgccattttgagaatgttatatatatggaatgatacagattccaaaatgcaaccttttggtattagctttttttttttcccacactcagcgtaagcctctcgagatttattcaactggttgttttgaccaatagttcattccttttacttgctgagtggtatttcgtagtatgaatatgccacagtttaatcattcacccattatggaatatttgggttgtttctagattttggctattatgaataaagatgttataaacatttgtgtacaagttttcatgtgaacataagttttcatttctctgggataaatgcccaacagtgtgattgctgtgtcatatagtaagtttggaatgtttagtcttataagaaacttttctggagtggctgaaccatttaacattcctaccagcaatttatgagggatccagtttctctgaatctttgacagcatttagtgttatcaccatttgtattttagctattgtgataggtgtgtagtgatctctcattgtggatttcatttgtatttccctaatggctaatgatcttttgatgctcttatgtgccatctgtatatcttcttcagtgaaatgtttgttcatatcttttgcccgtttaccaattagattgtttatgtttttattgttgagtttggagagttctttgtatgttctagatataagtcttttgtcagatatgtggtttgcaaatattttctcccagtctgtaatttgctttttaaaatccccttcacgtggtatttcatagagcagaagttgttaatgttgatgaaatctaatttatgagcttttccttttatggattgtgcttttggtgtcaagtctaataagtcttcacttaactctaggttctgaggattttctcctgtttttacctacaagtttatagttttacattttacatttaaatccatgatcaattttgcgttgatttttgtataaagatgaggtttaggtcaatggttcatttatttttgtttgttgctgttctgctttgcctcgcttatggatatccagttgctccagcaccatttgatggaaaagctattcttcctccacagatttgctcttcatatttgtcaaaaataattagccatatttgtgtgaaccctttgccttttacaaccacttgttgatatttgtctatcatttgacagcaacatctgaaagaggttaatggacctttcacccaaatgaatcatgcctctagtataaaaaattatttgattacaaaatatttaataatttagagaagtctcattacatactcatgaatcatccctaaggctttatggtccttataaaaacagattggcccagatcccaccaaaatatttccttttacctaaatagaaagacatgggaaaaagttcccatattttttttccccagggccagtacatagttgcttatgtttgactctgagtactttaaagggatgagaaaagtgattggccaccaaaagcctcctttatgcacaggcctgggcagggacacacaaccaacagctctgtcgggaacttaggagcctgctcgcctacaaaaatgataagagagatctaaagaaaacaagctaaaccttttgagggacatactgaagccagataacccaaggtattcacagcaagatacagtgagtcttaaagttaagcaccgtgcaattagctttgctt

SEQ ID NO: 30865 - DNA, 2300 bp, Homo sapien
ctcctcttcatgtaacaggctcaaggcccccactagcaggcacagtggtaagttctcaccctaaactccggaaacgcccttttagggcaccatcccggttcagagctgtttaggcaaactgtgcttaaggagggacctcctcgtacacagctgttctgcttagacatggattttcctcctccagccctttctgccatgtcatcaatacaaggtcagaaagagacactgagtcagcaatgaatatgggaattatctgcacatttagcagtggaatcctagaggcacgggaagagagagcaggtaagtggtaggatccagttttaaacttaccttcttgttgcatacattgaaagtaaacatcagaaacgtcttccaccttaaaattttgcacaataatttattgtaccaaattggttcaattccattcctctgttcattcattccattccacacatctttattgagcacctccccttggcagtaactgtgtcggtgggaagtcagatgctgtccttgccctcagatagtgcacagtcttcagatgaaggggagaggagaaaagaagcaagtgctggttaggaggtgggatgaaagcttagattttgtgattcacaaaaagccatacacttcttgtctgcagccctaccgtgtgctttgaacataggagcagcagttgatggttttgcctccatttgactgttacagatcccagcccctgtgttgtttcctcaagcatttctggaagtccctgaaatgcatctcatgtgtggtcgaaagcaagcctggtcagccttcacacagcgtctgctgtttcttccttctcactagcctgcctcttcggggttctatcatgttccactagagaccgctgcaggtgtgctagagcttggaggtgggaagtggggagggcacctctccttctcatgttgccttccactgaaaggctccaaaggtttacagagtcttaagtgaaatagcttgttcaggttgagttccaggcttttcttacccttgacctaggttggagtcaatgggggatagatcagagaaaaacctcagtgacagccactatgtgattctcaggattgctctcctcttctgaccaccctatttctccttccacagacagttttctgtctatggccacatggccctttgtaggctggttatttcccactgtcaagattctgggcaagcccgcctctgagttccatggcatacctgaaccccagcggagactagggtttacacagagagaaggtgttgttctagtgtggagtttggggagagggcactagacataccccagaggcatcattcccctcttccttgtgtgtaaaggggagcctctgaggggtctcagccctgaacacagtctttttgagggagaggtttgaaactctgttttaaaaagaacaagactatttttctttctatggtgtattagttcattctcacactactataaagaaatacctgagactgagtaatttgtaaagaaaagaggtttaattggctcgtggttctgcaggctgtacaggaagcatggctggggaggccttgggaaacttataattatggtggaaggcacagcttacatggccagagcaggaggaagagagtggggagaggtgctacacacctcacagatctgtgagaattcacttatagtcaagagaccagcaaaggagaatctgtccccttgatccaatatcctcccaccaggcccctcctccaaccttggggattattacaattcgacatgagatttgggcagggacacaaatttaaaccatattatgtggttacagataaaagatggaacacaattatgttggatgcattagtggaaaggacaacacttattcatcctgaagtgtaatcaatggaggagtaagatgatatagagtcatttcctaagctggtaagaagatgggctcagaaaagcaggagggactagaggtcttaaatgaggggtatagagaggggtacagagaagagagacaatggattaacacagaaatgtatcgaagaccttccagttttgactgtgctaattccttgcttcctctccagttgggtgttggtaaatagcagctgtgcctagaggtacttgtttgggtagcaagatattgccaaccctgcaattataatttaaaaagtttttttttttaagagaagaccacattcctatgtaggaagagcctatgtctcaaactgtgatagttggcatagtatgggaaaacatttagttagacatctaacacatacttattgattgtttcattatgtttcaggcc

SEQ ID NO: 30866 - DNA, 2300 bp, Homo sapien
cttcctccctcttcctttctttgttttcttatctccttctctcaattatttatagagtgagggcctgctatgcacaaggcactctgtgtggtcctatgggggataaaaaggtgactaagaggcactctgccttgcatgtttcattctaataacctactccctgttctgctgttggttgtgctttcagaaattgctctgctagttcttggcaaggctgaaagccacttcagctaacagcatccagaccttccctaccttcaagatcttctgtcctccctgtggaactgacagcactccacctcatctctgagccccccacacatctcctcaagctcagccagtgtccaaactgaagttcctggctcctgacccctctagacggatgattatccattcactctgtctcgcctcccagactgctttatttttttccttttctgagctgttccttctgattcctcccacttcttcctcttctcattttgactcctttcccaattcacattgatcatctctgatgagccggctgagtgtgaaaaaataaaggttctaatgatctggcttcctctctgcccactgttgtttatccagggagtaaagacatgcttcaagtactcctccctcagagctgagagtacaagaaggggtcccagacttatttgttcctttccccaaccctcactgattctaaaattacttctcaatcactgaacattagtcaatatgtttattttttaaagtaaagtgtgggaaggttgtggagagtgaatgatgagattctataatctgatttaaatcttatctgcaggttataaaatgttaaaattcatgtttggaatagaatgcaacacaggcacatattctccttgaaaattttattcctgcagtttaatttagttgggaagaaatggtcagaccagctatttttttaatcacgtagatagattgtgtgtcctgtccaaacctggcaacccctgggatcactgccttcttcctctcctgctaatcaaattcaacccatttttcatgtaccaggcaaagtcccactcttctaggagggtcgcctgggcacccatgagcttcttgagggcccagcctctgtttcagccatctttgtggcccagcaacaagcaaagtcagggacttggtagaagtgtggggaatgaatcaaaatgaacaactttctccagtgtactttctctagtgtacttagtgtctgtgccatccattcagatatgtcataatatgccttccaacattgttagtcagaccctttaaggctgaatattttgtccttccctcccagatggcctgctccttgaggagggggacagtgcttccttttttctccatattgatcttcattgactaatacagtgatggtattcagaaatattgttgcgttaaatactggttctttttgcttgacagcagtatctgttgggaactacatttagaaagctgattttgcagaagccataattttattgtaagtaaatctgtgagaggggtttggtttccatacatttcaaatggaaagtaaattaccagccaactgatgcttagtttggttcagtcacatttattgagcaattgctttgcacctgacatcaaaccagaaaatattcctgcctcatgtgggttcagagtccccagggatgtcctactgcccacctgacctggagacaggatatagtgcttgtcctcacaggtggccacagatgatcagtgggcagtgtatgtggtttcagccacatgcctggaccttactgggtggtactatggacctgctgcacacctagtgcatccccctcctgagtggtgctggattgctgcccctcccccatcccagtccctcctctggtagccagaataaattttgcagtaagttagcagagttgattccaaaaagtctgcactgtggcatctcaggaaaccaaacttatctgcttaagaaataacttgcagagagaaaaggaactctgacaaggctaataacagggatttcaagctgtgtttcagcaagccagtcacagagtattcacgtgttaattcactggcgtgttccgcggcataagcaccccctctctgccttcccccagttccaactgttgtgctgcagcagatttggtctgagtctgggcagagcccctttttatggagcaaccctcccgatttgttacagcaagagcctggtgcaagtgatctttgccttcccatcgcacacaaaggcaaagagctccttaaagggacctgcctgctcctccgtgcagctgcaaacccgtgtcggtgcaggctca

SEQ ID NO: 30867 - DNA, 2300 bp, Homo sapien
ttatagttacctttagctttacaaaatgtattaatttttttctgctagctttttttgattatatcaattgtaacatttatatccactaaacatttcaaacttttatctttcctattttaattgttaaaatatttttctcaggcataatttttttaaatctcatccttatcatttcttcttttcttcttttaaaagaaagatgattgttgtctctttggatcttttagttttctgatttttttttttttttttttttgatggagtcttgctctgttgccaggctggagttggagtgtagtggcgcgatcttgactcactgcaacctctgcctcccgggtttaagtgattctcctgcctcagcctcctgagtagctggggactacaggcgtgcgccaccatgcctggctaatttttgtatttttagtaaaagcgaggtttcaccatgttggccaggatggtctcggtctcttgaccttgtgatccacccaccttggtctcccaaagtgctgggattacaggcataagccaccgcacccagcctctgatttttatcttttatcttctttttatatccttagtttgtttataaataggcagaagaaaatctagttatagagacagatccaaaaagttttatttatgaattggtcatagatggagaaggaaaaaaataattagtgttgaaacccactattttaaccagaacaacaaatgagtttaaaagaatgcaacttagtgagataggaaaaactgggggaggagtatgtgtaagagaaaataataatttcttcttctatcactaccatgtaataaaataaagagcatttttaacatcaaaaaagacataaacccagatatttttaaatgaatacttttgattttctgaaaaattcactagatggtctttttttctttttcattttgtggtgaattaatgaaaacttctggcattaaggaacacttgcggtagataatggaaggatttatatttcaggaaaactcactctggtacctgtatagagaatagactggaaaagattgaagacaaaagcccaattaggactagtaataggaagctgtggaggtagattacaatttggatactgtgaggaagaaagatatctaccaaacggttaataaggaggctggaggttgaggaaattgtgcctaatgcactagagtgttctcagtaatcaaaagtagcatttgctgggagtgatgtggttgaatttttttttgaagaaaaaatgataatgtgttgagttaaaaatggaatctagctgttttaatagacatacttaatccttctgagcttcagagagggagtcttgcctagccaacctgttcttagtattatgttttatttagcatggctttggaagccacaaaactctataggtctagttgaaataaaataaaatagtagtaacttgtatcagacatatattaaatattgccttcatcaatgagatcatgagtttcttaaaagcaagagtcccattttcttcttcctacagaggtggcctattgtttagtgaaaagagcccacgccttggagacccacaccgcaggtctacgaccctcaggctcttcagctgcaatggcggtaatgatgcgcacgtcataagattcttcaaggtatttaatgaaataaaggatgtgtaaaggagaagggattttacatgagttagctatacctttctcttctttcttcttcaacgtactcagtcctgggtacgcacagagggcactaatggcgtggggccagaagagcttttaattttggaattctgaagaactgagaactcgtgagtctgtcagcagctctgaagtggaatatcaataaagttttgttaattttttttaaagcaccgactaaactacaaatcccttctctctcctccaggtgggtgggtcacgtggcttgtcaggaatccggaagtctggcccgctcgcccaatcacgcccggaagcctatctagtggcgccaagctggccaatcctggggacgcttgctcttcgccaaaccgggtcccgcctccgcgcgccgcgctgacgggtcgttagcggatacggcggccgcaggggcggagtcaagggcctttgcccgccttggcggccggctctacgttccctgttctcgcctgcagctccgccatggctcctaaaggcagctccaaacagcagtctgaggaggacctgctcctgcaggatttcagccgcaatctctcggccaagtcctccgcgctcttcttcggaaacgcgttcatcgtgtctgccatccccatctgtgagtgctg

SEQ ID NO: 30868 - DNA, 2300 bp, Homo sapien
caactgcctcaaggggagtgggtgtgggattgggtgggtaaaaatattgagttcaggacctaaggaggaaagattttaagttggaactgggctataccctggaagtaacttttaattattctcttgattggattaaggtggtctgtccctagtctaaatgactaccaatatgtcacacctcccaatattcacaatcttgtgtagttcctccccacactgacgctgagcttggccatgagacttgctttggccagtgacacattagtaagcatgataaaagtaaaggcttgcacattgaggcttgtctttttggaatgtcccctcttgcaatcctaagattatgatgctgtgaggaagcctaaattagccatatggagaagccatgtagagaaaaaccaaggtatgtagctaacagccttctttctgttccagcatccttagctcgtggcttccatgtccatattttccacatcatgttcacttcatttttgtcatgaaactccatctccatccttaagtcccaagacttatgaccctagttaagccattccagccaggccccagtatgcccacgctaattgaagccccagacatcatggagcagaaatgagccacctgtactatgccctgactgaattcctgtgccagagaattcagaatcatgagtaaataaaagagccattgttttaagtcattatattttgggggtggtttgaacacagcaataaataactgaaatactactaaaagcataaagaatgtataacaacctaattgttacaagggagtggaattaataatctacaagaaggcacaaaaggacagaaaagaaacagaacaaatgagaaaaatagaaagccaacagtaatatggtaaactcaaatattagcttctaggcaattctatgtatgagtagacactgaccaagatcttgtctcaataagattttaaatgtaaagattttcatcttttacctattgtcctctgaattccgcccatatcattctcaccttagtttaatggccctgccttgatgcaatttgaaataagctgctaaggagataacacccttaatctattcattgctggtgcgcttacccagtctggtttagaaccgtttaacaaaggcttagaatcataatgtctatgattattacctcttagctcctagttttactgacttccatgtctggaattaccagcacttctttttcgtacatatggattatatgaactaaatgtattgtttcttccctcactactgaaaatctattcaatatatggagttacaattcaaagtattttacaacccagaaaatatggccattccgtatgtggtgtgtatttcagaggtgctctgcaagctccatgaggacaggcgtgaagttcaggctacatgcctggtacgtaatagacgctctgacagacatttgctgaatgaataagttagtcactacggcgtttgtgggctttaaaacacaagtaaatgcgcttctatcgccaaaacctcacagcttcccttctgcaaggtggcgtacaaggcccacgaaatagtcggccgccgcaggtgcgcagcctgtccagcctgtccggctcggggcaggcgacctcgtctggtggcagtgggggaggcagccgtttgcttcctcacagggtgtgccggaatcagaggctggaggcgtctggggagtaggcaaataaacaaagccaaccgcaccgaaacgggtcgttccgtttcacatcctccctcgggtgtctgggtcttctcggaacaaagtgaccctccatctgtccgcaggcaggtggagcccgtcccacgcggcacgcgccttccttcctcacagccgcgtgtagacgcggaccctcagggacactgcggacgcgagaaaggacacgccccctcgcgggagcataagtccaccgcacagaactcgcgcgcctcccctcgaacgaacgcgcacgcgcgcgcagggggcgggtcttcttcccgacacccactgagcgcccggcctcctcaccccaccccaccgaactccggccgcccaggctccgcctccgcgacgggccgtcgggaggaggcgaccggaagccacttaaagcagagatcgaggtgacaggcgagctggctggactcggagcgcggtcgaggctttctgcgttcgcggcggcggaatggcccgtgcgcggctcgccgcgtcgcggctctgtggtccctagacgtcggctcccgccctcggcgctgatctccggcgcgggcactgctttccactcggctcctgtcgtccgttctctcaggctcc

SEQ ID NO: 30869 - DNA, 2300 bp, Homo sapien
gattatgatgctgtgaggaagcctaaattagccatatggagaagccatgtagagaaaaaccaaggtatgtagctaacagccttctttctgttccagcatccttagctcgtggcttccatgtccatattttccacatcatgttcacttcatttttgtcatgaaactccatctccatccttaagtcccaagacttatgaccctagttaagccattccagccaggccccagtatgcccacgctaattgaagccccagacatcatggagcagaaatgagccacctgtactatgccctgactgaattcctgtgccagagaattcagaatcatgagtaaataaaagagccattgttttaagtcattatattttgggggtggtttgaacacagcaataaataactgaaatactactaaaagcataaagaatgtataacaacctaattgttacaagggagtggaattaataatctacaagaaggcacaaaaggacagaaaagaaacagaacaaatgagaaaaatagaaagccaacagtaatatggtaaactcaaatattagcttctaggcaattctatgtatgagtagacactgaccaagatcttgtctcaataagattttaaatgtaaagattttcatcttttacctattgtcctctgaattccgcccatatcattctcaccttagtttaatggccctgccttgatgcaatttgaaataagctgctaaggagataacacccttaatctattcattgctggtgcgcttacccagtctggtttagaaccgtttaacaaaggcttagaatcataatgtctatgattattacctcttagctcctagttttactgacttccatgtctggaattaccagcacttctttttcgtacatatggattatatgaactaaatgtattgtttcttccctcactactgaaaatctattcaatatatggagttacaattcaaagtattttacaacccagaaaatatggccattccgtatgtggtgtgtatttcagaggtgctctgcaagctccatgaggacaggcgtgaagttcaggctacatgcctggtacgtaatagacgctctgacagacatttgctgaatgaataagttagtcactacggcgtttgtgggctttaaaacacaagtaaatgcgcttctatcgccaaaacctcacagcttcccttctgcaaggtggcgtacaaggcccacgaaatagtcggccgccgcaggtgcgcagcctgtccagcctgtccggctcggggcaggcgacctcgtctggtggcagtgggggaggcagccgtttgcttcctcacagggtgtgccggaatcagaggctggaggcgtctggggagtaggcaaataaacaaagccaaccgcaccgaaacgggtcgttccgtttcacatcctccctcgggtgtctgggtcttctcggaacaaagtgaccctccatctgtccgcaggcaggtggagcccgtcccacgcggcacgcgccttccttcctcacagccgcgtgtagacgcggaccctcagggacactgcggacgcgagaaaggacacgccccctcgcgggagcataagtccaccgcacagaactcgcgcgcctcccctcgaacgaacgcgcacgcgcgcgcagggggcgggtcttcttcccgacacccactgagcgcccggcctcctcaccccaccccaccgaactccggccgcccaggctccgcctccgcgacgggccgtcgggaggaggcgaccggaagccacttaaagcagagatcgaggtgacaggcgagctggctggactcggagcgcggtcgaggctttctgcgttcgcggcggcggaatggcccgtgcgcggctcgccgcgtcgcggctctgtggtccctagacgtcggctcccgccctcggcgctgatctccggcgcgggcactgctttccactcggctcctgtcgtccgttctctcaggctcccgttcaggtaaagggctccgggagggcactgaggggctgaagaaccctagcggggagtgcgagcgccggcctcgcggctccggccccggccccggccccgcgccggcagtgtgcggggctctcgcggatcggggtgattgattttgagactgccctttgtaccgaattcactcgggtcccgtcagcatgaagatggaattggtttacacttcttaggcacttagagcctgtggcaggtgtatacatcagaccgaggcgccgaaggatttagttggggtcgcaggcgcctgccccttccccgttcgtcagggtgggggcgcgtctatgcggcctccc

SEQ ID NO: 30870 - DNA, 2300 bp, Homo sapien
gtcctctgaattccgcccatatcattctcaccttagtttaatggccctgccttgatgcaatttgaaataagctgctaaggagataacacccttaatctattcattgctggtgcgcttacccagtctggtttagaaccgtttaacaaaggcttagaatcataatgtctatgattattacctcttagctcctagttttactgacttccatgtctggaattaccagcacttctttttcgtacatatggattatatgaactaaatgtattgtttcttccctcactactgaaaatctattcaatatatggagttacaattcaaagtattttacaacccagaaaatatggccattccgtatgtggtgtgtatttcagaggtgctctgcaagctccatgaggacaggcgtgaagttcaggctacatgcctggtacgtaatagacgctctgacagacatttgctgaatgaataagttagtcactacggcgtttgtgggctttaaaacacaagtaaatgcgcttctatcgccaaaacctcacagcttcccttctgcaaggtggcgtacaaggcccacgaaatagtcggccgccgcaggtgcgcagcctgtccagcctgtccggctcggggcaggcgacctcgtctggtggcagtgggggaggcagccgtttgcttcctcacagggtgtgccggaatcagaggctggaggcgtctggggagtaggcaaataaacaaagccaaccgcaccgaaacgggtcgttccgtttcacatcctccctcgggtgtctgggtcttctcggaacaaagtgaccctccatctgtccgcaggcaggtggagcccgtcccacgcggcacgcgccttccttcctcacagccgcgtgtagacgcggaccctcagggacactgcggacgcgagaaaggacacgccccctcgcgggagcataagtccaccgcacagaactcgcgcgcctcccctcgaacgaacgcgcacgcgcgcgcagggggcgggtcttcttcccgacacccactgagcgcccggcctcctcaccccaccccaccgaactccggccgcccaggctccgcctccgcgacgggccgtcgggaggaggcgaccggaagccacttaaagcagagatcgaggtgacaggcgagctggctggactcggagcgcggtcgaggctttctgcgttcgcggcggcggaatggcccgtgcgcggctcgccgcgtcgcggctctgtggtccctagacgtcggctcccgccctcggcgctgatctccggcgcgggcactgctttccactcggctcctgtcgtccgttctctcaggctcccgttcaggtaaagggctccgggagggcactgaggggctgaagaaccctagcggggagtgcgagcgccggcctcgcggctccggccccggccccggccccgcgccggcagtgtgcggggctctcgcggatcggggtgattgattttgagactgccctttgtaccgaattcactcgggtcccgtcagcatgaagatggaattggtttacacttcttaggcacttagagcctgtggcaggtgtatacatcagaccgaggcgccgaaggatttagttggggtcgcaggcgcctgccccttccccgttcgtcagggtgggggcgcgtctatgcggcctcccccgcgggccgaccccgggtgctctgaggcgcctaggagcccttcccagaccccgggggggagggcacggcagctacgggagccttccggctaccccgcgtttcgggctgcagcccagaagtttggaagatgttttcacattaactttgagagcgcacaagtcttcgtcttcctccccgccgccgcgggaagcgctcgccgcctttcccccgcgcttcgcggctcagttctgcgagcccccaagacccgttggacgctcctcgggaggtgagctgagggggtaaagaagaattagagagagaaggcgccgcgagtagtctctgggatgcagggaggccggggcgggtcgttggtccgaaggaggctggacaggagttggggggcgcccaggcgcctgctgaggggaaggcgggggcggggacgcccgggaacacccggaattgcagagccgggcggcgcctcagctgcactgcgcggagttggcgcggcccgggaccaggagctgagcaaaccgccgcggccaacaggaggcgtcactcggacccgggctcggcgccggggtgtcgcgcggcggcgggcgggcaggctttggagcggcagttttttcggaaagtgcttttggccgggagtgccgcagaacccca

SEQ ID NO: 30871 - DNA, 2300 bp, Homo sapien
ggaggcgaccggaagccacttaaagcagagatcgaggtgacaggcgagctggctggactcggagcgcggtcgaggctttctgcgttcgcggcggcggaatggcccgtgcgcggctcgccgcgtcgcggctctgtggtccctagacgtcggctcccgccctcggcgctgatctccggcgcgggcactgctttccactcggctcctgtcgtccgttctctcaggctcccgttcaggtaaagggctccgggagggcactgaggggctgaagaaccctagcggggagtgcgagcgccggcctcgcggctccggccccggccccggccccgcgccggcagtgtgcggggctctcgcggatcggggtgattgattttgagactgccctttgtaccgaattcactcgggtcccgtcagcatgaagatggaattggtttacacttcttaggcacttagagcctgtggcaggtgtatacatcagaccgaggcgccgaaggatttagttggggtcgcaggcgcctgccccttccccgttcgtcagggtgggggcgcgtctatgcggcctcccccgcgggccgaccccgggtgctctgaggcgcctaggagcccttcccagaccccgggggggagggcacggcagctacgggagccttccggctaccccgcgtttcgggctgcagcccagaagtttggaagatgttttcacattaactttgagagcgcacaagtcttcgtcttcctccccgccgccgcgggaagcgctcgccgcctttcccccgcgcttcgcggctcagttctgcgagcccccaagacccgttggacgctcctcgggaggtgagctgagggggtaaagaagaattagagagagaaggcgccgcgagtagtctctgggatgcagggaggccggggcgggtcgttggtccgaaggaggctggacaggagttggggggcgcccaggcgcctgctgaggggaaggcgggggcggggacgcccgggaacacccggaattgcagagccgggcggcgcctcagctgcactgcgcggagttggcgcggcccgggaccaggagctgagcaaaccgccgcggccaacaggaggcgtcactcggacccgggctcggcgccggggtgtcgcgcggcggcgggcgggcaggctttggagcggcagttttttcggaaagtgcttttggccgggagtgccgcagaaccccagcgtcacgaggtgaggggtgtcgcggtgtgtcgcctgccgctggagaccggaggatgtgttcttctcatctttatttttctgttatgaaaactaattgaggagctaggttctagtggctttccccctccagccacttctccagttctctgcttcttcctcccagttttgtttccgagtttgatgaaagggcaataataggaaaagttgcgcgcgcgcgcttgcgtgtgtacgcgcagacacacatataaataaaatcgatttagtgtctattttaccttgattgggtttgataggagtggttagagagtgtgcgcgtggggaaagcacaggccggtttggtatggtggagagggaataccacaatctgtgccaattgtgccttgaggcaataacaccaaatgatgaataataacgcctggcttggctcctttccagttgatttatgtctcatgtcagatccctccttcttcgtgaagctttccctaacaatgccagcttacagtgaactctcctttttctgccttttccttttgtacttatcatgtaaatttaatacttcgttataaactgctttgtattttacttttctgaatttgatggacttcttacacatagatttatgactctccaattaaatttttaatattcacttttggggacactcagttttaccttttgttgttgacccacaaacaacaaagaactaagcatttaatatgtgcttttcttaactaattcagccaacaaaatatatatggaacaccagctgtgtgcattgtggtagctaggcactttattgggcacctaggatgcatatttgattaagtcatgggaccttgcgtcacagatctctttcagtttattggacaagagagaagaggattaattgctcatcaccattcctttctcacctggcacaatctcagtaaatgttttcaaatttcagtttttttcaaggggtctgattcttggaagaaaggactttttcgtctctttcagtagttgattaggaatctgaaatttggtgtgtgttttatattttttttttatttttctatagtatgccttcatttgctctttaaaaatgtatgtat

SEQ ID NO: 30872 - DNA, 2300 bp, Homo sapien
ttggcatgaaaagtcatcaggaggagagggaggctgcactacacagtctggctcaggttcggtggtttccatttccataatgtggattagctccaactgctcctcagagtctaaaaatcctacgaggaaaggaaggaagatgatcatttacaaactgacagcaactggatttcattcattcattaaaatgttttgtttttgtcctgactgattccctgaaaccattcctcttatactatatttagtttttacaagtcaattttaaattttatcgagaaattaaggctccaaagcacccaaggctattcaaaagcacacagcaggtaaaagtagaagagtctttcaacaggccattggcatgcatttgtggactgaatacataagagtttgcaattctgctaggttaagaatttctactataaggttagagtggggtgggaaatgggaggtagaaataactgtatctagatgatgacagcagggaaaccacatttccactcagctttgcggttctctttatagttgtttatgtatcacctatctcatgagttgacaaaaagtttctttaaaagttcatcaaatgaaagataaacttcaaacttaaaacagtgagtcaatttaagggtataagaacatacacaagtaacaggggctctcaattgaaatgttctatgggagaaagccaggagtctgttaagcatttctatattcagaaagctctaatatactatccaagaatgttaagagtctacttttacaacccccaaaaacattaccgcttctgatggaatacaagggtgtgtttagtaacagaagccccattagcaacaaccactgcacgatgtgtcagaagacaagcacaacttggtaacacagaaaaagcctcctagttcttgccttcagaaaagttacatacatacatttttaaagagcaaatgaaggcatactatagaaaaataaaaaaaaaatataaaacacacaccaaatttcagattcctaatcaactactgaaagagacgaaaaagtcctttcttccaagaatcagaccccttgaaaaaaactgaaatttgaaaacatttactgagattgtgccaggtgagaaaggaatggtgatgagcaattaatcctcttctctcttgtccaataaactgaaagagatctgtgacgcaaggtcccatgacttaatcaaatatgcatcctaggtgcccaataaagtgcctagctaccacaatgcacacagctggtgttccatatatattttgttggctgaattagttaagaaaagcacatattaaatgcttagttctttgttgtttgtgggtcaacaacaaaaggtaaaactgagtgtccccaaaagtgaatattaaaaatttaattggagagtcataaatctatgtgtaagaagtccatcaaattcagaaaagtaaaatacaaagcagtttataacgaagtattaaatttacatgataagtacaaaaggaaaaggcagaaaaaggagagttcactgtaagctggcattgttagggaaagcttcacgaagaaggagggatctgacatgagacataaatcaactggaaaggagccaagccaggcgttattattcatcatttggtgttattgcctcaaggcacaattggcacagattgtggtattccctctccaccataccaaaccggcctgtgctttccccacgcgcacactctctaaccactcctatcaaacccaatcaaggtaaaatagacactaaatcgattttatttatatgtgtgtctgcgcgtacacacgcaagcgcgcgcgcgcaacttttcctattattgccctttcatcaaactcggaaacaaaactgggaggaagaagcagagaactggagaagtggctggagggggaaagccactagaacctagctcctcaattagttttcataacagaaaaataaagatgagaagaacacatcctccggtctccagcggcaggcgacacaccgcgacacccctcacctcgtgacgctggggttctgcggcactcccggccaaaagcactttccgaaaaaactgccgctccaaagcctgcccgcccgccgccgcgcgacaccccggcgccgagcccgggtccgagtgacgcctcctgttggccgcggcggtttgctcagctcctggtcccgggccgcgccaactccgcgcagtgcagctgaggcgccgcccggctctgcaattccgggtgttcccgggcgtccccgcccccgccttcccctcagcaggcgcctgggcgccccccaactcctgtccagcctccttcggacc

SEQ ID NO: 30873 - DNA, 2300 bp, Homo sapien
ttgaatggtataaacatcttttctgtgaatgattcagaagttcctcccatacttctggatcttttattagtttccttggaacttttcaccattaagtttatattatagataaaataaatttttccagaatttagggtattttttttttaacctggaagagtcctttaacaatcagtgaagggatgaatttatggtaaggtatgtttaatactcaaacaattatccttgagttttggtacacaagatgtgtgtatacacataactcagttcttttagtatggatgtctaagcagcattcactggcaggcaactggtatttccacatctgaattcttctttaaactttaaaatgaagaaaatgatagttgcctcatgtaaagttgctagtgcaaaaatggctatataataagcattaatgtttacatctgtaagttatttctcctgtagcatagaaggagctaaagtgtgtggtgttaatagctatttgtgtatgaccaagagtaaggattaaaattaaaagggagagaagaacacttctgtccatgctccctgattggggaggccatgaaggcaacctaacagcttcatactaatgaatggcctggtatagtactgagatgacccatattggaggggaaaatacactgaatataccatcccagaagtccaagagaaaacaattccttgagtcatctttgttcacagatatgttgatttacactacctatgtgtctagagagtcagcaaatggttgcagtaaaccatttccaagttgtctgattctggtagtcttcatgtcaaccttctgaattctgactggtgcccacagagcttgttcgcattacagaaacatggttttttttgtttgtttgttttttgttttttcatttatctcgttcccattcagtaatgggtaaatggttgtcttttaataattttaatatttcagttatatagtacataaatccatgtgtctttttagcaacttaattatcatgagactagaactttgcatcttgtgtttcaaaagggaagtgctgaacaagaagagaaacagtataaagcccaaattcaaaagtattacatagaagaccctatgagataaaagtaaggtcatatcaagagtgtagttttcctgactataaatgtattatcttgataatatattacactcaagattccaccttgcttcagtagtgaaaatcttataatacagctaagtacttttaacttatttttttaagccggcattggaagagaaaaatgtttttccattttatcttaaaaatctttttaataaggtattttccaaaatctctgttgcccatgagctagcaattctaattgctatgtcaagggtaattaattttatatactctcaaagccactctaatccttctatctccagattgcaaaactttgcagaacagcggctcccacttcaccttcatgaagcaaatttccagtctgctgagtacttcagcatcttggtacattaagtttctatctgtttgaattgatcaggaagaaactagcaggattattggccaacacatgacagtctgttaccatgagaacaaggcaagataatcattttgatcccagaaaatccaggaattcttaggtcaggagcatatggctgttttttatcctttggtaagattgttttgcttaagaatagacatagatataggcccataagcctgcattgttgtattatgaggtagttgcagtgggtgcttgatttccaaatcagttttaatgaagtaaactaatgtttatctgacacttgggagaagaaaagtgtgagtgaagtattataattaccattgctcctactacattgttagtggtaataagtggtcctgtcctaggaaaatagcaaaaagtattaactgttaaattactagtaaagtgaagttctctgaagattacaggaagaaatgttgtaatatagtagatagctaagtgtcaaaaattaggcttttgggaagttgacttgtggtcattgcaacctggttttccttgtattccaaagcgatgttgtgtttcctggcaacaagatgcagataacggcatgttgagccttgctgagagattcacaaacaagctggagcagcccaggttcacatggttaccacattatttggctaaagctattaatctctgtggtcaggcctgtaaagctggtctatctgtgcagattgcgcataaccaggaagtgtgtgttcagctgtgtatatgtcgaagttggaaccagcagtctttggattcagaaataatgaatggcagttgtttat

SEQ ID NO: 30874 - DNA, 2300 bp, Homo sapien
tgttagcaccttcccctttaccagtgattaaatcaggaatgcgtctatgatccaattatgactagaagttccaagagacgtttgctggaagctttaggaaaattctttcttattagcacatatattcagtgttcaccacagtcttataatgttttaaaacaggaaatactaaaatgtgaaatacattgatttactcgaacaacagtgtgcagctgttagaaatgatgatgtggttctttgctgatgtggttgaatgtcccaatagattgttctgtgacaaaaagcaagttaaaaattgtgttataactacaaaaaaaaaaaaccgtaatattctaaacagcattctaaatgtatattttattatttctataaatacatatctcttctcatagaatcagaagaggtaaacaatcaagtttcaggaaagcaggagccagtattgctttgagaacctcagatatgcaatgtggaatttgcaaaagccataaaaaggctcagcccttagaatctaccacttaatgaaagttggttccattttcttttattgttggcagtctctgcacatggcagagcagtggtggctgacggtccaattttgtcaccaaaaggaactggggagaaggcatctatgcccaccctcctgttagaaaattgccaggaaatgactttctttggcacaacttggatgatatgcaatctctttaaccaaattactaaggccaggaggagtcaagtgctgtttgtcattggcttaccttgagtcaggtatatgcctctcgaccaagtgtggggaccaagtaggcaaggccacacacaatgacacctccctttctaactacattctagaagagtaaaggcagaagcacaatccaggcaggaagggtaggcagttctgtcccagaagaaattaagcgtgctgggcagaccaggaaaaaaaaaaaaaatcccacgtgagaatcagtcagctggtagaacattttaaaattaaacagtgaatcttgctgccttttcccacatatggtaagctgagatgagaatatgtatttttgagaaagcttcctaggagtttattgtgtctattctaaccctagagaatcccccctttcctataatgttacatgtatcacaaaaacaaatgtgtgtgtaactaggcactataggcctaagagtcataatagggaaataagagagcatagattcaccaaatcaaagtttaagtacatagaaaataaactaatgtggaatttcccaagctttcagttgactggggtgctcttgtgttaaaaactatcgtggtaacattttttgttttgtcctctaaacttgatttatctgcaaatctacaaacattttaattatgtaaatagatatctgtgcgggcaaaacactttttgctcacatgatcttgagaaggaacttagattctggtgtcttaaaacgtggcaccttttttatgtccttggggcttttgagtcaccatataaatgaggtctctcatgttcgtatgccagggagatcaaccacctctgattttaaaataaaacactgcaaagaaagcttccgggaggaatgagagcatgccccaaatcacgactctgtaattagtctttgtgcagagcggacagaaatttcgtcccaaagccaccgtccttgctctggttcctttctctgtaagcatgtcacacgaaccacactcctgcgccatgcatcgcaatttaaagctttccttgtaaagtttccccagcttgattgcttatggaaagagcagctccggttcccaattcgtttaatacatcctgtccgagcgcgttttattaccgaatgttacccacgttgtgataacaaggggacgctgtgtcctcccccggtgaactcactccctgtcccagaaatatagcgtgactgccctccccggcggtgttttgaaagtagaagccgggcgccgccctccagcacctgcacctcccgcccggcgacggccgcctgaagcacgaagtgcgtgcgaccgcagcccggcaggtcacgcaaccccaggccgccgcgccgcctgcgtgcctgcagcccgccggccccgcccccgctgcctgcttccgccgctttagtgcacgctcgggcttcctggtgcgcccggagcctgcctcgcgtgccgaccccgccgcgtaatccggcgaggcatcccagattccgcccggctccagacgccctccaccgactttagttcgagcaggtgacgccctcattttaacgccgaaaagtgtcagttcccgatatacaacaaacacctcaggctgcgaaacgtg

SEQ ID NO: 30875 - DNA, 2300 bp, Homo sapien
ttttttttatagtgacagagtctcactatattgcccaggccagtctcaaactcctggcttcaagagatcctcctgcctcagcctgccaaagctctgggattataggcatgaaccaccacgcccagcccaactttctatgataatgaaaatgttcagtatctatggtgtatcatacattacctacatgactactgagtacttaaaatatggctaatgcaatatagcaatggaatttttaaacatacttcattttagtgaaattagttacatgaggccaccttactggacagtgcaggtctaagggaaatttacagtggaaaggaaattggtctcaaaggcaatatgcagacaaataaacacagatgaaattaaaccaaggagtgaactgcagcctttgagctggattttctcccatccttaaagtgttgcctttccttatcctataaacaaagtactcaataaagaaaactagcctcagaacagagtgatcttgcattaggtgtgcaaattcctgtcccagataggtaccagttttggtgccctgtatctaaacttccattatcacaaaatgagagcagtcctaccctcactatctctcagataaatatgacgaggatgaatagctctgaaagttatttgggcttctcataagcatgttatagttgaccacttggttgactgtcctctaggcctcttaatcctttcttctttgagggagtggaaacagaaaatcaagggtaggcattggggcaaaaatatcagtcaggttaaatgtacaagatacatctactagacttttttttttttttttttttttgagactgagtcttggtctgtcgcccaggctggagtgcagtggcattatctcggctcagggtaagctctgcctcccaggttcacgccattctcctgcctcagcctcccgagtagcccaagtagctgggactacaggcgcccgccaccacgcccggctacttttttgtatttttagtagagacggggtttcaccgtgttagccaggatgatctcgatctcctgaccttgtgatctgcccgccttggcctcccaaagtgctggaattacaggcccgagccaccgcgcccagccacatctactagactttttagtgccaaggaacaaggcactagtgttcagtacttcctggtgtcattaattagtagttatcaataagcagtttggtgtaccgatactgctctgcgtcatttaatcacttctctaaatctataggttcaattaattttctttgtatttacttaatcttattttattcaatagcaaaccagtctctttgcctgctacagagccatcgatgttttctttggttcttggaagaactgtacttcgaccttatataatcctcagaaaggcaagatctggactacgaatgagtcacctgctaattacaccaatggctgctcctgccttgaccagtcacagagtatcaccctatctcggtatgctgctctgcttgtcgcgtagtaggtctataaatacttgttttatgaatgaatgtatgaacaaagggaagttagtcacgtgtaagggtgggtagcctgcgataaataaagtgtagactaggaggtctcaaaatactttttgaactaagcccttaatcttcactactttggactagaatggaaatgtcaccaacgccttcccaattaatttgtcctggctgtaatgactgaaaccagaacttccctttacacccatgacctctacaggcatctctttttcctctgctcaagaacagtaactgctcactgctgtgtctaccacataggccccagagcaaggggtgataggtagggctataggctcccgactcccgactcccggcagtgcctctctccaaccccccacgaggctgggacagctccctccatctcagcagtcgctaccaagcacccgacccactctcgcccacctcatccctcgatccccttccctccctctcacagcattccgcgtaagactagcccagccttccgagccccaccaccagttttcccacttccgcccggcgcgtgagaccctgggcggtgcaggggagcgttgacgacagacgtgggccgtgacgtcgccgcgccctgacgtccagccgactggcggcgcggtcgcccgggagaccgggaaagccgtttcacacccgtcctagtcgaagtcgaggtgagggacgatggctttcctcagcctgggatgacccggtcctccaaatgcagttccggagtggaggcgtgctcgcacccggggagagagccagaaagctgagccgcggc

SEQ ID NO: 30876 - DNA, 2300 bp, Homo sapien
aagaagatcaacatgcaccaggttcaagggagatgctagcagttacagctcacaggctacctcaggtttctctctttcatgtgcttctggccttacccagtaacagcaactctgaacactatccaagcaaaacgtcatatgctttgaagatgcactagtatttcaacaggctgaacgttttccagaacaaaatctttaccaaagctgctaacaagcagtcagatagactgccctgtgagtgttctcctccaacaatgaaccagcagaaaggtcagcagccggaaacagaaagaggagaagggtcctaaataaacacagtttaatcaaccgtgaagaaacctaaaagttgcccgaaagtgctttgttaatgggagaagcaaggcccctgccctcagagaaaggcaaggaaggttgaaggtcacttcagctgaccagaggatgccatggcggcagcgacattccccggtgggaatctcaatggaagacgcaaacgcagaagagaaggaagggagaggagaagccaaaggtggaccttttccaaggacctggcaagcaaatgttccctagaaagaagatgaaaatttaggtcaataagaaggaaagacactgtttttagaaccattatgacgacttcagagttggttctccttcaggcttttgtccatcaagtctgtcatgtctgattccagactcctcaggatatttgaaaaaaactaatttatttgaattacatcaatgtcctttacttgcatctaaaaaatcaaagtcaagctatgctgatatgtgagagagaattgagatgaatgagggctgactcccagtctctgcccctgtaattactttctttgtaagcctgaatacccaatcagatggacgccttctgaacacattttttcatatttatgaaatacctttgaacaatgaaatctggaaactctggcaacatctgtgtccaaatatatccaagtgtgtttatgtttttaattgaagatcaaacaattttagatgaactcatctatggtatcatagaaactgcatatttttaggtaattcttgagagcattttgcaaactattaaagtaacttgatatcatgctatatctttaaaagatatttctcagctgtgaatactattggaatgaaatcgggacttttcaaaaaagtctgcagcatgaaaaggtttgcatatgaattctgattccattagaaaaccatttcttttaggactgttttatcattctctattggttcatgtaatatgattggtttgttcttattctaattaaagatgcaatttattaaagagtctttaacttcactaaggcaaagtttaaaaagcttctaatcagatattcttggtaggcaggagaactataaccttcaaactctctgatgttgtatgaagcagctctcatctctacacaaagattttcacttctgtgatctggcctggtaaaacatttattcctttatactcagtcctagtttgttttagatctgggcctctgggcccattaatttgtataggatgataatttgtataggaagacaggtgtgctgtttttcttcaatccttgaggatattaggaaaaactttaaccaattaagggatcccatcacctgacgtttctttggggaaaatgacttttgaaggcatgtggggattgtcaaggaaataattttccctttaaattacatgtttgtacgtaagaggaatgctgagcaggatatcaagaggcagtggtcactcatggcactattttcaaagttagttaaacaaggaaaccaactcacatttccccagtttagcttttcatttttaaaacttgctgaattcaggtacatctcgattgctcgtggtaataaaggagacattaggcgtggataacaagaccgcaaatggtgagtaaagcaagacaccaggtatcatttctttcctgtttattaacattcactccaggctgtatactttggttaccatggtcgcgtggtgtctgatgtcacaggccaaaccatataaaatcacagaggccacaacaggcaggaggagcggcctggctttgtctgagtcaggcagcccagcgtgtgggatgccaggctggatgtgctgggcctgaccagccgcccgctttcctcttctcttgcctctgcctgccccctggtggacagctggggtaaagcatgggagtgcgcctttggggtctcagtggggctgaaatacgactcctcccctaggacagcctgccttccccagccttgttctccggcaaagtcaatttcctggagaatcgaggctctgc

SEQ ID NO: 30877 - DNA, 2300 bp, Homo sapien
tgcataaaatgtgtagtgggcacataacaccccttgtttttggttttgaggaatcaactgaaactctgcagcaataggaaaagccccccttaacagcctgctatagggcagtggaatttgttgtgtttccctttttgccttgatcaccaagactgagtgtaacacttgcctgcatagcttctccttagcctagatttcagaacctaccttccctccttgctaactcacttacatcatctctcttctgcttcatctcccacattcatgctctgctgttgttcttttgcccttgttttgatgattctgttgcttgttcagtgctgaaagctgatgcggagttatttataagtacattataaaaagaatttgtaaaattttagtttagatttcctagagggtagttacatgcaacccaatgaggaaaacatcagtgttttttctgtgagaagttaaaatgcatagacatagagatggcatttgttccactaggagctacaatagtgtttctctttaatcagatgaaagatagattgtgtaagcttagggaagcatcttctgatcaaaagttccacataatttggataaacatggaaggcaaatgtttaatgcaaaatttctttattttcaaaagaaaataatgatggataaggaagcagaagcaaggagcaagactcaggtgctgaagcatgtgacactatggagagttcctctataagaaagaggggaaaagaaatacccctccctctgagagtgccacagcctcacattagggatcagaacagagttacacaaagtcacctagaaggtgcagagtgtctctatagcctggaaaaatcaattaaaacctccttaagtatattaataccagagaaagattatgttgattatgggaaaataggcagaatagtgggaacagagaaaaaggagcataaccaaggcaaaggacagctgatatcttttaacatttaataaagaaacttctgatgaggacccggctttccttgggcctaggagaggatgcactgataaagtcacagcatattatggccctaggggagactagtatactagagctacattgcctcatgtaaatgaacagataagccctgtaggttggcatcagtctttgggccttgtgtttaggatgaagcagtcttgcagggcactgccttcccttagagcaatggttttcagactttcatggacatcaaatgatgcagagggcttattttgttgggctgtattcccaaagtaactgattcactaggtctggggtggggcctgggaatttgtgtttccagcaaacaagctcctaggtgatactaagcctgctggtccagggatagactttgggaaccactaagagcatttcatagcatttaaaaatttccttctcctacatgcctaggagaccaactgaatcagaatctctaggagtaggacacaagcatcagtattttaaaaaactgtctaggtgattccaaagatgaccccactaccaggtctaccattccaagtgaatgatttccaaatgataggcaacataaaaacaccaccatttgggcaagaaagcatcattttttttaccctgcaataaaataacagtgggatatgaatggataacgatagctaacagttgttgaatacttatattgtgccaggattaaataatttgctccaaacaactatccccatcttaaaggtgatgaaacaggcatcccatgaaattaagtaacttgtccaaggtcatgcacaagtaacagagctggaatttgaacccaggccctgcagcctcagagtccctgcacgtggcctgaactatagggtactctgtgtaaccagtctgagggagcatattaacagcctcactctctctgggcagtttctatagtgaacactgaatgggccccatcatccagccaactgggctattatccaggattcaccacttaataagttgctatggtttaaacatttttgtcccctccaaaactcatgttggaacttaattcccaaggcaacagtgttgggaggtggggcctaacgggaggtgttcatgtcattagagctcttccctcatgcttctgctatgtgaagaacagtgtttctctcctacagaggatgcagtgtccagggcatcatctatgaatggagacaacctttaccggacaccaaacctaccagcaccatgaccttgaactttccagccttctgaactgtgagaaatacatttctgttgtttataaattacctagtttttggaattcagttatagcaggacaaaatggactaagacaaca

SEQ ID NO: 30878 - DNA, 2300 bp, Homo sapien
cttaatgatgctatttgttttaatctagtttattcataactttaaattgtagtgtgactttgacaattacagtggagatacattattcatgttgcttgtaggtcattggtctcttcagcctggctacacattgagaattagcagaggagctttttaaaaagtaccagtgcttagtccccaacctggattgtttggcctattcctccttcagttttttgtggttcgataattatcttttaagttgacaataaacagctaaatttagaggggggattgctttttcattgttctagtttccaaatatttacttttgagatgcagcgtattaaaattttcaaagactggtttaaccattctcattagtaaatacaatgtattttcagtgtatccatagataataaaagttggataggtaagaattggaagggtgttaagtgatgtcatttagtctaccacctttctacagtataattctgtggctctacaaggtggccttcagtttgtttaaatacctataaaggatgtttctacttttaagtaggcattacaaatttttgtatattgcttggcagtatgcctctttgtaaactaccaatctgttatagtctcttgaagacttggttccaatatttctcagtctttgtaacacataaatgaaactaaccatgtttggactttgtaatttttgttgttgttgagttatatgtcaattacataatcatgctaaaggaaaatagctcctctaacaaaccataataataaacttctaatgaccaaagaccaggattttctaaagctgaaaataattctcgtataaatcagaaaaattggacaatagaaacttaaagcagagattgagttagtttgtgtgttgataatgaaaattatttttgagttttctctgaatagatgaagacttcttttttaaagagattttcaaatgccacctcctcaaactttattggcaaagaaagtttacctgattggggaggaagaaattctagcaggccttaatttaatgtgcttgttgcaacagaaggtactaatgtatactttgagactttgtttactgctgattgatggagatatattttttaaatttatgatacaaagtaatctctaccaggtagttgtaaattacgtgtgcaccgttgatttgtgaggtagaaccaattctgaacaaaataaaggtatctggttttaggttatatacccacaaagttaactttgaaaattgcaggtaataaatagcaggattaagcaagaagttaagtatatattgaattatagtaaataatgggtttggttttcttaaatctattttgatgtcattggcattttgacacaaaaacaaagaaaatggcatcattaagtctgatttgggactaaatagtagctataattcaaacatatttagcttctttagtgtaattgcaagaacaaatgaattatatcaccatttgaaggcagttcttaaagcaggttatcttaagaggtatagataatttttattaacaaatggagaaaaatgagacaactatgttttcataaaattacattttactagggattttgatgataccgtcttctgtctggattgcaaggggttaagagttaaaatggtgtgtgcagctgtaacactggagctattttatctcttaatgacagttaaggagagccattagataacacagccataagttaaaaagagtctgaagttggttttacttttttccaaatttcctgtgatgataaaacctgatcatagaccttaagatctttggaatatgtttatatgtatgtatgtatgtatgtatgtatgtatgtatgtatatatatggagagagagataggttgttttcatgagaattaagtttgacttattttccaaagagcaatttgtagcctactgtcctgataaaatggattcatcattacacgttaatattagaaagcagctcaatgaggccagctggtggcctcattcctcataggtgtgaggaatgaaaccgagggaaggccattttaagtaacagctgtcttttatcttgtcagcgctgccagtttttgtttagtaagcattccagtttctgtaataattttaaatggaagaaagtaaggaaaatgtatgataactgactttttactctgatgttaccataggggtaatgaagttcatcgcagattgttttctaaccttcggtgcatgtattgaaatagatttttgttttaaaaatatgagattacatttttctggatctggtgtgcattggggtagagaggatgactgtcttaaaaat

SEQ ID NO: 30879 - DNA, 2300 bp, Homo sapien
aaaaccagaaaactggtgtcatcaattgtgtttaaggaaaccgaggctcctttaaaagtttgttataaaattatagatatctcataaatattgaggtggaaagattccctggaagcagcctagtcagaaagtgaagacagtgacatccagataggttaatacttctgccagcaccataattacactctcttggctgtacattccaatcactcgaagacaggcaaaactgaaccactggctgggcccaccttaaatcagtgacatcaacctctgcaggcaaggctcaagtatcagtacattttaaaacaactttgcccactgaaggttcacttaatcaactgataaggccgggtgcggtggctcatgcctgtaattccagcgctttggatgcctgtaatcccagcattttgggaggccgaggcgggcggatcacctgaggtcaggagttcaagaccagcctagccaacatggcaaaaccccgtctctacaaaaatacaaaaattagctggacgtggtggtgtgtgcctgtaatcccagctactggggaggctgaggtgggagaatcgcttgaaccccggaggcggaggctgcagtgagccgagatcgcgccactgcacttcagcttgggcgacagagtgagactctatctaaaaaaaaagaaaaaaaaaatcaactgataacaggcgattaacaggagaaaagggatacataacaccggggtaaaagcaggaggatgattacccagtagcttaatggagtacagaagattttatatctttttttcataggggaaagggtagatgagaaatgtagacatttattttgaggagcagcaaatgattattaggaacaatgaatggacagaaattagtaaataattttcttttgagtaatcttgtgaaaaagtccctccaggaatggctgcatttctgagtctttttgaaataggatacgagatttcagcgaggggaggaatgcgattgattcttctacaaagaggcttctctagtcaggaaaggaaatttcagagagtacctccctgcacttgggaaaagtgggagcaacaagtcaaggttgggggacctgcattatgaggcagcttctaaagcctctgtctttggggtatcgctttctgagcgtcaagagtaaaacgtgatgcattcctttccttccaacctagattctagtagtttagatcagtatcattgtttttacttcaaggttcaggaaacgctggaaattgctagctaatatcacaggaaaaaaaacaaaaaacacgaggttgacctcaccctacccgcggtaggtaaccatgtatgaatagagactcccaggcataatcaaattacctctgtcaagtcctcgccctaagactatttttggaaactagggattttccagattactgaaagccgtggcggtgtcaaaggccgggcaggagtttcgcaagcggagctatgaaagcagccactctcgcggtcattcctatgcctccgccctacttccccatactggcaaaaacacgctccccggggagctttcatttgggaaccgatagggtccacagccctgtgttcttcaaatactgtaaagcagccctctccagattccttgagggtcactttatattacacattcgtccacacaggacaacaaagtcaccacttccacccgccaaagcgcgctcaggtcggccgccacttcccttggtacacgcggaacgcaagccgcgccgaggctaaaggaagaggccggaatgcagggcgaaggggcgcagagatgctagccaatgctgccacctctattttgggtataagggatcttgtaaagctccgttattcgtgtggctatcacaaacaaggtggtttcgaccggccttggctagagaaggcctcctcagcctctgaggatcccaaggtctgtcgcagcacccaacactcccctcgcaggcccagatgccgagggcggaggcgcggcctggagggactagttggcgcgcggctgcccggcgtggtgacgtcagggcggaagcgcacgcggcgtgaagcggcccagaacccggcggtcacgggaatatccgtcgcgccgagaacgctggttagtcttgtttcgggttccggctgcgttgggcttgcgtgcggctcgctaagactatggcgtccgggcctcattcgacagctactgctgccgcagccgcctcatcggccgccccaagcgcgggcggctccagctccgggacgacgaccacgacgacgaccacgacgggagggatcctgatcggcgatcgcctgtactcggaa

SEQ ID NO: 30880 - DNA, 2300 bp, Homo sapien
ctgctgaacatcagggtcaagctagaggctgagatcgccacctaccgccgcctgctggaagatggcaaggacttcaatcttggtgatgccctggacagcagcaactccatgcaaaccatccaaaagaccactatctgctggatagtggatggcaaagtggtatctgagaccaacgacacccaagttctgagacattaagccatcagaagcagggtaccctttggggagcaggaggccaataaaaagttcagaagtcaaaaaaaaagttaaattatattactctcaagtcattacaaatataggtgatgatttcattgaagtccagtgttttaatgaagtacataatcaatgagggtttttactttttatttggaaataagacatggaagttgcaaagatagactactcctatgtattcctccaactttccccaatgataatatctcacacaaccatagattatcaaaaccagaaaactgaccaggcacagtggtgtgccacttatagtcccagctactcaggtggctgaggtgggaagatcccttgagttcaggagttcaaggccagcctgggcaacacagtgagaccctggctctataaacaaaaatggaagaaaaccagaaaactggtgtcatcaattgtgtttaaggaaaccgaggctcctttaaaagtttgttataaaattatagatatctcataaatattgaggtggaaagattccctggaagcagcctagtcagaaagtgaagacagtgacatccagataggttaatacttctgccagcaccataattacactctcttggctgtacattccaatcactcgaagacaggcaaaactgaaccactggctgggcccaccttaaatcagtgacatcaacctctgcaggcaaggctcaagtatcagtacattttaaaacaactttgcccactgaaggttcacttaatcaactgataaggccgggtgcggtggctcatgcctgtaattccagcgctttggatgcctgtaatcccagcattttgggaggccgaggcgggcggatcacctgaggtcaggagttcaagaccagcctagccaacatggcaaaaccccgtctctacaaaaatacaaaaattagctggacgtggtggtgtgtgcctgtaatcccagctactggggaggctgaggtgggagaatcgcttgaaccccggaggcggaggctgcagtgagccgagatcgcgccactgcacttcagcttgggcgacagagtgagactctatctaaaaaaaaagaaaaaaaaaatcaactgataacaggcgattaacaggagaaaagggatacataacaccggggtaaaagcaggaggatgattacccagtagcttaatggagtacagaagattttatatctttttttcataggggaaagggtagatgagaaatgtagacatttattttgaggagcagcaaatgattattaggaacaatgaatggacagaaattagtaaataattttcttttgagtaatcttgtgaaaaagtccctccaggaatggctgcatttctgagtctttttgaaataggatacgagatttcagcgaggggaggaatgcgattgattcttctacaaagaggcttctctagtcaggaaaggaaatttcagagagtacctccctgcacttgggaaaagtgggagcaacaagtcaaggttgggggacctgcattatgaggcagcttctaaagcctctgtctttggggtatcgctttctgagcgtcaagagtaaaacgtgatgcattcctttccttccaacctagattctagtagtttagatcagtatcattgtttttacttcaaggttcaggaaacgctggaaattgctagctaatatcacaggaaaaaaaacaaaaaacacgaggttgacctcaccctacccgcggtaggtaaccatgtatgaatagagactcccaggcataatcaaattacctctgtcaagtcctcgccctaagactatttttggaaactagggattttccagattactgaaagccgtggcggtgtcaaaggccgggcaggagtttcgcaagcggagctatgaaagcagccactctcgcggtcattcctatgcctccgccctacttccccatactggcaaaaacacgctccccggggagctttcatttgggaaccgatagggtccacagccctgtgttcttcaaatactgtaaagcagccctctccagattccttgagggtcactttatattacacattcgtccacacaggacaacaaagtcaccacttccacccgccaaagcgcgctc

SEQ ID NO: 30881 - DNA, 2300 bp, Homo sapien
acagttgtcagttttctgaaaaaaaaacaagaaatcttgatgggtttttttgcccctcagtattattttattgattttgtctgattctttgtctttctctttaagcaaaatcaccaaaaagtatctgtgtatgctatgtttcttctgtgttcattttacggtaatggtttctttctttttccacacttatgatattgtgtcattttctgcctgaattctggctttcgggtaaataaaaatcaaactttgacttgatattaataattacaacctgactactcttgtgcattgggccaaattctttccgttttctgtcaactacatatatttataaagttcccaaattcacagattccagtctaaatgctcctgtttagattgatgattcattaaatcaggttctgttgtttaaatgaaaaattgggtgcttcatcagttttttataataataatttatcagatgtattcacattatgggttatgtaatttatctattgctggctcttaaactttttaaatctgtggatcactaacttgagcattaagatcctccatcttttcccattcagtactagaaatagtttattttgataataataaaatttttctggaatagtatttattaatcttcattcactaaatagaagctttgtacatacaaaccacttagtctcatacaccagtgcttagacagtcattgacataaaaagaacatatgatttcataagccaatctcattattttattatacattatacataaaggatcctttatatcacattgtatgtaggtaaatggtattttatacctttatagatgttctatacatttttttaaaattgttcctttgaattgaaaagcttcttacatttataggtataacactatcacatgtaaatgattattagacacatcattgattagtaaatatacaaacacaacttaaaatcttcctttgaaaagtttattttcattggcttgaatgaaatatatgtaaatgtgattttctttatgttcacattcttactgatcaacatttagagaaattatcttaaagttttaagaatattcatctattatacattttagaattaaaactgtttttgtgtcccccacacacccactcatactgttcatatttgattaatttcataatgaacttatttaatttctattcttaatgatctactctgtataaatagacttgatttttgtactctatttgaattttattctttaattcccagatctttgagaaaataaatatgaatatttatattaaccatgttccagttaaagaacatccttgggaaatcactgagataaacactatattacaaaggttaggcatatttatggagatcattatcaactgccttgaaaatactatgaaataattttaaatttctgttaaaaaatgaaaatcctgaaatatatcatatgtttgatctttttcgtttaatttttttttttttttttttttttttttttttttgacggatcctccctctgtcacccaggctggagtgcagtggcatgatctcggctcactgcaacttctgcctcccggcttcaagcaattctcctgcctcagcctcccgagtagctgggactacaggctcccgccaccacgcccggctaatttttttttatttttagtagagacggggtttcactatgttagccaggatggcctcgatctcctgacctcgtgatccacccacctcagcctcccaaagtgctgggattacagacatgagccaccatgctcggcctcgtttaatttttttaagagaggtggaggtcttgttatattggccaggctggtctcaaattcctggtctcaagcgatcctcccgcctcagtatcccaaagtgctgggaatacaggctcattcatcatgcccaaccccatatgttcgatctttaagacagatctttttcttgtttcatttaaaattaaatcatgttaaagttcaaaccaagcctaaacagtgccttgaaatcaatcaaacaatactattgggacaagacatagtatattctgtttctgtctttaatgccctttcagagcctgtttcctgaacccctgtccattcagagtcattctgtgcaattcctcagagctctgtgggagaagacccaggcagggggtgctcacagctttgaaactgccatgatggagtccacgtttccacagcagaaggtaaatattcctttccttggccatgttacaggccaagatttaagattgtcttgaaacagtttcccttttttttagcaattaaatttcatccttct

SEQ ID NO: 30882 - DNA, 2300 bp, Homo sapien
gtgtttctgagttgtatcctttataataaacccaataataataagttaaagtgttttcctgagtcctatgagtcattccagtgaattattgaaccatgggggtggggtggtgcaggaacctttgtagccaagttgaacagaagtgtaagctggggaccccatacttctcactggcatctgaactgggggccatctgtggagtctggggctaattccaggtcgttagtgttaggattgaattgaactgtaggacacccagttggtgtctagagggttggagaattagttggtatgagaaaaaaacccacatattgggtgtcaaaagtgtggtaagtaaaaataattccttttatccttgttttttaagaaaagaattaatactaacaccatacgttataaaaatggatagtggttgttgaataaaaattaaagtagctgtaggccagctcagtattagaagataaataagggaagataaatgcatgctactttcctataattactcagcacctcagtgaacatcagaaagctatttctgcagcttatttgtaggtgcttattctagctaaggcactgttagccctcagaggaaatccaaaattataccacacatggcccctgctttaaaggaagtaattttaatgacccacaaagtggtttataaactctactataaaagatatttgggtctatattaatatcgttcacagaaaacctctttcttccaacatcttaaaattcagaaagatatttctccttggaaggtataagagttatactgattttttaaaaattaacaaaaccatgagtttatacagtgcatgtgaaatgttcttattctgtaatttcagtacaaacatatcagcacatgtaaattttttagaaaatatctggcacacatttcatgtgaaagacatacatttgaagaatttctaaaaaagaatatggtacatgagcataaaaactgctttttattctttgaactcttaaaaagcatttttaatacaaagttcacataaacaccactgtttctaaatttctggcagaacaagctgtagaagcaatttcaaagacctatgcctgcagtaaatacttgttaaatgaccaatgaaaaaaattatcaggcaaagcttttgcttctgagtgagaggcagttaaatagagaataacactgttctgaagagtatatatgacctgcatctaatgcaatgatttatattcctttaggagaaaaatcagcactgaaattgaattccctgagaaactggaagaaaccaagctcatagtaactgaaaatgaagaccatgaaaaactccaagttaaaatccaggcttttgaagacaagataaatgcagggagcaatacccctggctctatcagaagatatagtctgggccaagtttctaaagaagaaagaaaaaacattagatttaacaggtataactcgtttggtttgttttttaaatcatacacttcatgttcgctattagctttgttatcactctgttatggggtgttttttatatatcttttacccattgccacccaaagtgccatccttacatgaatgaaatatcatccacaatgctctcattatccaaagaaactcactattttaaatgggtactatgaatggaaaacaaatctattgcttatatgccatatggaaaatactgtctcttgatttctgatgaaaaatcaaaagcaaaagtagacaaagatgaaaaatatgtaagtctactattttgcagccagttttgccatgaaattgatttttaaactttgtttttggaggtgacttagattttcaaaggtttggtttattacatcatttattggtggtatacatttatcaggcctgttaatagtttcacactccagaggaagtaactttttgtcccaatattattattatttcttttccttgtcagtgaatggtaacacaacttctttaactttccctttgtttgaactctaggtcaaaaagtttggctttccacactatgctcacaaagggtgtgggttcagatgacggcgaagatgaaaacaggggagacataccagccagcatctctctttcagaaatagacccacttggccaaggaaatgacaagctgccgtttaagacagacactgagagatcacagctgggggagtcttcagtttcatacccaaatattatacatatagactcagagaatttgtcagaaactgttaaagaaaactcccaggaagaaactccagagacaactgcaagtcctatagaataccaagataagctctacttgcacttaaaaaaa

SEQ ID NO: 30883 - DNA, 2300 bp, Homo sapien
tacaggtgcctgacaccacacccagctaatttttgtatttttagtagagacagggtttcaccatgttgagcaggctggtctcaaactcctgacctcaaatgatccacccacctcggcctcccaaagtgttgggattacaagcataagccaccgtgcctggcagtgctttctttctttctttttctttcttgtttttttaaggatgtttttcctctcactctcattcaggtattatgccaggttcactttggcccttagggaaaaataatgtttgaaaaagccaagatttttctctaagtctgggccctttcctcaatgtcttggaaaaatactaaagacagccaagtaaatgcacacagacaaaccaacaaaatcattagaccatcttggtgaatatatttctagggattattatatactgtaataaaaaataaatactttgtctctgtcccgagttcatggcatacagctcctaaaccctcagaatctcagattgatgggtgtcttttatatgctaatgagatgactgttggcagggacccctagatttcttgaggattgggtctggtcacaggaaggaccaaggcatgattacactgttggaactttcagccccattctctatcttaccctataactcacccaaccccagtctctggggaggggagaggggctgaagatcgagttaaccgccaatggtaatcatttaatcaatcatgcctgaataatgaaaccgtcataataacccctaaaattccaagaacttccagattggtgaacacattgagttgctgggagtacagcgtacccagaaagggcacagaagctctgtgccccttctcccataccttgccctatgcatctcttctactggggtgtttctgagttgtatcctttataataaacccaataataataagttaaagtgttttcctgagtcctatgagtcattccagtgaattattgaaccatgggggtggggtggtgcaggaacctttgtagccaagttgaacagaagtgtaagctggggaccccatacttctcactggcatctgaactgggggccatctgtggagtctggggctaattccaggtcgttagtgttaggattgaattgaactgtaggacacccagttggtgtctagagggttggagaattagttggtatgagaaaaaaacccacatattgggtgtcaaaagtgtggtaagtaaaaataattccttttatccttgttttttaagaaaagaattaatactaacaccatacgttataaaaatggatagtggttgttgaataaaaattaaagtagctgtaggccagctcagtattagaagataaataagggaagataaatgcatgctactttcctataattactcagcacctcagtgaacatcagaaagctatttctgcagcttatttgtaggtgcttattctagctaaggcactgttagccctcagaggaaatccaaaattataccacacatggcccctgctttaaaggaagtaattttaatgacccacaaagtggtttataaactctactataaaagatatttgggtctatattaatatcgttcacagaaaacctctttcttccaacatcttaaaattcagaaagatatttctccttggaaggtataagagttatactgattttttaaaaattaacaaaaccatgagtttatacagtgcatgtgaaatgttcttattctgtaatttcagtacaaacatatcagcacatgtaaattttttagaaaatatctggcacacatttcatgtgaaagacatacatttgaagaatttctaaaaaagaatatggtacatgagcataaaaactgctttttattctttgaactcttaaaaagcatttttaatacaaagttcacataaacaccactgtttctaaatttctggcagaacaagctgtagaagcaatttcaaagacctatgcctgcagtaaatacttgttaaatgaccaatgaaaaaaattatcaggcaaagcttttgcttctgagtgagaggcagttaaatagagaataacactgttctgaagagtatatatgacctgcatctaatgcaatgatttatattcctttaggagaaaaatcagcactgaaattgaattccctgagaaactggaagaaaccaagctcatagtaactgaaaatgaagaccatgaaaaactccaagttaaaatccaggcttttgaagacaagataaatgcagggagcaatacccctggctctatcagaagatatagtctgggccaagtttctaaagaagaaagaaaaaacat

SEQ ID NO: 30884 - DNA, 2300 bp, Homo sapien
tgtacttttaacttatccttctctgtgcttttctttcctccttcattaatttttttttcatagatcaagtctttctttaaaaattccccctgcaccttctattcggatgcctatgtccatttggtagttgtccttaaacttataacaaatatttttgagcaaagcaaaattaattaatttctttttcgtcctcctgaacaatgaaatgattttagaatcctattactgaacataaaagcagcacattttagattatttccttatatctgtcttccagttcattaatattcttttcagctttgcctaatttgccacttaatccatgccttgagcttttaaaattttcaattaacttttttttttaattctagaagttttatttggttctttaaaaaaaatcacctagcctttttctttttgacaatgtcttattcttttctcatatttccaattccttcttttagagcttcagtagttttaaacatatttattttctagttttttggctgatatttcaactaaatgcagttcttggggagaggtgtctaatcctttttggtttctgctgattctcatttatagtggtttgcttcctcatatgttcaaatatcattgtgaattcttttttgttttcacagtggcagatagtatatatttgaattctaaacatatctgagggcaggcccaatttcacaaactcaaagggaccttgtagagttcaaagagagacatgattgcttcctacctctttgtgctagggcagagtgggattgtacctactgaaatacagtaggtaaccctgtgagggtcctggctttcatgaggatctcccttctaactctccacctttggcctaagctttgcttccacatggtcatcaacatttggtggttatagaactaataacccctatctcacttcactcctatgccagaggggccctagcatcagctcatgggattgttgtttttgctttcctctctatctttggctccgggattttccccttactttaatgggagctcatctgtaccttttaagtttttattaatatcatgtgaacacagacctgtatatattgttagaagcagaaatctctaagtttacttttaaaacatgatccttgcctcgaaaccttgtagaataatataatgtccacataataccaagttatgaaaagaaacatacctaaataactaaataagtatattccttttttcccccagctttttttccccattctaggtttacccagttgtactgtgttgtttgtcataggccgggtgaggtggctcacgtctgtaatcctagcaatttgggaggcgaaggcgggtggatcgcctgaggtcaggagttcgagaccagcctggctaacatggtgaaaccctgtctctactaaaaatacaaaaattaactgggtgtggtggcgggtgcctgtaattccagctacttgggaagctgaggtaggagaatcgcttgaacccaggatgcggaggttgcagtgagccgagatcacaccattgcactccagcctgggcaacaagagcgaaattcagtctcaaaaaaaaaaattatctataaaagtataggtgcaactcctcaagtattaaagacaagatagctcggattggacttgactttcagagccataactattcttaatatgttggtttatcttggaatcagaccattttcagtttcaacctgtaaaacagtgtacaaaggaaacatggaaagttttctatatataaagggttgtgaaataataacagctcacagaaaatgctgaaatgatgatttgcttcagtaccctctgaaatttctcccctaccacccctccttcatccccattgctatcaattcaaattacaacagctaattctcaggagaacagtagaagcccagtttctctcctctttcccctctgaccctcctccaattaatctgactgcagcgtaaacctttgcggtttaatattgtgcaacttccacatttccctcgctctcccacccagccccctcccccaccaaattcaggggaactcccgttaccgcagtgccaccagcattactcattcatccccattcaggctttcctcagcatttattaaggactctctgctccagcctctcactctcactctcctccgctcaaactcagctcacttgagagtctcctcccgccagctgtggaaagaactttgcgtctctccagcaatgcatctccttgcgattctgttttgtgctctctggtctgcagtgttggccgagaactcggatgattatgatctcatgtatgtg

SEQ ID NO: 30885 - DNA, 2300 bp, Homo sapien
cagtatcccaatagtgtggcgattaagtcctccagttcatgtatattttcatttagcagaatctacagatgcataatagagtaagccactaatgttttattagtgggcattgagtgtacgtcaccttgaaaagtagtaaagaaagtagctggagccctggagggccactcctttctcactaataaacacgggaaggagtgctacacttccatggaaaactcaggtgtttggattacccagccacaaaaagtttgagatacattgtattctagcccatttctgctctgtaaaaacattcactgttattgttcaaccttggtgtgggtaggatcaccgtaaaactatctctccaggaaacaagataaggttgccaaaaaatcaacagggacccattcaagagaatgaagtttacagatgaaaagtgaacaacccagaggtaaggacaggatgactaagatagagaaaggacaacaaagatataaatatggctcaaatggaaacaacctaaacatctttagctctgtgaacccaatttagtgaacagtacagtcatgtattaatttttaaaaggtatggcatggggatgtgttaactggtggaccatctataggaataatagtactcttaaggatatgattgctggcactttttctgtggttgccatatgccaggctctgtgttaaatgttttatatcatctccttaaacctcccaacaacccatatcacaatcctcaggagcaaaggaggaattccaggctcagggagtctaattaacctgcccacatttacactgcaggtaatggcatagctgagcttggaatccagttgagtctagattcccatactcttatcactctgctcttcttactggagttccatagagtgtccaattcaggactctacaccctttaaaaaaataaaactggataaaaatctagggattaaaaatcagtaataatgaatagaggattaaaagggaaggctaaagcaatatcatctattccattaaaagacgaaacttcattagtatattgtaaattagaaaaactactaatgaaaaaatacagctactcatgaatgactggattcttgatttttataaaggaattcttcaaggggatagttctccaaatgtggatggcataaaaatatgattgatcaccaactgtctaggcagatttacgaggtcgttctcctggaacatatgacctggtttaactgtggccaccctgaccacaccctttgagtagacacaccctagtgagcacaaagatgagattatctgcaggatagctgcctgtacacattgccagaagtgagatgatttgatatagctatagatctaccacaggaacagacgacttaggggtcgagaagaatgcagtcttaaaaaccttgctttttaaagtgcactgttaactgtttaaagaataaaggaaggttccagtgcccttttctccatcggagtgtcagtagattaagcaggataaaccttttgcctgagtgttgctgcaatatttaaaagtacaaatccaatatttctggtccacgtggatttctatgaatagcttcccagcaaataacgaaaaaaagagagtacgtatgttgtgaagtttgttctgtttattagcaacttcccgcatacttcaactttcaacaattttactctagaggcagagtaaagggatactttctttaggaggtgactcttactggacgaacactcagtgtttccaaaacgtttgtgagatctcagggagagggaagtgttaatgaagctgcagttctcttctcctcccctggagctctgagaggtggctccctacagccattccgttcacctgcttgagttctgttgaaaattgtttcctgcgtggctcgcccccgccccccattcttccctgggaaagtatagattttcacgaacacagggagttctgttttctctgttaaaaacaactctcctttactggagcaggctttgtgtttcacctcaggaaacagagcgttgcactgggaggtaactccgctgggtgaggtgcagcctgtcacctgaccggtctctggggctgccggtggcatcaggctgcattccttgaattcttccacccggcaccggctccgcaatgaacaacttcaggttcactgagctgagcggattccactcgctgtgccctcggagcctgcctgaatctcccgcccagtctcaaaccatgcagctgagtaactgcaagggcgcctttgaggagtagcacgcaggtaaagtcgagtttgcgcgggacagctgtgactccctgaa

SEQ ID NO: 30886 - DNA, 2300 bp, Homo sapien
tgtaaaactgattactcaaatacatttttgacaaacaggtgtaatatctggttgctgttgccattctgccaccaagaaacctgatgacttcatttgggcctcttcaaccagctgcccctaaagctagcaagctccacccttcagtgtccactgataaattccttaatagcgtaagtgattttaggaaatttttgaaaattgtgtatgaatggatggattccatgacaagggtattgaggtcaaatggtatgtggctaggtactgccaggcaagtctaagagattaaatttaattattttgggggactcaagtattgaggaaatgactatgtagctggttaggaaaaaataatttagaaggtcctgttttcaggtacactgaatgactacattcctttccaggcctttcttgcatctgctagttgtcagaggaagcctgtggttgtcactgaaggagcccatttgtcatagatagttcctgttgagtctcttagtccacttaattttcaatgagctgcacccaggagagacttcccacaaaactaggttaggctgattctgtcaggtggaaattttttaatggtaaatggcagaaaacccaatctaaaatcacttaagctattaaggaatttattagtgtacactgaagggtaggtcttgctagcattaggggcaggtggtttaaggggcccaaatgaagtcaacagttttcttggtggcaagagggcaatagcagccagaccttacaccttcttatcatcaagtccagcagcttagactttttactcccaaagctgagctttcatcattgtcctctcattggcctagaaggggtcgcacacctgccctgcattagtcactatgatcacaggaatgcaattactctaatttgggtaagaccaattaaggcccatcctgtttatgggcatcagctgtacccaaaggacatggtttcccaagggaaatttgggtgcagttttgactaaaagtagagtaagtgaatgttgagtgtcaaacacaagagaaagtaatcttcaccccatgagtagtccttttaattggactagtaatttttttacatgcagcatgattgccactgaatggaaatatttttatttccacttgtacatcttacacctgactttccccactgcagcccccgcccccaccctccctgttaccctcacatggtttgactgaaagttccggtcgggagagactcagaaatgttttatcactttatgtgaaggcaaaacctcagatcaataagggaagaaagcccatgccatacacttaaagggagagaagagcctctagatataataatccactgggcaccaccaattaatttatgcattagaggttttaaagtgcattctccttaaaagagagagagagatgaggcgatgtgggagtgcttgtgagggatccccaatgaattaggtttgaaaagatgagttctatatttggatggtaaaaggaaggagttagaaatttgagtggatgcaagaaggaaccatgagggttcagaaaaatctctagtgctaccagggaagtttcattaagttgttgtgtgtttcgtaagcaataccaatagtataattagacttttgctcctttaccctagctattttgcttctcttgtggtatttttcttctatcatatttggcttaaataccatttcattccagtgcttcccttcctgcattccctccccaagcctttttcctgatgcctgctaaaaggccccacatctgatattaacctaaaacttccttgatttcttaaagtgagttattcattaacagaacctaaattactggttgttaggcaaatctaattctttcaaactacagatctgctcagagaaatctgtaaatctagtgtagaaataagtgaagctttgcgtcaattgttaggtctaagcagaagtttgggagagagaagaaaagttactcatttgcctgattccgcacggtgagtcaatggggagggaatgaaatgtaccactggcttgacaggcagctcagggagacgcggctgcagcccacaggactgggcagcagctgcaaggctgcctctgagcatggtcatgggtcccagctgcagtgctctaaagatcaaggattttgccttctattttctatgaccagagattcctgtgcaaagaggtatggctatcttctttcatgaccttttgttcagcaaaaacaaaagctaattaaagtaaatgtcagaggctgcaaagaagcaaagagtgggggataggagaatggagctgagaaacttccaggggctgg

SEQ ID NO: 30887 - DNA, 2300 bp, Homo sapien
gctggaaggctgaccatagaaatggtgtgcttacaggagctttcatgattacaggtaagaaaaactgtttatagaaaatgaaatcattcagaagttctcagtgtttatatgtaactcacctatgtaagttgccttagaatttacctcttttctgtaaagaaaacgtctttgtctgattttgtggttacagacaatgttttatttcaagtttcccaaaggaggggaaggagtgagagttagacaagaacagaggggaaaaataaagacaaagcaatactctgtaaaactgattactcaaatacatttttgacaaacaggtgtaatatctggttgctgttgccattctgccaccaagaaacctgatgacttcatttgggcctcttcaaccagctgcccctaaagctagcaagctccacccttcagtgtccactgataaattccttaatagcgtaagtgattttaggaaatttttgaaaattgtgtatgaatggatggattccatgacaagggtattgaggtcaaatggtatgtggctaggtactgccaggcaagtctaagagattaaatttaattattttgggggactcaagtattgaggaaatgactatgtagctggttaggaaaaaataatttagaaggtcctgttttcaggtacactgaatgactacattcctttccaggcctttcttgcatctgctagttgtcagaggaagcctgtggttgtcactgaaggagcccatttgtcatagatagttcctgttgagtctcttagtccacttaattttcaatgagctgcacccaggagagacttcccacaaaactaggttaggctgattctgtcaggtggaaattttttaatggtaaatggcagaaaacccaatctaaaatcacttaagctattaaggaatttattagtgtacactgaagggtaggtcttgctagcattaggggcaggtggtttaaggggcccaaatgaagtcaacagttttcttggtggcaagagggcaatagcagccagaccttacaccttcttatcatcaagtccagcagcttagactttttactcccaaagctgagctttcatcattgtcctctcattggcctagaaggggtcgcacacctgccctgcattagtcactatgatcacaggaatgcaattactctaatttgggtaagaccaattaaggcccatcctgtttatgggcatcagctgtacccaaaggacatggtttcccaagggaaatttgggtgcagttttgactaaaagtagagtaagtgaatgttgagtgtcaaacacaagagaaagtaatcttcaccccatgagtagtccttttaattggactagtaatttttttacatgcagcatgattgccactgaatggaaatatttttatttccacttgtacatcttacacctgactttccccactgcagcccccgcccccaccctccctgttaccctcacatggtttgactgaaagttccggtcgggagagactcagaaatgttttatcactttatgtgaaggcaaaacctcagatcaataagggaagaaagcccatgccatacacttaaagggagagaagagcctctagatataataatccactgggcaccaccaattaatttatgcattagaggttttaaagtgcattctccttaaaagagagagagagatgaggcgatgtgggagtgcttgtgagggatccccaatgaattaggtttgaaaagatgagttctatatttggatggtaaaaggaaggagttagaaatttgagtggatgcaagaaggaaccatgagggttcagaaaaatctctagtgctaccagggaagtttcattaagttgttgtgtgtttcgtaagcaataccaatagtataattagacttttgctcctttaccctagctattttgcttctcttgtggtatttttcttctatcatatttggcttaaataccatttcattccagtgcttcccttcctgcattccctccccaagcctttttcctgatgcctgctaaaaggccccacatctgatattaacctaaaacttccttgatttcttaaagtgagttattcattaacagaacctaaattactggttgttaggcaaatctaattctttcaaactacagatctgctcagagaaatctgtaaatctagtgtagaaataagtgaagctttgcgtcaattgttaggtctaagcagaagtttgggagagagaagaaaagttactcatttgcctgattccgcacggtgagtcaatggggagggaatgaaatgtaccactggcttgacag

SEQ ID NO: 30888 - DNA, 2300 bp, Homo sapien
aaactgtttaactgagagaatgactgaagcggatcagggagcagaaggaagagaaagcctacttggaaaagatttagtactgtgtggatacaggccagggttacggtaaggaataagagtgagcctcattaggcagagagaggcatagggagtgaagttcagaccctgtcccctggatgtttccagtcttgaatggaagcacgtgtagcaccgctggagggaaaggaagaaggcaactggggcttaagaaggatgaacaaaacactattgtgttctgagggtaagaagcctctttcagttttttttcattcctgttcttttttgtgttctctctccatgaagtgctagtttgacctcccactgaagtgaggctcagtgtcaagactctgatgatgattattgcaacatctgtggagcacttactgtgtgccagacaggtgtggttctaagagcttttgctatgttctgtacttacaaaagggtgtctcatttaacccagcctctggagctgtgtctggcacatggtgggaggtgatttattaattggaaataaaagcatgaaggcatgcacgagtgcgtcctcacaataatctgcccatttggtaggcattctttctaggttaataaagatgaagaaactgaaactgctaaaggttcagtaacttggctcaagttaaatggcatgatcctaatttcgatctcaaagactgcagcatgctgagctgtgggtggaaagtgtgaataggaaactattagtttcctatggctgctgaaagaaattactacttggtggcttaaaacattctcccacagtcctgcaggccagaagactcaaacgagttttactgggctgaaatcaagatattgaagtgccatactcctccccacagcgctgttacctcctagcctcttccagcttctggtggctgctggcatcccttggcttgtggccacatcacttcagtctctgcttcctgctcacattgccttctcctcttatatgcggaagcatggaagggccctctgcctttctttctaaggatgcttgtgattgcattgggtcctactgctaacgccggaaaatctcctatccccaaatctttaatcacatctgcaaagtctttttcttttttccttccctagaatataaggtaactcttcacaggttccaggcatagtacctggatatcttgggattagggatagagggggagggcattattcagtctacaacagaaagcctagttttttattgtatgcagtacaaagtgtgtgtgtgtgtgtgtgtgtgtgtgtgcgcgcgcgcgcgcgcgcgcgcgcgggcacatgtgattgtgtgagcttgtgcatacgactacgtgtttacgtgtagtgtgtgtgagttcggtgtactgcaactatgcgtgtgcagcccgtgtgtgagtgggagtgctttgactgctgcagggtgtgagcacagagggaacgcagcttgcagtggcggggggccggtcctaggccaagttatcgtccagtcacctgcaggggtcactgtttggtcccgttgtcgtgccatcctctgccctggcttgccctcttctccgcatctgtgggccgcgcggtaagcgcgaagaagccggctgctgcgtggcacacgggcaaactggcgggctttggccttgggcgcggcccgcagatgcgtgcagcatgcggggctgtggagcgcttattggtttttctgtgtgaatctgggggttttcaaagaagggacaaggctggacaggaccttaaatcctgctccaggcggaggcagctgttggccaaagtctctccacccccatccccagtcggctggggaaaaaaacgaggcggggtgggggaggtcgtgtcccagggttctgacagtggagccaggacgtccgggagctgacaatctaaacgcgacctgggaaggggcggtagcgggagtggctgcttcctgggaggtggtgctcgcaaacctggcagctgactgggtggggcgtgccttccctggcagtcgcggaggggaaggctgagggacccggtccccgccccgcgtgctcaggctgaacagcttttcttccctgatctctcggaggcgccggctgctggccaacgcagggcagcctcctgcgtgcgtgctgtgggtttctccttcagtttcctctcattgcctgaggttgggcccgaacacggcggtacatttccttgaggttagtaaactgcccctgtgcctctctggattttgcatgggtaatctcgatattctttctgatgggaaacctaagaccacctttgta

SEQ ID NO: 30889 - DNA, 2300 bp, Homo sapien
ctttcaaggtagaaggaagccaacgaaagctgaggtccaggctacgctgcttctcccgggcgaggcgtttcggtttcttggtgtgttgggggcggggggggggggcggcgggggaggtggggatctatatttacacaattcctttagtgttttcaatcacccagtactcggttctcttagagcaaaaatcctttggtgctagctcagtgttaggaaacgtctttatctcaatggcagagcgttctataccaattcaaaggagttcaacaataaaattgatttggcacttggtgcctgcagtaactggtgtactgccatatttttccaattaagaaaatatgtggcatgcgtggaatcacatatttaagcaagcaattaagttgtttatgacacggtctgttcctgtttagatcagtaattggaaatttggggacaaaaatagagattttattaagtctatggatcaacttgaaatttggacatctcctcgaagccccaaaactttgagtggcatccactgtgtagatgacatgtaatagacaaagccttcccacctcattggcagaatttgaagggtgtgttttcatatttaaatttcaatacaatatcagtaaaaatactttgctattaaattggcccataatgtttactataatgttccttcctaaagaaaggacaaatgtccacaaaactaactctgagaactagaaaatacggcaatatttaagatcaccgtagctagaatgcccggcagggccgagatctagcgactcttcttcctccaaaccagcaccaggtcttcctaaatttgtaaagtggtggagttaccgtcaaggtgcccagtgcagcctcccggccatgagtccacaactacaggcccgaactacaggttcgccagcgcgcctgacggcgaggttcaggtctgaacccccggcgggcgcagttcctgggattgttgatttccaagctcagggcaagtattaatttctctgcagaccggctcttccggaaatgatttttaacacccatgctggcctggatcctgcgctgggaagaactgcaaacagcctcgactatctaaactcagctttgacttcttaaaacccggagtctctgattcgggcgcagaggataaaggttccagggggatatatatatggtggctgtatatgctcacactagaagagctcctgtttttaaagggaggagaaggacaggaaagtggcaacggatgtgtgcaaacccagagcagaaaaattcatattttattaaacatccgagctgctggttgcatgaaaaggctttgagcaaccaatagaaaccgaggatcgcgaatattccgcttgaacctgttgatctctgtgggttaagcgtttagggtcgagtctgcgtttccacgagggagggcgaagagagaacagaaagagcggttgctttcgcccgccaccggaggctggttttccgcctcctgccttctggcccggcttgggcggcgagccctttgggcagccaacatggcgtgggcgcctgtgctcgtgcgaccccggtcgggcaggcgggacggagattacctggctgtccaggggaccttatgcagggtttggcccgagcccaggggcagcgaggggcgtctgcggatgcggctccctgtgcggcacaacaccggggtctgttgctctcgctgatacctttcggcccaattgttcctaaattagaccagcaagtttgcggtaggcagagagccagcggtggtgagagctggcctgagaacgagccagccttctgggaatggccggtgtgagaggccagtgggtggccttgccgcgcccttatgtccagactttgctctgtgagaggcctggcgctgcgcctttgatttctgtgagtgctgcggagcaagtgagtgcgaaagtgagtggaaaccatttggtgtttgctggggaaggccggtgactggggggtgaatagtgaggcggtgagtcgaggtacgtttgtgaaggaggtggtggatgactgcccaccttgccccaggcggccgctcagacttgacctttgcgcttctccgggatattcttcctccgggtgggttgagaagccggaccaggattccacgagggggaaggattctctattcttttttgcgacaaatctggtaacaggatttgctgtgctgttttcgtccgtgtgtgtgtgcgtgtgtgtgtgtgttcgtgtggatgcacgtgtggccccgctggggtgccccctccagtgtccccggagctgaaagatcgcaaagaggatgcgaaagggatggagga

SEQ ID NO: 30890 - DNA, 2300 bp, Homo sapien
acactttaaaatgagatctgtcagctaacagctgctggggaaacttgttaaatcgactggtcccttttagcggggtctgtccatagaggagtcagctgggctccaggacacgaataatagagcgaataacacggaccgaggggcgaggagcttggagaagacccggactcagcctgcctgcgagccgggaagctcctaagagaagctgcgcgggtcggagaaggtgcaggcaaccctgtctctgggcaggatgatgctgggcggtggagctacggccggcaggggtgggattgtgagggagaggcggggatgcagaattgggatgcggggtcaggatgcgggaatgggatgcggggcctgtaaactgctgggcggttgatgcagggcagggacgaggaaaagcaatgcgaagctgagcattgcgaggcaccctgactcgaagcaaggctgtagggaaggatgcagtgtcgggatacctgactgactctaagagctgcgcacttgtcagtttcctcttggccccaccccgcggggtctatccagctccccagtgtttaactaagtcgtgacaccaacgcaaaatccacgcctaattaaattaattagggattcttgtcaatcctggattaatggccaagagcacaggcggcaggggctatctgaaaacctgagcggccggggaccggccttctctccccgccccctccggtccccctgtgctgccctaccactccagccccagcccgcccgaactccaatctctctctctcctcttctctctctctctctctctctctctctctctctctctctctctctctctgtttctctccttttcccctccccaacccccggtagaggcgcgactgctacccgggaagggggctcactccgagttgcgaggggaggtaatttactcaaaacaagaggccgccgttaggaagtataaatagtgggacttcaagcgcagcgtcgctatcagatctgaactctccgcaggaagaattgtcaaagatcttaacattgaacaagcgcgctccggcagggaagcatcagttcccatttccctccggcagcccccgccccttctcttctcctcctcctcctccctctcctcttcacccttctccccctcttcctcttcttcctcctcctcctcttcttacttctttttctccttctacttctcctcctctttcttctttcttctcctctttttcttcttctttctcctcctccctctcctcccccacctcctgtcccattgatgtgttattattgggggggctggagcagtaaaaaaagaagaaggaaaaaaagagcggggctctgctggcagaggttgagcgccgggctgacgtgcggcggcgatggaagaacttacggcgttcgtctccaagtcttttgaccagaaagtgaaggagaagaaggaggcgatcacgtaccgggaggtgctggagagcgggccgctgcgcggggccaaggagccgaccggctgcaccgaggcgggccgcgacgaccgcagcagcccggcagtccgggcggccggcggaggcggcggcggaggaggcggaggcggcggcggaggaggcggaggaggtgtaggaggaggaggagcaggcggaggagctggaggagggcgctctcccgtccgggagctggacatgggcgccgccgagagaagcagggagccgggcagcccgcgactgacggagggtaacgacctgactgacccccggcagcggttccccttcccgccttccggactcctctcgggcgggagaggactccgaggcccagcggggaggggagagggacacggagagggccctggaccccagctttgtcagctagagtgatagtggaagggtgggggtccggtggtatgctcggtcatgggtggggtcctagtgtgttgtgggggtggcgtggggggaagcgtgtggggtttgtgcgcgcccttcccagatgttcccattccaccgaaatgcatttttcaccagcgggaggatgggcccgcagcccggatggcccgcaggcggacgtggaagttcgcggggccgggctgcaggagggggtgctgaaccagacggcgggactaaagctagcctctagcgcagagtttgccgggagggagaaggggcagaggtggaaagcttaaccctccggtcgcctaggtgtttggggccgccaagacccctcgaactccgcagagcccctgaatctttggatcttaggggccaaaacttcccattctctttcaaggtagaaggaagccaacgaaagctgaggtccaggct

SEQ ID NO: 30891 - DNA, 2300 bp, Homo sapien
tacataatccttaaactcaccaaacatgaacattttaatgtgagtattgtagtataacataaggttatatccagcttctatctacatctatttgagaaacactaatatattaagttataattgtgttctctttttgcaagtgtttcaggttgttttgacggaacttcttaaattatctgctaatttgttttgatgccttaaccaatatacggaagatatacatattaatgttctgtaattcctcttatttttactaagagtattagatccaaaataatgatcaagttacctttaacttccagaaagtctgcattaatattcagagtacttgaaaatgtcccctaagccacacttagaggtatatttgtttacacacttaaatataacatcatatgtaaatattcttttgtgagtatgtatttgcatagccacacttctcacagcaagccctgtccggcacaatacagacaaatgactcaggaatatagatgttcctctaacgtaacaaaccgttccgatgaaaatagcccagaaatagaattttaaatcgtaagcggggtggtggggggggtaggcagagagacctttactcctggcgagcgtctcttttttagctctccgtaataaatgaaattagagggggtacaaacttaacgtcgatttttttttcagactcgaagagggataatctcttgtttttcaaattagtaaataaactcggatgtttcccaagatgctaaagaagaagtcctgtaattcaccatagaggggtccgagtgcagagagtaagggagaagggtgggagttctgagacctcagagaggaaacgaacgaagtcgagctgtccttgaccgggcgctaaggaaacactttaaaatgagatctgtcagctaacagctgctggggaaacttgttaaatcgactggtcccttttagcggggtctgtccatagaggagtcagctgggctccaggacacgaataatagagcgaataacacggaccgaggggcgaggagcttggagaagacccggactcagcctgcctgcgagccgggaagctcctaagagaagctgcgcgggtcggagaaggtgcaggcaaccctgtctctgggcaggatgatgctgggcggtggagctacggccggcaggggtgggattgtgagggagaggcggggatgcagaattgggatgcggggtcaggatgcgggaatgggatgcggggcctgtaaactgctgggcggttgatgcagggcagggacgaggaaaagcaatgcgaagctgagcattgcgaggcaccctgactcgaagcaaggctgtagggaaggatgcagtgtcgggatacctgactgactctaagagctgcgcacttgtcagtttcctcttggccccaccccgcggggtctatccagctccccagtgtttaactaagtcgtgacaccaacgcaaaatccacgcctaattaaattaattagggattcttgtcaatcctggattaatggccaagagcacaggcggcaggggctatctgaaaacctgagcggccggggaccggccttctctccccgccccctccggtccccctgtgctgccctaccactccagccccagcccgcccgaactccaatctctctctctcctcttctctctctctctctctctctctctctctctctctctctctctctctctgtttctctccttttcccctccccaacccccggtagaggcgcgactgctacccgggaagggggctcactccgagttgcgaggggaggtaatttactcaaaacaagaggccgccgttaggaagtataaatagtgggacttcaagcgcagcgtcgctatcagatctgaactctccgcaggaagaattgtcaaagatcttaacattgaacaagcgcgctccggcagggaagcatcagttcccatttccctccggcagcccccgccccttctcttctcctcctcctcctccctctcctcttcacccttctccccctcttcctcttcttcctcctcctcctcttcttacttctttttctccttctacttctcctcctctttcttctttcttctcctctttttcttcttctttctcctcctccctctcctcccccacctcctgtcccattgatgtgttattattgggggggctggagcagtaaaaaaagaagaaggaaaaaaagagcggggctctgctggcagaggttgagcgccgggctgacgtgcggcggcgatggaagaacttacggcgttcgtctccaagtcttttgaccagaaagtgaaggagaagaaggagg

SEQ ID NO: 30892 - DNA, 2300 bp, Homo sapien
cttagtaaaaataagaggaattacagaacattaatatgtatatcttccgtatattggttaaggcatcaaaacaaattagcagataatttaagaagttccgtcaaaacaacctgaaacacttgcaaaaagagaacacaattataacttaatatattagtgtttctcaaatagatgtagatagaagctggatataaccttatgttatactacaatactcacattaaaatgttcatgtttggtgagtttaaggattatgtatatcatgctttttagaaacgttgttttccctttttaaaacatttcattttttgccacttttaggagagctaatgtctataatttttccgcagctatagcttttaggtatgaatacattgttatcagtacttgcttttgttttgttacaccacaaaagggacaaagtttcaaagttatacgaatttagaaacaatttcacattgagtcttgggttactctttgtaactactttctgatattatcagaggaaaataatcatacaactttagtcctttatgaaaatctgtttttaagattatttagcagaagggccagtaatagggagagctaagaggatacggtgctcaaggtgctctcaaactgaggtgttaaatacatattcacaaataactcaaaaataaccactgttagaagtcggttaaggaatcaggagacccaccagctacttgtttgcctttttaagtacatgacttttaggtttgaagtcatatttcatctactgagcttgagggaaagatgaccactttgaaggtaatcagggaagtcacagacacaactattgtgtaattcaaaccaataaattttcccatgatctcagctttttggctcattgcatatttaggaatagtagtgttgataacagatggagccatgagaaatctttagtgtctgaccacagatttccactggcctaagggaagttactttaaaaaatatttcaaggttttaaattcatacattaataaatgctcacaaagttccaatgatgttgtttcattaaacagcaaatatcttccagaaacagggcatttcaaaatacagtttttgtttaaaaaaaaaaaaaagcatttatggtaaagctcagctgacagtctgtggacagatgcacaggttccaataaaattcaggaccccaagggtttccccagctcttgaattatttaaaatatacacgtagtgttgtagtagttaagttttaaaacggtgcctcaaaactggctagttaaggtacattatttacgaaaaatatattgtggaggtgatttttcaccatctcaaatgtctgcggaaaactgtagcttggttatctagcagtggtgaatgagttgattctcatagtcgaccaaaacccaggccaacaatttatttatctttttagctttgcttaagagtaaatgaggaaaaaatttccatgtaaggaaaaataagtaatgtagtatgaattacagaaaatgctgagtctctttaatttctattggtttaaataaaaaaactccacacacctataaatttgagttctctttcagaagaaaccgctccccgcctcgcctcaggcagctctctcctattcctctactaaccagttactttaatctgagaaactaatttgcactcaacttgtgagtgccttcaccttcagggcagaagaaacaccgacttttaatgcatttttgcaaataaatcattacaatttaatcacacacgactctatacagacacactcccatgatttattatcgttgggcgagtttccccctcccccagcgtgagataaccaattttgtttcgggtaggtgtcataaacaaaacttcctacgatgcagatttgtttactgattacccatgacgataacgacgactactaagacaataacactctccagtcccacctttattgcttttggtaacaataaaatcaaaataaacaggcacgcaaaacaaacgccaaacaaaaaatcggccgcgttacaatctactccctcggcattcccagcgcctggcagcgtccatcgatgcactcgatatctcggctgaagctgcctggcgctagaaccaggaaggcgctgagcttaaactgaagcaagttcggtggacgccggcggcgccctgatctaaagaaacgactcagggactgcggcgcttgcacgtcaacgggaggtgtgagcccaaaggtctggacccaggtgatgcccacgaccagggcctggggagcggcagccgtggctgcggagctccgaggccctgatccggcgagaggcgacg

SEQ ID NO: 30893 - DNA, 2300 bp, Homo sapien
gtcttgaatgcatcatctatacatggggataaaagccatctctactccataaaactgctaatgaggattcaatgaggtaatgcatatggagtgcctacaacagtgcctggcacacattcaataaatattagctattatgattatatttacagccaagtccaggaccctctcctctcagtcctgttctgcatctctattcctcccatgctggagtattcattctctcctgacccacgctttctttcatttccacctcttacccatcagttctgaaaatgatgtcaaggtctcttcagtgccaactctgctctgccctcctttttttttttttttgcatttgtcattagatccaaactgctttcacaaggttcagctaattccctgactaacctgtgcctggactaaagcttttataacaatgtgattctaaaaaagttcccacagaaactagagggtaacattacaaatttacttggccttaatccagaactattttaacaccatcttttatcacataacttactccatttcaagtttttttttaagtgtggcctccttcacatcttgtgcttatactattttaaagagaaaaacaatttaaggtcttataaaacaattttgtttgccttgaaatttatttagaaattttcgaaattttgtgtatatgttctctgagctttattctgagtccagaggaaaagaaaatatcctctttcctggatgggctgtgccatctcatcttgggctgtgaagtctgccctaccccatgccaccagtctcaggggaaggaagctgccagagaacttggctaaaaaagggggatggggagtaaaagatccaaacgattaaatttccagctctcaaaataacccctgactactcctgtcacctccaaatcagggcttgcacacttcttcatgctggcaaagtgccacccctctggcctgatcccagggggccctgatgagctatggacgcccctttatctctgcaagacagccacgtagagaagctggggagctcactgaattaagggtggacatgcaagatgtattttctcttttcttatactcttaccattcttctccttaatctctcttctgtcttcccctccatctgtctccaggctcctgaaaggccccgtgatagtgttttctaaaacttagtaatttgagtaccactatcacgatgttcctctcccctgctctgcctacccctccgccccaccatatccaaattccacctgttctatttgatagcttactttttcacttaaaaatgcaaaatctagctcttgatgtatatcactgatttaaatttaaaatcagtttccttgccataaatagaaagctccctgataaatgtaatgcaaataaaaacatatagtagtggaattttagttggatatggctgcttgctgcaggcctgtgcctgaaacctgctgttaggttaagaaatgctggagaagtgttaaaaacatatcagcatcgcagtgagacttgatctttgaaagagagacacagaaggacaaccgaaaagagagcagctttctcaagaggtaaataagtttgttgaaatctgataggcttcatcccatttccttcaacaactgagtacactatttgctaactgtactaaaaaacgttttgcacattttttcttattatttgctcacagcttttgactaccagagaatgtttcggatacaggactaattcctgtggatgacagaatgcgaccgttgaatgggacattgggtgtcatctggtccaaatcttgaccccttttcattttccccgaaagaaagacttgcggctcggaaccgagggcggcatgcccaaggtcacagaaagggtggtctaatgttttggttcctgcagcccagagaacaagctatcccatcccacaggagccttggcgaaaagctccccggccggcgcaaggccagacttctcgcctccactgtgttgattgcggttgccagggcagcggcgcattgctccccgcctcgtcctggtgacgtcacagagcaatgtccaatgggaaagcagctcggtgtcacgcacctcctatcccggcgggcaccgcctgcgccgcggcgagtgaggcgtcgtccgtactggaggctagctcttgtcgcggccgcggcgagttaacatcgtttttccaatctgtccgcggctgccgccacccaagacagagccagaatgttcaggatgctgaacagcagttttgaggatgaccccttcttctcgtgagttacgggagccaggagtccggggtcgcgcgggaattaaggt

SEQ ID NO: 30894 - DNA, 2300 bp, Homo sapien
tttaaaaacttccccttttcaatgaactgtcatgctataaaatattacctgttcctatttggaatttaaagaggagctataaaatattccctgctcccatttgcaattatgtgaacataattctcaccataagtttcaccgagatggtagttatgtcacctgcaaagcccttgaagctgcaaaggccaactctgcacacaggaagccatgacgggcacccaaagtccggccaaatggaaagcagcaggcaccccgggagtgtgaggaagggccttctttccatctcatgcagccaaatcctcctccccctacctggggccctcaactctctacctcacgtcctcaaccatcctcctgcgacctcacgcccccaaaccctcctccccccactgcacgccatcaactctcctctgtccacctcacaccctcaaccctcctacccccacacctcatgcccctaaaccctcttccccacacctcatgcccccaaaccctcctccctccacctcacgccccaaccctccctcgtcccactacctctcaccctcaaacctcttccccctacctcacgccctcaaccctcctcccacatcatgctctcaagcccttcccaccaactcacgccctcaacccttctccccaaccctcctcccacacctcatgcccccaaatcctcctcagcccctaaatcctcctccatccacctcacaccctcaaccctcttaccgccacctcacgctcccaaaccatccccaccaactcatgccctcaatcctcccctgcacttcatactcccaaaccctccccaccaactcacgccctcaaccctcgtccctgcacttcaagctcttaactctcccctgcacctcatgctcccaaaccgtccccccacctcacgccctcaaccctcctccccccacctcgcggtccaaaaccctccttcccctcacctcacaccctcaaccctcccccacacctcatgctcccaaatcctcctcccacctcacgtcctcaaccctcctcctacacctcacaccttcaactctcccccacacctcatgctcccaaaccctccccccacctcacgccctcaaccctcctccaaacgcctcacacccccaaatcctccttcgtccatctcacaccctcaaccctcccccctccaccttactcccccaaaccctcctcctcccaccccacgctcccaaaccctccccccacctcacagcctcaaccctcctccccccacctcacgctttcaaacccttcccccacctcacgccctcaacccttcccctcacctcacgccctcaacccttcccctcacctcacgccctcaacccttcccctcacctcacaccctcaacccttcccctcacctcacgccctcaaccctcctccctcccacctcatgctcccaaacccttccctcacctcacgccctcaacctcttctccccacctcatgccctcaattctcctccccccacctcccggcctcaactcttctccccccactcccagccttaactctcctccccacacctcacgcccccaaacttccctccgcctacctcacgcgtccaaaccctcctctctccacctcatgcgcccaaatccgtctcttccctgtctcacacacccctaaatcctcctctctcttccctcccaggcctccaaatcctcgtctccttcaaaccgcctccagagttactccgaattctctctcgccctctaaaactcgctcttttcccttaaaatagctcccctcgataccttaattcccgcgcgaccccggactcctggctcccgtaactcacgagaagaaggggtcatcctcaaaactgctgttcagcatcctgaacattctggctctgtcttgggtggcggcagccgcggacagattggaaaaacgatgttaactcgccgcggccgcgacaagagctagcctccagtacggacgacgcctcactcgccgcggcgcaggcggtgcccgccgggataggaggtgcgtgacaccgagctgctttcccattggacattgctctgtgacgtcaccaggacgaggcggggagcaatgcgccgctgccctggcaaccgcaatcaacacagtggaggcgagaagtctggccttgcgccggccggggagcttttcgccaaggctcctgtgggatgggatagcttgttctctgggctgcaggaaccaaaacattagaccaccctttctgtgaccttgggcatgccgccctcggttccgagccgcaagtctttctttcggggaaaatgaaaaggggtcaagat

SEQ ID NO: 30895 - DNA, 2300 bp, Homo sapien
taatgccactgctaatctgacaggaggcagagctcaggtggtaatacaagtgataaggagagggtgtaaatacagatgaaacttcactcgctcgcccactgcttacctcctactgtgtggcctggttcctaacaggccatggactgatactggtctctggcccagaggttggggactcctgtgttagaacatgtagatgccaagtacctgtgccaaccacaggtccacctttgcatacttgaccttaccagtattttatgaatatatatgtacagctcccatgttaccagtgaagggtcttgactatgagtcatacaggttcttggcgtttgaacaaagaattggacaaaacacataagcaaagcaatgaaagaatggagcaatgaaggcacagatgtgttgaaacaaaagtacactccacagctcaagagcacctgttacagaattttctgggatttaaataccctctagagcgttcccattggttacaccctatgtaaatgaaggagtggcccataaccagcctgcttggttgcaggaggtgaccaatcagaggctgaagtgaagttacaaagttacacatgaggacttggcctgctaccagtctgattatttgccagaggggaccagtcagaggtactttccattttttcatctgcaatgcagtgcattgggagtagcctccgatccttttgttacttgggcatggagaggtggggttttccttttggttcagctctaggaagtcagcagggccttcggttccctgtctctagaccctgttctcctgcctcacccataaagggaattccctagagatactaaaggctgtctgtctctcttctgagcagcccactctgcctctcagagtgtacttttggtttacaataaacttttttgcctactcttactttgtacttgctttcaaattcttttgtgtggtgaagtcaagcacctgaaccggcccactgacaacagcaaggatagaagcagtgagatcggttacaaggctattacaatagttccctccagaaacggcagtactgagaggtggggagaagtaagttctggattttctttttttttttttttttttgagactcgctctgtcacccagggtggagtgcagtggcgtgatctcggctcactgcaagctccgcctcctgggttcacaccattctcctgcctcagcctcccgagtagctgggactacaggcgcccgccaccgcgcccggctaatttttttttgtatttttagtagagacggggtttcactgtgttagccaggatggtctccatctcatgacctcgtgatctgcccgcctcggccttccaaagtgctgggactacaggtgtgagccaccgcgtccggccctggatgtctttttgaaagtagagcttacaggatatgctgactgattagaccggagatgtcacagcatggtgtcaaagcgactaatatttttggctagaatcactaaagtttacatttatgagatggataagactgtggaaggtttggggaagaagatccgaagctcagttttggacctgttaggttcaacatgcctcttaacacatccaagcagaatggtcaaggatgcagtcttccacatggacaggacatgaaatgtctgacatcgaacaataacaaataacattttgacatgaggaaaagtatttgtaattgtaattgatagttcattcactataatttgtccacgttctttttcaggccatgtcatatatatacctattaatatttgtaatagacaattttgctcttttctacttaaattgttatatacatttctccacattgctttataggcctaacaaccatgtttaaattctgtatcttcatacagaggtaatatttaaaaaagaagacgaagacaaaaggactcccttccctcacccatatacctatgccgtcttactgggagcaaacacttctttagctccgcaaagcgattgcactttctcttccaagtcggcagacggcgcgcgagcagcgtaggcactgctccgcctccaatccagttgctcttctttcttttcctcactctctttttcctcgcgtcctttgccccggaagtgctcttacaacattggctgccggcgtgactttgaccgcttcccggtgcgttaccggcagctgaacccacccggcgccacgggactttgacgcgtgctctgcgcttgccatgagactcctgggagctgcagccgtcgcggctctggggcgcggaagggcccccgcctccctaggctggcagaggaagcaggtaccggagcat

SEQ ID NO: 30896 - DNA, 2300 bp, Homo sapien
atatacctattaatatttgtaatagacaattttgctcttttctacttaaattgttatatacatttctccacattgctttataggcctaacaaccatgtttaaattctgtatcttcatacagaggtaatatttaaaaaagaagacgaagacaaaaggactcccttccctcacccatatacctatgccgtcttactgggagcaaacacttctttagctccgcaaagcgattgcactttctcttccaagtcggcagacggcgcgcgagcagcgtaggcactgctccgcctccaatccagttgctcttctttcttttcctcactctctttttcctcgcgtcctttgccccggaagtgctcttacaacattggctgccggcgtgactttgaccgcttcccggtgcgttaccggcagctgaacccacccggcgccacgggactttgacgcgtgctctgcgcttgccatgagactcctgggagctgcagccgtcgcggctctggggcgcggaagggcccccgcctccctaggctggcagaggaagcaggtaccggagcatagagaggctaaatcgggaccattcccggaaccttgtgatcccttctgggcaatggaaggccgtgacaccccctgggtcctcatgactgacagctccgaatactggcagtcgctcgtcagtgctgaaaagcacctcggtgcctgcacattagctcgttagctcgtttgtttcgctctctggtatccctagggtttaatcaactaaaagtgtctgtcactcagatactttgatattttatccaccttttctaaggttttttttttttttttttgcctctcttttcccgtgaataattgtgcattttggatgtgcagtcctatagggaaaggtttatattgtatcttcattccatctaatagggatccccatcccctgccaccagagtaaagttaaaacaagcttcatgaattgtttttgtttggagggaattggaaatctttgggggctgtcttggagctactagcatcactgcatagagcatataagttctcaaacatatttgtcatctgtgaactacaataaaggagaaagggaaaaaaattaagttaaatttaagctaaaatttgtattttctattaaagtattttttggagctgtctttgtgattttatctgccccagtgtgtattttcaaatctgcagtaaaaagtgtctcccattttaattaaatttaacttattcattaattaattttaaaagaatacgtctttactgtcttgttttgaagtctgtcctctgattacaagagttccaggcttaaaggtttcccctggtgcctttctcaagctatctcatatccagtgagatttcttggaggaataatgtccaccatactccttttaattgtctgttgttctctcttataaaaggtgcatagaattgagctctcgtatttttttcaggttaattggaaggcctgccgatggtcttcatcaggggtgattcctaatgaaaaaatacgaaatattggaatctcagctcacattgattctgggaaaactacattaacagaacgagtcctttactacactggcagaattgcaaagatgcatgaggtatatattcacggttgattccggattaattagaaccagattttaattgttttgttgctattatttaataaagcttataaacctgaaagattaaaacaatggtaacagcggacttttgacagttaggcttatctgaaagttgcttaagttaagtatctgtgttctggttttatttttattttttatagaagaggtctcactttgttgctcaggctggtctcaaactcttgggctcaaattatcatcctgcctcagtctcccacagtgctgggattataggcatgagccactgcacctggcaactgtttccatttcagttaagatttctttccttcttggaatgcagggacagagaaagtctgaattgctgtgcttgtgtttaggtgaaaggtaaagatggagttggtgctgtcatggattccatggaactagagagacaaagaggaatcactattcagtcagcagccacttacaccatgtggaaagatgtcaatattaacattatagatactcctggtgagttggattcttggttttattgcagcttctttggcaaaagcacatttggttctttctcttactgtgacccaattagtttttgattgtcaaatactcaaaagtgtaacactgaattcctattaaagaagactaacttaggacctagagcacttcatccttatgtagttttcttga

SEQ ID NO: 30897 - DNA, 2300 bp, Homo sapien
cgtgacaccccctgggtcctcatgactgacagctccgaatactggcagtcgctcgtcagtgctgaaaagcacctcggtgcctgcacattagctcgttagctcgtttgtttcgctctctggtatccctagggtttaatcaactaaaagtgtctgtcactcagatactttgatattttatccaccttttctaaggttttttttttttttttttgcctctcttttcccgtgaataattgtgcattttggatgtgcagtcctatagggaaaggtttatattgtatcttcattccatctaatagggatccccatcccctgccaccagagtaaagttaaaacaagcttcatgaattgtttttgtttggagggaattggaaatctttgggggctgtcttggagctactagcatcactgcatagagcatataagttctcaaacatatttgtcatctgtgaactacaataaaggagaaagggaaaaaaattaagttaaatttaagctaaaatttgtattttctattaaagtattttttggagctgtctttgtgattttatctgccccagtgtgtattttcaaatctgcagtaaaaagtgtctcccattttaattaaatttaacttattcattaattaattttaaaagaatacgtctttactgtcttgttttgaagtctgtcctctgattacaagagttccaggcttaaaggtttcccctggtgcctttctcaagctatctcatatccagtgagatttcttggaggaataatgtccaccatactccttttaattgtctgttgttctctcttataaaaggtgcatagaattgagctctcgtatttttttcaggttaattggaaggcctgccgatggtcttcatcaggggtgattcctaatgaaaaaatacgaaatattggaatctcagctcacattgattctgggaaaactacattaacagaacgagtcctttactacactggcagaattgcaaagatgcatgaggtatatattcacggttgattccggattaattagaaccagattttaattgttttgttgctattatttaataaagcttataaacctgaaagattaaaacaatggtaacagcggacttttgacagttaggcttatctgaaagttgcttaagttaagtatctgtgttctggttttatttttattttttatagaagaggtctcactttgttgctcaggctggtctcaaactcttgggctcaaattatcatcctgcctcagtctcccacagtgctgggattataggcatgagccactgcacctggcaactgtttccatttcagttaagatttctttccttcttggaatgcagggacagagaaagtctgaattgctgtgcttgtgtttaggtgaaaggtaaagatggagttggtgctgtcatggattccatggaactagagagacaaagaggaatcactattcagtcagcagccacttacaccatgtggaaagatgtcaatattaacattatagatactcctggtgagttggattcttggttttattgcagcttctttggcaaaagcacatttggttctttctcttactgtgacccaattagtttttgattgtcaaatactcaaaagtgtaacactgaattcctattaaagaagactaacttaggacctagagcacttcatccttatgtagttttcttgaaaatttgtgcaagtaaattgtgagtaggcagattcttgccttttacatattctagctgattctaaaggtgcctgtgccctagtattttcttgaagtgatcttgccaggccctgcacctaagggttggtgaatagtattggtgagctcaggaatctacattcttattagaagacttatgtgatgagcagagatacaaaaacttctaatagtgcatatattaaaaattcagattgctctttaagaccctctcatacttcatcttattcagggcatgtggacttcacaatagaagtggaaagggccctgagagtgttggatggtgcagtccttgttctctgtgctgttggaggggtacagtgccagaccatgactgtcaatcgtcagatgaagcgctacaacgttccgtttctaacttttattaacaaattggaccgaatgggctccaacccagccagggccctgcagcaaatgaggtaatgagccttagaataaacaaagaggatgtgatgatctagacagcaaaccttatatccaaaagggtgattaattcactgtcattaaactttattcttaaatttagttttttaaatatatttatgtgagttagtaagtg

SEQ ID NO: 30898 - DNA, 2300 bp, Homo sapien
tttatcttcatcagccatcttgtaagcaggaaaaggatggagtctgtccagtggataaggtgtttctctcactttttatgtaacaactgagtaatgacaacaaagtttacctaccactccttaggatataaggcccagtaaggcagagtttttgtttttcttttttcctactttattcactgctatgtcccagcccctagaacaactagttacaactaggcagttgtaactgcctagtacataatagggactcaaaaatatttgtaaatgaatgaataaatccactttcccagaattaccaaggcacatatttctgttgtcagaagtagagactcttaaactttgttgtacatcagaaccacagatgcagcatcttaatgtacatgtccccttccccagccctagtttactgtatgtgtatttggaaaggaatccacagatgattctgacatgtgaaaggctaagaagcagggagcttgccaggaaggttgaaattaaaatctgaaagttgtggggagtcttagaatattaagtgttactttttgttggaaatggcttcttttgtctttattaaagttaggaatgtgttttctgaaaagcttactttttgatattaatttccatttttaaagaaataacttgaggccaggcgcagtggctcacgcctgtaatcccagcactttggaaggccgaggtgggcagatcacgaggtcaggagatagagaccatcctggctaacacggtgaaacccgtctccattaaaaatacaaaaaattagccgggcgtggtggcgggtgcctgtagttccagctactcgggaggctgaggcaggagaatctcttgaacctgggaggcagagcttgcagtgagccgagatggcaccactgcactccagcctgggtgacagagcgagactccgtctcaaaaaaaaaaaaaaaaaaaaaaaaagaaataccttgaaaaattttcagactgcttttaaatatcatgtcaagtatatccattttggctttgaacattttatttgtaattttacctgttcaacctctggtgtaatggagaactgatgtcacagattgaagagtctgtcatatttagtcaccgtttttttaaactacaaattgggatattctttgttaaaaagtatatgatcaggtctgttattaatggaaaggaatagagtaaggtcttcctagtactgcttactagagattgttatgttgtgattaataagaatatgattaatacaatttcaaagaactcagatgggccctaggcaggttggctttgaatcttacctcttctgtttactagtaggacagccttgggcaaattactttgcctgtgtaagttagtttcctgatctgaaaatgcagataatagaagctacttcatatgtgaagatcaaataaataacttgtcacatatttagtttagcgcttactgcattataagtattcagtaaatggatgctgttattactttgcatgcctgccagttttaaaataattagagtacagtaaaaactacactgaagagtttaaactttgatttaggtgatactttgtcaagtcattgttttgaacttgtattttactgtatattgagtaaggataaaccaggttgcattaaattgggaagattttgtgttatatattttatcattttcttctgtaaaacttgatatgcagaaaagtagaatgtgatgtctattataaaaccagagattttttttttctcattatagtggactgttttagctcttccggttactggtagtacaaccttgaccttaaacttgcctatttcagtatatttatctactattctgtgtacattttaaaggtatacattagtcttatttgccatttgaatgcaaatgtatcagagctctttgttacctaaaaaaatattttaaccattaatcatatatttttcattagtccttcatatattaagttgaatatccttaaagcaccaaaatatttgctttcttagtcagattgttcgatatggtgagattccagctgaattaagggcggcggccactgaccaccggcaggagctaattgaatgtgttgccaattcagatgaacagcttggtgagatgtttctggaagaaaaaatcccctcgatttctgatttaaaggcaagtgctttcaaaataagtcttatgttaacaacaaaaagaagtcgtttgttttttgtagggaggggacatgatgcttttatgtatgggctttattaatgaaatctcaatacatttatttaacataattggcttcctcaaaaaatacttg

SEQ ID NO: 30899 - DNA, 2300 bp, Homo sapien
aggaaaaggtgagctacagccagttttagacaaatatgaaattatcactgtaaaacgctaattatcttttcttttcaaggagagaggaaaaagcttaaatataagccatgttattaataaaaaaccttgaagtatggaaataaaatatgggcagtcttctacttaaaatgctcttagacaaataagacaaatactgttctccgaaagtcttatttttttatttctggtgttcttctaaagtgtctctcaaatgaacagtcttcttcatgtcaaagttccccaaatttcaccaattctttggtaaatttatcccaggagacagtgtaagttcgtatctgacaaccccatcgaaaattggctgatattctgtatttgcaaaaatattgccatgggtgggtcagggtttaacaaatgctgaactaagaaacgtggagaggccaggcacggtggctcatgcctgtaatcctaacactttgggaggcagaggagggaggattgcctgaactcaacatggtgaaaccccatctctactaaaatacaaaaaaattagccaggtgtggtgaagtgcacctgtagtcccagatactagggaggctgaggcaggagaaatgcttgaacctgggaggtggaggttgcagtgagccgagatcacgccactgcactgcagcctaggcaacagagcgaaactctgtctccaaaaaaaaaaaaaaaaaggtcatgtgtgaaagacagtgtctcgcaaagcaaatttctcatacacggacaagactgagaaaagtttcattgacatttgatacaagatgatgggcaagcagacagatggtatttaaaggcaaagtcaatcagaacccccaaatcccaggagacaataataagcatgaaactgaggccaaagtccagaatccagatttactgcagaatctacataatcagaaagagatacacctcaagagtcttgggtgtgtgcattactaccaagttaaaggtcctggccaggcatggtggcttatgcctgtaatcccagcactttgggaggctaaggtgggtggatcacctgaggtcaggagtttgagaccagcctagcctaaacccgtctctactaaaaatacaaaaaactagccgggcattgtggtgggcacctgtaatcccagctactctggaggctgaggcaggagaactgcttgaacccaggaggcggacgttgcagtgagccgagatagcaccattgcactccagcctaggcaacaagagtgaaattccatctcaaaaaaaaaaaaaaaaaaaagaaaagaaaagaaaaaaaggtctcaatccaggcagcgaagaccttggccaaactttggtagaatctccaagttatcctagcccaattaacctaagaccaccaaggataaacctgtacttctacaaagtcaggtttataggcccattgcaatgaggtagaccacataccagagagagtgctttgtataagttcagtttttaagtttattttaatccttgaagtaaaatattcaaaatgactcaagttggaagcatggcgttacatcaaaacttatcattttaagattagtaaaggagaggggtacaggtgcatttttttatttctcctgatccaaattacataatctcccaatttaatactatagtttgcagattctcatactttgatttgggcagaactggtccaaacccacaaaaagctgaggatgagcaagcctcttcctggactctcataaggggaagggaaatgaaggaatcgaatcactacctggagtactgtgtaccttgccctgccagggacgctgcatgcggtgtataaggaagttgtgctccagtatgcaagcgaagcaaccagacttttttcccatggacaggaaactagagtcttcagagatgtcctatatcagcgaaagccccaccctgcacttctataaaggttaatgaaacgaaagatgcaatcccagcgaacctagcccactgactccctccccacacctccacctgctggtgcctgacaagcatgctggcctctcctccagtaggaaccagcaggcggagtaaggaagcccgctgcaggcagtagtggggcggggcctcagaagcagtcagcccagggctctcggatgcagggagcctgggcccaaacagcagcttccggagtcggaaggagctgaggaagaagactgactgaaggagcttgcgacttttccgcctcggcaaccggacccagcagcaagcaggacgggcggcgctctgctactggtcccgttaagccagagtagcccaagccctgaagt

SEQ ID NO: 30900 - DNA, 2300 bp, Homo sapien
ctgagggcaagaaacagcaactccagcttcagggaagtgaaataataagaaataaactccaggatccgctgattcctgtgttcaacaatgccatcaggaacccagggccctcccctctctctgctctgccactcttgaaatgggcttcattctcaggcagccagcaagacagaggcatgcttctgggcagcacagccagacctaactggggcctatcgagggcctgcactctcccccttggcttctccctccagctggattttcttgcttttcttcaaacatgccagataggctcctgccctagcctctgcacttgcgttccctctgcctacagtgcttttgcatacatgtccacttggctctgcctccttcaggtcctcacccaaatattacctcccgagagaggcctgccctgaccacaccttttaagattaaccacctcccaactccccatttctttttctggcttaatttttctccctggcatgtaacttcatccaatatagcacacattcccttggcctcactgagtgtccgggccccacttgcctagaaggtgtgctccaggaaggcagagatgtttaagattgttcaccctcattcccccagggcctggcacaggtgtttcacaattatctgcagaaggaaggaaagacagacaagggacagacaacagccagaggaagaagtgcagtaagacaggatctttccagagatggcaccacgcccatcaacccacaggctttgctcaccatgcagaactggcacatgcccactctcaaccacccactggcaaaaagagatttcctttagccccacaatggcactggggtccacgtttggtgcaggggtagacccctgaacaaaatgcaggatggagaaatggatgttgggagtgcctagcagtaccagttctcctctctcagccctggttctccaggactttttctcttgcctacggtttaaaaacaatggctatcttagcccttcactgccacctgtctaaaaagagttgccgccgggtaccgtggctcacgcctgtaatcccagcactttgggaggcccaggcgggcggctcacgaggtcaggagtttgagaccagcctgaccaacatggtgaaaccccgtctttactaaaaatacaaaaattagccgggcatggtggctgtagtcccagctactcgggaggctgaggtagaattgcttgaacctgggaggcggaggttgcagtgagccaagatcgtgccactgcactccagcctgggagacagagcaagacatggtctcaaaaaaaaaaaaaaaaaaaagagttgccaacacttgctgcctccattccctgaagccccatccatgcctcaccccgctggaatccgacttccatccccggcctttaaatctgcctcgcacagtggttatcaatgtatcaatgacctacttgcttctgagacaaatgggactctcaggccttatcttaccctgccttgctgcccactcctccctcctcggcgcctcttctgggcaggaccggcaggtgttcaggcccgtccccagcccctggctccggcgtcccgggctccctgccggcatccaccttcacctcctccccagccccagccctctggcgacttctcccacctccacagtggctgtgccacgaggagccccatcaatgcccgctgcggcctgcccctttctccgccgtcccctttcacctgctgggaaatcacagccctaatgcttggagaatccaagcagtttccctctaaaaccccagggttgcgaaaccgcaggggaaacgccaagtccctgagctgggctagggacgcggtacgaggtagcacgggcgggccgcgattcctcggggaggcgtccccattgtccccccaaccccgaccctctcccgccgcggcctgggccagaagcacccggccctgcgctgcggaggcgatgccgcatcctagcactaagcccgggcagcggggaggggcagagagaacccaggggctgcgggaaacgtggaaaaggagtggccccatggggacccgggctcgctacagaccttcgccctgggggcggaggggaggggcccaccacggccttatttccgcgagcgccggcactgcccgctccgagcccgtgtctgtcgggtgccgagccaactttcctgcgtccatgcagccccgccggcaacggctgcctgctccctggtccgggcccaggggcccgcgccccaccgccccgctgctcgcgctgctgctgttgctcgccccggtggcggcgcccgcggggtccggggacccc

SEQ ID NO: 30901 - DNA, 2300 bp, Homo sapien
ctatcctcttgactacataaagaggccagagagcagagagagagggctctgagaggcattggctgtttattttccttgtcttaaccaacttgttctgccataacaaaataccacaaactgggtggcttaaacaacagaaatgtgttttcgatggattggaagctgggaagtccaagatcaagatgctggctgattcagttcctgccgaggcccctcttcctgacgtggcctgaaactgcatgctcacacagcagagagggaagcggcaagcctctgtgtctcttcttataaggacactaatcccatcatgggattagtaattatggttagacttcatctaactgtaatcgcctcccaaaggccccacctccaaataccatcacattggaggttagggcttcaacacatgaactggggggacacaattcagtctatagcaaacccgtcccagagggcctgggatgtgtcttcgcagcagatgagaggactgggcatgaggagaccaggtggttggctgcggagaaagaaggtcatagtgacactgccatcctggttacctttggccaccccagcttgtggaatgtaagaaggcccaggagccagttcccaagcatctcaggccccaggttctcttagccaagccctgagaatacatcaagaacaggtgagggcatgtggacgcaggtgtgcggggggcctcccagcagctgtcccctcttcctgctaatgctgctctgattttcacctttgctcacctctctccagtgctgctgaacacacctcattctggcaatctgactggagagagacagtgtcactgtggtgggttcagggataggctcaggaccctatttgggcaagtaagtcaggagaagcggttggtggagtcttggagggaagttgtcttgctcttctgagagtgtgtgctctcccttcctctaccgtgcatgtgagaggaagtgtgtgccccagaagctggtggtgccatcttgcctccctcaggaaagaggctcaggatggtgtcgactcagtggaaggcagagatgaagcctggaaagaaaccaggcccttgggggtgttactaacccactggaccgtgacccatctgaagcctgccctgtctctagactcagaaccagtaagtctatttcatggttaaagccagcctgagtgtggttttgtaacgttggttgaaaattcctaatggattttcatccaacaggcagttagtattggcaggaaacacagagatctaaggctgcctcgtactgggggtgggaggtgggaggcagtggggagatagtgccgggtgtggtggaagccaaacaatctgggaacaccacagctgctacctgcactgggactaccatatcttcagagtccaccaattttgggatgacccagctggagaagggacatttcctttcaccagcaactcccagccatggcagtagtgccttgtcagccacaggggccaggccaagccatgaccccaggtcagaagtgactgcttccacgctggacaattgtctgttcccatttgagcatcgtctctgagctccacaagccctgctgccctctctaaggctgtgagggagagcagggttgtggggagagaggaaaaaagaccctggggaaggagaaggaatccctaagatagacgctttaacctacatcatggctgagagtcacatcagagaagacagcagaaacactggggtggatggagtattttgcaaaggtacccttcgttgagactattttctcctctgtccttgcccctgcactcaccagtgtaagcacccaaatagggacttggaaagcaaagttgatatcagttattagaaaagataaaaacatctcctatttgtgcatgagtgtgactgcccaaggtgatatcagaagcttcttctttctagatgtgcatttagaaagatgtgcacacagactgtctctggaaggacaaatcagaaatgactaacaatggttaggggaacagagagaatgcttggggtcagaggggctttctctaactgttaagtctttgggttcttttctgttatcgtttgtaggttgcacagtggctcagagagtagacttggagccaggctgcccggttttatagccctgcttgacctgtgtgatccgaggtgagttatttcacctctctatgcttttgtggtacctcttacctcattgagttgttagtaaggtgcaaacaactcactatctgtgtatatgtgaagcatttaggacaatgcctggcacaaagtaatggctatgtaagtgactgctattat

SEQ ID NO: 30902 - DNA, 2300 bp, Homo sapien
gctcactgcaacctctgcctcccgggttcaagtgattctcctgtctcagcctcctgagtagctgggactacaggcgggtgccactacgcccagctaaattttgtatttttagtagagatggggtttcaccatgttggccaggatggtctcgatctcttgacctcaggtgatccacccacctcggcctcccaaagtgctgggattacaggcgtgagtcactgtgcccggccagttttaatatatatacatttaacctaatatctgcaaaatattatttcaacatgtaatcagtattcaaattaggaggttattctatttttcatacaagtctttgaaatctggtgtgtattttatacgtattgcacatctcctttccaactatccacattacaaatgatcaacagccacacatggctacctactggacagcagagggagggtatttaaagttatgggaatggatgagtggaagagagctcaggaatgggtcttgcatcattgaacatctagattttgaatagaagaggaggagctgacaaatgagacagcaaatgagataggccagcaaagtgggaggaacacaaggcaagtatggtgccaaggaggctaaaaaggagtggctgtcaattccatcaattgatagaagttgagtaagatgacagagaagtgactaatgtatttggaaagatggagttattactcctctcggcaagacagttttattagatcgggagctcctccactggagctgaagagagaatggactgtgaaagtggagatatgtatagacatctcaaaggcagcacctgatccttgacactctctcctacctccttctctctctaaattttgatctctattggcggcccaagctagaaatctgggagacactctcaagtctttcctctctttcagatcgcataggctattatttacagttattcccattttacctcctaaataattactgattttcttctgtgccattcctgctttttattgctaacaggccctcgtcatctctaatcgttacgactgcagcatcttcctaataatcctcacagttttcagcctctagctttgacgccctcaaaattctgttagtaaagcctgagggctcccagaaagcgacgatggtgctgtgctggcagaccgaatgttttttaaaacacaaagcttgcagtcctgctgctgtgctcaaaatccttgcatggctcttcttgaaacaggtttagtgtttctactcgagttccttctctgtcgttcaacacaaacacatacacacccagttctgtttcacgcttttgtctttattatccctcgtaactgcccgccctgcaaccaacccgctcaaacaagcaccctgactggcgcattcttactcattctagcctgggtttcaacttcaaggagcttcagcgcccctcactcccttgccctgaaagctggctaaactacgcaccttttctccccttttgaaatgacctttccagatatttctatggaattcagtgccattttctgccgctgttctcaccacattcattcatcatgtttagttttaaaagtaccagattctgtcgatttctccaactgaactctgaaatctttgaggtcagggagcttgcctcattctattttgtattcccagtacgtgacacatggctggacacaccagaaattgtccgatcaagtttgtgggtattaagagtggtcaaagacgctggggagggcagtgctgggagaagggcagcgcgcgtcttggcgaccccagcgcagttcgaactactccggagtctggtgtggagccgagagggagccccgcacttttctccccgcggagctgcgctgagtctgaaataggtgtacgcgtcagcggggcaggaaacggaaagacagtgcagtaattggtggaaagctggaagtgggcacctcgagggcctcagccccacgaacacagtcacccaggaaaagcgaaccgcgccaggccctgtcatcgaccgctgggtccgtcctcccagcgctcgcggccgctcacatgggcgtggccctgcgtgacctgccggggcgtcacgtgagctcccggagtcatgtgaccgccgtcttgacagtgttccacgggcgctgcttcctgcctgggtttggagttgtcaccactttcccctctccgtctcctgcgggcgcaatggaggaggaggatgaggaagcgcgggcgctcctggcaggcggccctgacgaggccgacagaggtgccccggccgcccctggagccctgccggccctctgcgaccccagtcgcc

SEQ ID NO: 30903 - DNA, 2300 bp, Homo sapien
tttccattatttcttgtctaaattatcatgagagttcaatcacataaatgtagtttttaaagcagtaaatcttgcttctctggttatagtttatattttcacaggaattactttagatcctgggatatacattttcttttagcttaaggtttagtattggttttatacttttattattcttttgaagaaatacctgtattactccactctcatgctgctaataaaaaactgccccagatagggtaatttataaaggaaaaagatttaattgactcacagttccatagggctgggaaggcctcaggaaacttataaccatggcagaaagggaagcaaacattcttcattcacatggtggcaggagagagaaatgagtgccagcaggggaaatgccagctgcttataaaatcatcaaatctcgtgagaactcactcactatcacgagaacagcttgggggaaaccactcccatgattcaattaccttctacagggtcacttccatgacaggtggggattacggggattacaattcaagatgagctttggatggggacacagccaaaccatgtcaatacctaataatttttgattcataatattgatttaatagttgattttagactagtattctttttcattccctctttattccttggttagaaaggctcttactgagaatggagactgtttattggtgcactgtgcctgggaacatctccattgattaggactgtaattctgccagacttaaattctgggttcaaagcaaattcttctttgctttatcttctacttctctctcctttttcattggcagctgcttaagcagcgcaatgtaagtgtgtttgtgtaagggtatggtttataccctttgagttcaggctgtccttttaaatagtttcagacaagaaccctgtttattatttagcaaagaacccattcagtactgcttttaaggaaaagaagcagccttaagtccctgtggtagtatatttgattttctgaaaatttgtgtgtattccttactgcataccagaaaaggaaaaaaatatgcatcatatgtcatttagtcagtaaacattaatataaatactgaagctttagcagattgcctgaaggtgaatataaataaggtgggagaataatatcaagaaagaagctgattaaacttgagttatttttattcaactttattttttgaaaacagagtagttctctctaatgtgctaatttctctgtctttttaattttagagttttctttacagagaaatttggattttcttcccaggcagcaagtgcaattaacaggtattttaaaattaattttgtaagtgcctattgcatgtgaagtatgggtctttataatcaaatgttaaaagaagcaaaaaagatgtatgtgacctaatattttttaagtgcgaaactgggactacattgggacttgaatcctgagtggctgtgtttaaattagtggaaaaccaaagaagtcttgaactgctttttatattttttgatgagcattttataagaatgttaaatgagttaggatttgctttgcctgatattttcaagactttcttgaaactgatgtttgactgtgttgcatttcatgaaatgtcttatgtgttctctgggcagtgttgtatatgtcatatcagctcccatgtccccggtgtttgggctcctggtggataaaacagggaagaacatcatctgggttctttgcgcagtagcagccactcttgtgtcccacatgatgctggcctttacgatgtggaacccttggattgctatggtaacgtctgtgttagcccatggtggggtcagggcttcagcaaggagtctgtcatgttcatctaagtaggcacgctcagcaaattcagatgacaaggcctatgatagtggggagatgacaacttgattccaatatctacaaaataattattttttaaagtataattatgaattattaacatataaggtatcttttaatttcatttgatttatttaaccagttaacttcagtgctgaaagagaatttgaaataaagtagccttataaaagccagaatgcttattagtcccatttgtttttctaaaataggtgacttaaaagaaggcattccatcatagatggcaaaaaaccaaaaatctgttggaccagtaactcttctttttctttgacttgcttagtaggttaaaaagtgataatgaattcaagtttttgttattgttgttcaaaacatcatttttaagacccgaggctctagtgctgcatttcctacctgttaataaagg

SEQ ID NO: 30904 - DNA, 2300 bp, Homo sapien
actcaaagcctgcccgtccctctcattctacagattaaaatcaaaccaaaacaaaacagaggcccagagaggttatacaaatgaatcaaaagatttggggtttcttttgccttcagctttggcttccaaatccattttcagccttgtgccctcaggctctgggtgaaccaaggaaatccagaccttcctgtggtagagggatccacaagagcagaagtgcaggtcagcttgagcagctgtgttgcttgagtctggaggcagtggcggatgggatgccttcctccttgaaagactccaaggctctgtaacagcagttttgaattgcagctgctgttatgggtgagagggaggacttcatcagaatcgcctggagagaatttcaaaacacatgtccgaactctgcttgcctcatgctacctagggtaatccacagtgcaagagatggcagtgagcatgaattttgtaagtaattctgttgtgtccatcccctgctgagtcccttgtggtactatttgacaatggtaagccccttgagggagttctcatcttaagggtcattgtgttctacacagcatctgatgtgtaattcagtggatatttgttgaacaaatggatgaaacaaatggcagtggagagctaagaacagaatctaggcaaacaggcctgagcagtggaatgtgagggggactggcggtgcctcggtcaatacgtatcaatcgagcgtgcttaaaggtgagtctggccttctgcagcagtctgaccattgactctttatcaataaacataaatactgttctgcccttgacctcaagagttaaaataataaatagcttaattggtcatcattaattccacttcaaatttactataggcatgtgtggccttgaacagaatgactcccatgctcagcccaggcattttatccccgaacctcccaaaggagtgtccttggtaaaacaaataaaatcagcctcccacctcctcccacccatcaatagcacgtttgctattgagtccaggcaaatggccatttgcaaggttggatgagtagttaagccacacaggcacaatgtaatatgacaacattcttcatggtaatattgtcctcctcctcattacatttgaatatagattgccactgtgcaatgccttcgacctcgctctctatttgtgaggtttaggagttcttcagacaaggtgatgtccacgtgcactcctcagaaattattagcctatttgtaaacctaaacaaaataacagctattgtctctaataacttaatttgccaaatctcttttcttcctatgcttaattatgtataaatttatagacttaagccacctgcctgctcaatgcttgtatataatcgtacctcttagctaccacttaatgtttcagggctcttcctttatattctctttgcttcaaactgtacatttaaatatcagtactcagctcagcttctgagtattaaacatttttttttctccacttccttgaaaagctgtgaacaagccttttagcattttatctggaccaaacagtagtggttttacatgagaaacgagaactctgcaagtaaatctatgtgtttatatgtctaaagtgcattataaaaagaagcaataaatctagttttctacataaaaggaattagattttccagtttacctctgcactgggattaataaaatgcgcaacaaatagctgatggaatgatccatttgaagtttgtaaaggtatctagggaagctggctggagtagccttttcattttttcaaaagcaggatgcctcttaattttttgattcagtcttgtttctcaatgactgttttaaaatgagctgagaggctgttacctgcctgtttctgcatggctgagcaaattcacccgtaaatccaagtttctcttcatttccatcactatacgtctccaaattacagagaattcattcctgagctggagaggtgccagaagtttctcatctagctgtctgtgggctgcctttttctttcccctctttgaggctttctgatgcctagagtgagctcaactcaaaggtttccagcctcacactcgcctcacattcccccacagtcacattgcgctctgtgattctgaggaatacagtgtgccagcatccgatccagtctcctttcacctgcaggtgttccagaaacttcaaaatgcgtctggtaatgtatttgcttttctaaacgtgccactttgatgtgcattatatgcagctgcttattattttttaaaaatctgtcttctgaattaacatgtatgcaaaaaa

SEQ ID NO: 30905 - DNA, 2300 bp, Homo sapien
ttgcctaatcctccaatcagtgtagctctttccacctttgtagagaggagaaaaggatggaaatcagaggctaggagtctttaggaaaatgctttcttatggaagcctgagaaaataagaagggggtgcccaacactggatacttcaggaagcaaaaattgggctttttaaaaaaaatcattttaagaatcacaaatactttttagtcagtttgatttttatatgattttttatatagtaatatattaattagagttttccaaataataattacttttggaactttttataaaaatgcatattccagaaccacaacagatctatcatgtcagaatatctgagaagcagcctgggacttttatttttatttttatttttttgagacagagtctcactctgttgcccaggctggagtgcagtggtgcgatctcagctcactgcaatctctgcctcctgggttcaagtgattcttctgcctcggccttctgagaagctgggattacaggtgcccactacacgcctggctaatttttgtatttttagtggagatggggtttcaccatcttggccaggctggtcttgaactcctgacctcttgatccacccgccttggcctcccaaagtgctgggattacagggacttttaaatttttaaaaattccccagataatcttcatcattgttaaagtgtagaaaatactaaactgtagaaattgaccaaaaatatctgctttatttaggaaactgaagtggatcagaacatttagatgatcaattttttttctcaatttttttttggatattttagcctttggaataaaatattccaaattttatttggatatttttctcaatttttatttggatatttagcataaatttatttggataaaaatttatccaaataaatttttatttggatattttatttggatattttagcattctcaatttttatttggatattttagatacgcggtgagaagctggtgaggcaatattttcctgatgagatgccagaacaatcaccattgctttaatagaatttgttcagtggcactggttgtgtggaaaattgttttctcctcagatttatggttttttctcaaaaatatgacagaatactgtgctcttaaaggaaagctgcttttgtttgatccatttggccttaagggagggaatacatttaataagcactaattagattagtttcaagttattcttcacttgggctataagaattgtttagttggcatgaaaggggattagataatttattaactggcataaatgacaattatggctgaaaatcataaattatggcatatgactaaatagaaagagaaaaatatgttgcaaagaatgatcatggacattgctcatttaaacattctttaaaagaatatgtgtactatgaattaccagttaggtgtgcagattagtaataatatagctaattttctatttttactttattcagaactgaaaaacatctaaaaatagtgagttaaagaacgtttttctttaaccaacacttgaaaatatactccaatcgtttcagagatagtaagatgtttttatgtttatataactttttaattttgttacataaactgttgttagaagttgaagatggtttccttaatttttattttgcaatctttatggattgaattaaaaaataatttttggacatgctaaatattctgagaggtgtttagaagtagattctatatccttagagagcctctagttcccacagcagcttctccagggaaaagcccttcttcactatattcaccacaaattaatggcagttattcattttttaaagcagtaccagaagctgatcttagcttaaaggggaggcttcatctcacatatgagcagcaaattgattttctcttcatggcactgtatcgatagggttaagtattttgatagaagaccatgctatttaatataagtagattttcaagaaaatcactatgctaaatacttcactagaaggactttatctatatacagcagcaactgtgacctgctttagagatgacatcattgggtgtcatgtggctctttatacgtttcagcctcagaaagagataatctgtgaaagccacagagcctgatttctgctgtgataatcttcagcagaccgaggctggggcgagaatgaggcagacctgtttacatggtgtgtgcagtgccttgtggaattcttaactctattttattgtattatttttaatcgaaaagtagatcagatgatagcatgaagtgaatcggctgctttggac

SEQ ID NO: 30906 - DNA, 2300 bp, Homo sapien
cccactacacgcctggctaatttttgtatttttagtggagatggggtttcaccatcttggccaggctggtcttgaactcctgacctcttgatccacccgccttggcctcccaaagtgctgggattacagggacttttaaatttttaaaaattccccagataatcttcatcattgttaaagtgtagaaaatactaaactgtagaaattgaccaaaaatatctgctttatttaggaaactgaagtggatcagaacatttagatgatcaattttttttctcaatttttttttggatattttagcctttggaataaaatattccaaattttatttggatatttttctcaatttttatttggatatttagcataaatttatttggataaaaatttatccaaataaatttttatttggatattttatttggatattttagcattctcaatttttatttggatattttagatacgcggtgagaagctggtgaggcaatattttcctgatgagatgccagaacaatcaccattgctttaatagaatttgttcagtggcactggttgtgtggaaaattgttttctcctcagatttatggttttttctcaaaaatatgacagaatactgtgctcttaaaggaaagctgcttttgtttgatccatttggccttaagggagggaatacatttaataagcactaattagattagtttcaagttattcttcacttgggctataagaattgtttagttggcatgaaaggggattagataatttattaactggcataaatgacaattatggctgaaaatcataaattatggcatatgactaaatagaaagagaaaaatatgttgcaaagaatgatcatggacattgctcatttaaacattctttaaaagaatatgtgtactatgaattaccagttaggtgtgcagattagtaataatatagctaattttctatttttactttattcagaactgaaaaacatctaaaaatagtgagttaaagaacgtttttctttaaccaacacttgaaaatatactccaatcgtttcagagatagtaagatgtttttatgtttatataactttttaattttgttacataaactgttgttagaagttgaagatggtttccttaatttttattttgcaatctttatggattgaattaaaaaataatttttggacatgctaaatattctgagaggtgtttagaagtagattctatatccttagagagcctctagttcccacagcagcttctccagggaaaagcccttcttcactatattcaccacaaattaatggcagttattcattttttaaagcagtaccagaagctgatcttagcttaaaggggaggcttcatctcacatatgagcagcaaattgattttctcttcatggcactgtatcgatagggttaagtattttgatagaagaccatgctatttaatataagtagattttcaagaaaatcactatgctaaatacttcactagaaggactttatctatatacagcagcaactgtgacctgctttagagatgacatcattgggtgtcatgtggctctttatacgtttcagcctcagaaagagataatctgtgaaagccacagagcctgatttctgctgtgataatcttcagcagaccgaggctggggcgagaatgaggcagacctgtttacatggtgtgtgcagtgccttgtggaattcttaactctattttattgtattatttttaatcgaaaagtagatcagatgatagcatgaagtgaatcggctgctttggactaatgggatcttcttttctgcattaagatcaagaacttttctggaatcctctgttctccgagtagccttgtcttctctgtgtgttttatcaatttgaagaacactggcaaaaatcagcaaacttcatctcccaaaaagctctcgctcttttttgccaatacttgaagatttctgctccaaaatctactttgagctgcttgagcatggtggttgataaccgaagggcaaaagcatcacttatttagtgtgtgttatagaaattttttagacaaccttactagctaacccaggtgaccctttacggatttctttcaaagccaatttgaataaacaactcttccctctcaaatgggcaagagtaactcttcagcaccatggagaggtccgggcagcgtgttacaacgtgggactgtgaccagggcaagcactctgacagtgtaagttttacaaatgtctaccatctattttaggtgtatcatatttttacaaatgaagagagaaaacttca

SEQ ID NO: 30907 - DNA, 2300 bp, Homo sapien
tcttatccctgaaaagtttccatcttcttgtcttcatcttgactcattccctacccccaggcttctgctttattcatcaagctttcattgtgcagccagtgagcaggcctagaaagtcctgcacgtgttatgtgacccacccctctcctggactaggaaggattagggcagtgagcttctgcacggtgagtctccagagtacttttcctttgaacctgctgctgaaattgaagcctctgaggataccaggagttgagttttcagggccatcttttcgttctcctcactaggaaggctgaaatgagtgtgcttgtgagtgcgtcaagggagtcgaattgagatagcaatagcaggctttgctcctgcttgaacctcaaatagtaaaaattaagaatatttataaaaataggtttttctcattccacaaaacagataagttattaaaattacattagcaaataatcctaacataaactcccaccatttttaagagagtgcttgataggaaaacttgtcaaacatgtcaattccatttctcatgcaaaaagtacttgttttctctgtcagtagcacagtgaaactgcgtggttaatgggaagaggaagagtttttgagacggctacataaatagaacataggacagatagatactaaaatagcttaaaaataatgtccctattgatttttttaatttgatggtttaaattcagtcacatttttgttaagtaccatttatgtactcagagctattttattaagaaacaacatgggccaggcgcggtggctcacgcctataatcccagcactttgggaggccgaggcaggcggatcacaaggtcaggagatcaagaccatcctggctaacacggtgaaaccccgtctctaccaaaaaaaatataaaaaaattagccgggcatggtggtgggcgcctgtagtcccagctactcaggaggctgaggcaggagaatgacatgaacccaggaggcagagcttgcagtgagctcagatctcgccactcgccactgcactccagcctgggcaacagagtgagactccatctcaaaaaaaaaaaaaaaagctaaaaaagaaaagaaacaacaaaactaattgcctgtggcaactgaggaatataaataagaaaattttatttaacttttcccccttaattttctcattacattagcttgaagaatttatagcccagttttttctttttgtgtatcctcaagtcctgaagtggccctgaagccactcagaaactggccccagttttttcccagaaacatgtattgtctgacttgtatttcctttgagtattgtccgcaagtccagaattactctgtctcagggaggatgggtctgttccaagaattgtatgtgctgcattggggggtgtccatattttcaagtcacagcgttgggtaataatatatgtacaaagccttacattaaaaaaaaaaaaaccttccaattaagagtttagttttcatgaagtaaattatagtgactttaatattttaataagctctctccctaaaaaaacttataacagcaattattctatcttatttctatttgacttaaaaagaagctaggagccaaaaataagcagggaatttaaagaattacaaaataatccttttaaagagtaaagaccttttagttataaagttgacaaacacttcaaaaactcaacatagaaaaacatcctttcattgttggtattcagaatggattgttctctctttagcatgttaaaagttctaaaattatctttaaggtctttttcttttttttttttttttttttttttttttttgataagcaccagccaagcagccttagtgggtaggaaggatgatgccggaggttagaaatgttcaactgcaacattgatttgtgtctgtccctctccctctccctcgctggcctttttctcgttaatgaggactagaatgtttccacatcagttaactgccttcataaagcaccagaaggtcacaccagctccagactgatccttttctttgtgcctataatataattggctgattgtgcgggtgatgagcgccccctcccccagcccggtcccagctccatgttcctaagcctgcctcactggtttcggagggctggagagcagctcagctcgctagctgcgcgcttcccggcacaggcagtgccactgcgcaggttgatcagcgaaacagcatccattttaatctgcggggagcccctgccttaccagggcgttctctccgcccgccggtggatgctccgcgcctgccctccgcagcctc

SEQ ID NO: 30908 - DNA, 2300 bp, Homo sapien
acctcacaccaggccctacctccaacattggtgattacaatcgaacatgagattttggtggggacacagatccaaaccacatatctggagctctactagatttgtctgtgttgaactctaatctttaaaagctatgcttggatgggcgtggtgcttcacatctataatctcagtacttttggaggccaagataggaagatcacctgagcccaggagctcaagaccagcctgggcaacatagtgagatcccatccctacaaaaaattttttaaattatccaggcatagtggtgcactcctatagtccctatactatctagtcccagctattcagaaagctgaggtgggaggatcacttgagcctggaggtcaaggtggcagtgagccatgatcatgccattgcactccagcctgggcaacagagcaagaacctgtctaaataaataaataaaagctatacttgattattttattcagcacaattatttcttacagaggcagccagtgtgggatggttagagtgtgggccacagaggcagagagcccatattcatcttccttaacctcactgagctctttcattttgctgtaaaacacaattgatagtaatatctactccaaaagattattgagaggattaaagacatatgtaggaggaacatataaagtgcctggcacatagcaacccctccctcaataaagggtagctgttaatatatgccaggtaagaagatgcatgcttccttcattttaactaacctcctttggcaggatttaacatacacagggtccttcaaactagagcatactttaaccccaaagtcttagccttggtgaattctcctgtattttgagcacctgcacggggcactgggagcagcagtctgtggccagcattgccacagccccgggaagcattctgggctgcctgcatgcagacagtgggacccccatctggagtgagggtcctggggtttgaaggagagtaagacaagggagatctcttccagggaaaaccctgcccaaatgcaaatgtggttcatgagagacaacttgttattgtaacatctgacaaacatgcaattaattctttttggaactgaggtggggcaatgagaatggagtaaagggaagatttcactttggtttgggggctacagagggaagtatttgctttatagaagtagggctattataaactactttgaaacacatttatgccacaagtcttctacaaattgaatttttaaaaaatgtggagagaaataagtagacactgaaggtgagcatgtcagcagcagttcagatgccaaaaggttatcttgaatagcctttttgcttttagaactctgttcttaacagtattgtggttgcacaagaatctatattggaaaatttattgactagtatacttgctgctttttatctaagcttgtcagagtgtaagatggtgttgctaaatgaaggcttgccctttgaattcttttctgacctatttctcctgcaaacagtagctttattttttggaaataaacactgggcataatttttagtttatgacagtagtaagctgattctgatgagtgtgtgtttgtatgtgcacttctgcttgtctgcttcttgcaccaaaacatcctccagctgtgggccttttccctctctttagtaaagcctgtaaacaaaaccagaagccatgggaaaagtgtaaagagagcagcagaaaagaacgtttgcttttgtgaaaaagcccgccactgcttgaattttaaagaaaagttgatggatctttttctgttgcctatattaatagaacaaagcactgctcccagggcagaagggtccttctctgtgttggaagtgaatttcagtctcgtcctggagctcctaccagatgagacttttacatgagattttaagaaatgatcagttaaagggggaaaaaagcaaacatctgtgttacaggtcagcctttaaattatactgtttccgttttgtcatgggatacccagcttttaactcagtagtgaagtcggctgggctggaagttttcacatctatttttatcccacacaatctacccctggttcagattgctagtttcctcacagagctccagtccacactcggccctgaacgcggagttgaatcagctggctgaagctgagtgcctctcttttcctttcttgggaacaggaaaggtgctgtggagaggaattggggcgggatcattcaggggaaggtgacagcagatggtgggaaggccggagtcagcaagccaagtgtcaggggcagagtgagcct

SEQ ID NO: 30909 - DNA, 2300 bp, Homo sapien
gtatctacagtcagttactttatagtttggctgcttctatgcatgtcatcttgtttttattacattttctgatggattgttgcagatacaaagaaaatcggctgattttttttaagttgatatgtgtattgcatgatgttgttaaattctcttcttagttctaatagtctattaattttttttctttttgtatatcaactgtaaaaagtgacagttttaccttttcttttccaatgtttaaagctctcatttctttttctttccttatagcattggccgagacctccacgacaatgctacacactgtgaagtagtgattgtgagctaagactgtcacttatagaaaaatcatgtattcctagaagaaggttttcatttcatcttagctagaggacatggagcacttcaggaaactatttcacaaaaatgtaaattagaaactgtgtctggtagccaataatccatttttaacagtggccctgtgctcatctaagcaacagaaattacttttgtataggagatggcccttccaggggagaaacagctcagttgtgatacacttgtcttcatcctgactttaagtacatttaactccacactaaacccttgtggccacaacacagctctgcacctgtcatttgctctagacaaactgctaaacgcaattgtttctgacaatggattactctgtatcccgtgggggaattctcagacagcagcattagaaggggccttagagatcaaccatttctcttattttacacacacctaaaactccctacagccgtgcttcatcagcttcgagcagatgagccacccagaaggcagctccagttattaggtcctagggcctgggtgtagtcaggccctttggaagctccaagtcagagatcaaacacatcctccccactacccacgcctagggtgactaatgcctgtgggaaaaacaactgaactaaaaagtcccacaggaacctcaaacccagcacatccaaaatggaacttctcaccatctcctccaaactcagtcctcttatacagtaatccctgtaaagctagaacaatctccattccccattctcagggccttcctctcccgctcacctgaggagctaccaagccttggcccacaagccctctgagagtccctcctgcccaccctgtgttctccatactgaataaggacttggccacaccttgtcaactcttccctctgctctactcctgaccctggatccatccttcatgctgtggctgaagggatccccccatcatgcaaattctgccacatctcccgcctaaaacccaggaagactccccactactctcagcacagaaagtacactccttagtatggcatcccctgccctcatggcatggccccatccagccctccagcctcacaccctgcaaggacacctagacccccacctccctcaacccttcatgactgcgcttctgatccctgtttcccctggctagaccctgcgtgccctcccgctggaagcggtctaatgcctgcttgtttttaacactcaggttggggcccctgcctgctcccgggagcctttgctgactcctggaccccgttgctccggctgagcgtgggctctttctctaggtctttcctcccaggactctgtgtattcatcctatcgttaaactggattctctacaagagtaataattgcagagtcagccagctctcatcccttttcaggtttcagaaaagacctgtgaacaaaacgccttgagtctgatttagtgtggcaatgccccaagggtcctgttctccctgggtgtcctgcacctggtgcaacgtcggcctggcatctagtgagccatctaaaggaacgatgatgagtgaatgatttgcctaccccttccagtactaggctggaggtcgtggttagggcccatccctacgcaggacatgcaaagtgggaggcactcctctctctacgtcggcagggggcgctgcacagctgcggggcggggtagcttagacacggggcgtccggctaaggccggggacccagggtggtgggcggggtgtcccgcccgcctgtggaccccgcgcagtaactgcgaacatttcgctttcattttgggccgagctggaggcggcggggccgtcccggaacggctgcggccgggcaccccgggagttaatccgaaagcgccgcaagccccgcgggccggccgcaccgcacgtgtcaccgagaagctgatgtagagagagacacagaaggagacagaaagcaagagaccagagtcccgggaaagtcctgccgcgcctc

SEQ ID NO: 30910 - DNA, 2300 bp, Homo sapien
actgcaacctccgcctcctgggttcaagagatcctcctgccttagcctcctaagtaactgggattacaggtgtgcaccaccacgcctggctaatttttgtatttttagtagagacggggttttgccatgttggctgggctggtctcaaactcctggcctcaagtgacccgcccgcctcagcctccaaaagttctggaattataggcgtgagccaccgctcctggcctcttagtgcttttgaatgaaataaaaacccgtaattattttaagaagtcttcttctatgtaaaaattagaactaggctgggcgtggtgactcacgcctgtaatcccagcactttgggaggccgaggtgggtggatcatctgaggtcaggagtttgagaccagactggtcaacatggcgaaaccccatctctactaaaaatacaaaaattaggcgggcatggtggtggcgtgtgcctgtagtcccagctactcgggaggctgagtcaggagaattgtttgtacctggaaggtggaggttgcagtgagccaagatcgccattgcactccagcctgggcaacaagagtgaaacttcgtctcaaaaaaaaaaaaaaaagaaagaaagaaagaaagaaaaaattagaactaaacaggtgttcttgtctgtccaacatagactggtagactcagagggagtattccaatgttcggaaactgaaaactttatttgaggtcaacagaaaagaagttgagatcaagtatcatgttttgtcctggagccaaatatgtagactttgctgttgagcctggcttgacactggacctttgattgatgttaactgtgactcaccctctcttgcctcctttcagtttccaaattctctctgcttgggtcaaaagtcattgcttgccagaagtttaatagtgtgtgcattgtgtgtatgtgtgtgcatgccaatatgtatgcaacccatacaatgcctggaacaccaatttagcttcatattttaacagaccatgattccaacatcatgtcaaagtcttatatgttaaaagttctgcatccacattagaaggtactatggatcactgtgtatcccatgccaaatggtacatgagctctctttctcctctgggtcctgatattttaaacaaagaaacagtgtgccattatgggcccttgattctgtgcaaagtcattgatcgttacccatccttgaggtttttttcttgaggcagagtcttgctctgttgcccaggctggagtgcaatggcgcgatctcagctcactgcaacctctgcctcccgtgttcaagcgattctcctccctcagcctcccaagtagctgggattacaggcacctgccaccatgcctggctaatttttgtatttttagtagtgacagggtttcaccatgttggccaggctggtctcgaactcctgactttgtgatctacctgccttggcttcccaaagtgctgggattacaggcgtgagccaccatacctggccccatccttgacttttaacatgtacagagcaaccaataacgagtccttcctcaaagtaaagtgaaatgaataataaatgtctaagactttgtggttaaacctaactccacactgaggtgggtcctgtccctgttgatctaaattttcctccactaggggtctaatttggagcttccctacagaggattgtgtgctgcatcctcagatccatggcgcaaggttttttccacgtgtgaaaagaagataacagatgggaaagagctatccagaattggtgtgggcgctggtaccaggcctggccatggagaggactcccccatatttaacctagggcatctattttctgcagccttgctgcttaaaatggggtctgggaaccaaggtaccatgaggatcagcatcaactgagagcagcttgttaagacgcgaagtctcagccccactccagacctgcagcactgtaatctgcagtaggcaggattccaaggcaactcttgttcacatcagaatttgagaagcaactgttctagaatacactagggagccatatgagatctcaggatcaagtgtagagtgacttgaggtttctccttggttgagagctcctcaaataagataggcctcccaggttaactaatttcagagcaatttttcagatttagaaaattggagtcaggcgcagtggctcacgcctgtaatcccagcactttgggaggccgaggcgggcagatcacctgaggtcaggagttcaagaccagcctggccaaaatggtgaagcgttttctctaccaaaaatacaaaaatt

SEQ ID NO: 30911 - DNA, 2300 bp, Homo sapien
catgtgggcctgtcccttctcattctctagctttcaacccaaggcagatagagaaggttactgggccgaggccacagcccatccctcagcttaggggagaccaggagagggagtggcattttcagtttaagtaatgaggtaagtttaagtaagcagaggtgtgcctagggaggaaggggaggcttcaaaacacaagcaagggagttcagctgctgtgtggccaaagatttagcagactccactccctgcatatgtgggggcagaagagttgtggagtacagctgtgccactacctgcccagttacctttaccaaggacaggaatatcttataccctctgtttcctctgctttaatattacagtatttaaatatgatgcttgctgtatacacaaggctttacaatttgcaaagcattcccttgcatgtgttttcatttgagccacagtacgattctttgtgatagataaagaaggaatgtagtgtgatctccattttacagatgggaagagaaagaggctgggagtgaccagcctaagagtgctgaaattccaagtcttcaggctcttcacaatgcaaccctgtaaccacagtcaagtagttaatgtgtgtgaaagtaagttaaacactataatgtgttatttccctgaaaaggtgttgcttattgccctagtaatgctttataaatacatatctaacttaattgattcagccaccaagatgttgaccccagaatcagtaaagtaatcccctttcccttttagtggcatcctaaaactgttactaggaacagttaataattaatgtcagtggtgaggtacatattaatgccacagaaacccagatggaaggagctgattaaaatagtttccttcttaagagtcttctgtagaaagtaattgagagaatctcacgtgtttcttttgagctctttggaggaaataaaatggctatcatttcaatgaacttcttaagttctacaaaatccttcatccagttccaggaggtaaacggtagctaaaggacaaggacaatgacaagaccagaattcaggtcttctgttctcaagatcagtgtttattttgaggatttgttgttgttgttgttgtttgagatagcgtctggctctttaacccaggctgtagtgcagtggcgtaatctcgtctcagtgcaacctgtgcctcctgggctcaagtgatcctcccacctcagcctcccaagtagctaggactacattgcacgccaccacgcctggctaatttttgtattttttgtagagacagggttttgccatgttgccaaggctggtctcgaacttctggactcctggactccagcctcccaaagtgctggtattacaggcacgagccactgcaactgcccttgagtttcttaaataatgagtctcttctgcttttttctctagaaagatatacaaattttgtttcctcttctctctcttctaataataggtcacaccctatgggttgcatttttttttttaaatcatctgtcatgaatcctcggtctctagttttctgttattgttatgacataaagtgaaagcctcaacacagttttaaattcgggtctcagatcaaatatggttggcaaatcctgcccaatgaaataagttgtcagctgaagcagtgacaaaagaatgagtgcttttttttttttttaactgttatgacatccctgctctgtaagtaaatgatggtaaatattactacaatgaaatctaaactggaattattttattcatgttcattttatttgacttttttgcagggagaagaatcctttctgtttaaatatataagtgttggtacctatttaaccatttatggagtctctaccatacaagaagtactgtggtaagcattttaaatatagtatctcaaatcctctttggtgttatgaacattttatagtgaatgaatagctataataataataatacttgctactttgtacaaggtagccagcaataatgctagctaagccgattcacatatgctatcttgtttgccctaacatcttccttatgaggtagctactattgacattctcattttccaaataagaaaaaagacggattggagacgggcatcgcgccgcccggcgtgcgccgcacgcctgcctcgcggcgcggagtctcgcgggccccgctcccgccctccgctcgcctggcccggaccggaagcggcgccgcacggcctcggcctggcgcgggggacgggcaccggggcccggtcggacatgggcaagaagcacaagaagcacaagtcggacaaacacc

SEQ ID NO: 30912 - DNA, 2300 bp, Homo sapien
tataaagctggtaacaatcagtaaacattagctttaaccaagtggttcttgaagtgtgatccctggaccagccacatcaggctcatttggcaacttgttggaattgcagattctcaggcccaccccagatctactgaatgagaaactccagggtagagcctagcaatttgtgttttagtaagccctccgggtgttttaatctatgaagtttggaaaactctgcctcagagtacatcagctctgcagatatatataaatatatatatatatataattatttttttagatcttcgggcctttgagacatcctaaactgtaaaggtttccactgttcttccatgtttattccaatgttgtaagattattttaccatcaaatatcaataatatctgaaacctaaagaaactatataaagttatatagattgtattttcaacagttatccaaactattatttattattagtttaatattctttggagtcataagggcattttgatctaaaggccagttagtgcttaattgccttgttggtcattaatggtgttgtacactggaacttttataagtcatggctcatagattcctcactttactcaatagcagtgatacaggggaaacaaccaaccatccatcaccttccaatcactgaagtcagaagggcccatttcttcactggttgcatatcacaccctgacccatattcattgccacagcggtatcggagggtggtgacatgaggggcgatgaggcttcaggagccggtgctaacagtgatacaggattaggggacgtggcagctcttctgagaggcaagaaggtggtgagaagtgtgatgaccttgcttctaaatctcaattctgccaccactgactctatgagacccttttgattttcatttttgtaacatgaaagacctgggtttggcctgtgggttttaacttctttggagccatggtccccttcagaatgtctggaagctgggactactctccccgaatatgtacatgtgcatatatacccccagtccacagccctggaatagatggtctttatgagccattccagccctgacctaattgaaagttctcatgcttctgtgaaacattatggaaaggaaaagttcattacttacattctggaaataaatgttgccatcatccttcatgaccctgtgggtgcataagtctcatgctgtaaaaagcatctttaatctagtttaatctaattaatctagttaatgaagcaactctgatttgtaatgctggtcttaaggtagggaagtgggcaattcattcccggtcttcaggtaggaaaaaaggcaaagagttcacacttttttttacaaagtagaaataacagttttacattttctttaagtttgcattttttattttcaacagggttaggaagcagccaatcataactcaagctattgggtagtaattatccttcatccgctaatttctaggcaggaaaaatatgattaaaatgagtttccgcacagctgttgattaggcataatgggaaagtcatcatcataaaactaataatcagagcagagctaacatttggaaagttattgttgagtaaccggaaggctctaaaagccaaaaacaatgtccaactaactagaaaattaccaccacccccacatactttcctgtctacacttcaacatcaattaaacacagcaaactaaaaccagttaattacatcaattttaaggtcaactttcaacaactcaaacctctgtgataaacaaaccacaatatcgaaagcttttttgaaaagtcaataaataaacagccatcattctaggaaaagctgcaacacagttaacaacacatcaataaattctaaacaagctttgtgctttgattagctcaaacctcctgttgcctccccatgccccaaatatgcattcccattccaatcaggccagtgtgcctgtggcccagggatgctgcagttggacagctgttggaggtcaccgctgagcagctctttgcaattgcaaagctcccactggaaaacagagattaatgagctcacaaatggaacagcacataatttcagatcttggtgatgataacaaggagctctttaggatcctccttgcttgataacagaatcactttctttcttacgtttgtcatccagaagtctaaagtcagtagcagtaatggaaagttgggctaatgtggagatattccaaacagagcaagagcaaatgggattcttggcttgtctctcatcgtgatcctgattgaagaccactggacacatctgtcaagact

SEQ ID NO: 30913 - DNA, 2300 bp, Homo sapien
ggtgtggtggcatgtccctgtagtcccagctacttgggaggctgaggcaggaggattgcttgaatgtgggaggtcgagactgcagttgccctgatcacatcattgaactccaacctgcgtgacagtgagaccctgtctcaaaaataaataaataaataaataaaataaataagtaaacaagcatgaaggcagtatcagtaatggaatctgctatatgaaggagaaagcaagatttggattcagttgacatttttggaatacataacatattcattcagtgttattgtacaaatgtccggcttgaaatagttcagcagcaagtcattttccatctggagtccaggcaactgaggaaattcataaggtttgaggctatatagtggatgtcttaggtgctaggtgcttacattagtataaattacaaatgaaacaagcaaatgaggtattgtacattggctataaaaggaagataggaatccctgagaagatgacaaaggagtcattagaaagaggcaaaatatatttcttacagaaaaaaacttaagtgcttttaaacttataattaatatcttattcttttttctcacagtggaaagctcatgatggcattattttaaaagtagattggaactcggtcaatgatcttattttatctgctggtgaagactgtaaatataaggtatataatgtttagatttatcacttggctgaaataatcaaatttataagtacttagcatataagaatattcttttagttttttactttagccatgtctttttactccagtaatttagcaaattattttataatgttaagtggtattttaaagcatggacttcataaaaactatctcattagcctggacaacacagtgaggccctacctctacaaaaaaaaattagccagttgtgatggagcacatctgtggtcccagctacttgggaggctgaggtgagtggatcacttgagcacaggtggttgaggctgcagtgagccataattgtgccactgcattccagcctgagcaacaaagtgagaccctctctcagaaaaagaaagactatctcattgatctatagagtttgatatttaataagtaacaatatcagtatagcccctaattttaccgtgactcaatttgagttcagttcagtatgtttttaaaaattaaccctgctggtttactaaatattgatcaatttcaggtcaaaataatttgtagagaggaataaggtttaatgtattaataactagagttagaggcaattaaattgaaataaatacttttagagaaagtaggtagagcccttacagggagaaaaaatttaagcaaaatggtaagcaagctaggtatggtagctcatacctataaccccagtgctttgagaggccaaggcagtagggttacttgagaccaggagttggagaatagcctaggcaatataacaagaccccatctctacaaaaatttaaaaattagccaagtatggcagcatgtacctgtagtccttgcttatttggaaggctaaagcaggaagatctcttgagcccaggagatcaagactgcagtgagctatgatcatgctactgtactccagcctgggccacagagtgagaccctgtctctaaaattcaaaaaacaaaacaaagctaagaactaaacatttcaaaatgtactattatatttaaaaggacttaaaatgggtagattttatgttcagagatttagtaaaatctgaaaattatgacagtgttataaaatagtttctttttgagacatttaggcttaaaggaatacagctttgttttccccttgtgtgatagtaaagacgtttaattgctaatatataaggtgctgatttctaaatttttatttactaccttactggaagacaaacttgtttttatgtggtgtctgttataaaacatttttattttatttatttatttttcttttagtttttgcaaacttctccctgatattataaaagatttttaaaaattgcttttgtaggtatgggatagttacggccgcccactgtacaattcacaacctcatgagcatcccattacttcagttgcctgggctccagatggagaattatttgctgttggatcgtttcatactttacgcttgtgtgataaaactggggtaagttatagtggtgagcaatcacagatgtgctgtcataaatgtggtaatgcacaacacacatggttctcagtctttaaaaaacattttcaatggatgcatctggttgaatctttctgatttgtcttcttaatatgctggttca

SEQ ID NO: 30914 - DNA, 2300 bp, Homo sapien
atgatgagacaggtattatatgctagtttcataaataaatactctcaagattgacaaactgaggaaactgtcaagcatatacctaaaaaatgatggaacttgggattctgttttctatattacatctttccactacattgtgctctgttgccccaaatacaccactcaatttggtctatacttttttttttttttttttttttgagacgcagtttcgctcttgttgcccaggctgtagtgcaacggcactatctcggctcaccgcaacctccgcctcccgggttcaagagattctcctgtctcagcctccctagtagctgggattacaggcatgcgccaccatgccctgctaattttttatttttagtagagacggggtttgtccatgttggtcaggctggtctcgaactcccaacctcaggtgatccgcatagttgatacctccccaactcaggttttgtagtgttttacaacctttggaaatgcaaaaattccagaagccctcaaagataatccttatatcttcttggtatgcttaccagccaaaaaactttttttcattaaggtttattttctgtagcttgttttatgaaaacaacaattcgtttttaacttcaaacataaagatatatcacgatattgagtctacgcttatgcaatacacaccagtctcccaacctcaccaaattcttacaattggttgggaggggggtggctctccacacctttttgagaatcactgaacctgacttcatgctcttccagggaagaaccataatgtatttagagtgatcatgtaaattcattcaaaagggagatttaatggtgatttaacatgccagaccctaagtaagcaaaagttaaagaaaaaaaaaggaggctagtagttctcaatgtcaagtacttaagagttgttgcatgaatactggagatagtcaaatgagccagtggctctttaacaatatagggaattaggagcaagtatgagattctgattataaagttgtaggaaaactaacttcccagaaaaatgcacatagaattatgtatacaatgtcaggcgagttatgaactctgaagcccaatcacctaccaccagatccacagacctcaggttaaaaacccactaaaactaagttctcggggaacaggaatcgccaaacttgcttactaattctaattatgccttacccagggcaatgtatacaaacactacttagggaatatttgctgatcgataatttcctcataaaaataaccataacactggcgagtcgttttttccactaaagagccttttagtcaaattattttaaaagtcctaaacctttcactagtaacaccaatgatctcgaaaatcattattgcgctattcacatgtcgactaagctatcacgaatccaggtcttccagttgtctctctactcccttaaaatttagggcttcctccttcgcatcccaaaagctacacccggagccccgctgccgccagggagacagaaaatgatgctccacgaagcacacagcttcaaaacaggaaagatgggatccagtgatggctacaacttccaaacccttttctcaccaggtccagaggtgaagggatttacctcaagttccaggaaagcggtggcgattgctctcaaatacctggtacctccccgtcaccatagtgacttctaagagttacgctcccttcctcttcccgcgatacttctacgcggcacgtcatccgagtgggcccgagaccccgcctctcggcgagcccgccctcttctgaagaggcgtttctggaccactgagccccgcctcccactgtgagcggaaccctaccgtttttaaaaaaatctttttcaaaacttgccaggttgtctttccaaatatttttaataatagtgctgctgctgtagaccacagagaaaagaatccctcgctcttccttttcacttagtagaaacttctaccgcgtaggtcccgccaggagttcgcgcatgcgcaggagcgacaataagatggcggtgataatcgccgcactttttttcaaattagtggatcccagaaatcattgcgcgcatttgtaacgaatttccgttcgagtttgtattttaggcgccattttcgagtgaaggacccggagccgaaacaccggtaggagcggggaggtgggtactacacaaccgtctccagccttggtctgagtggactgtcctgcaggtaaagtacttctcttcctggtcaggttgtcacgctcttacttcctgccttgtccgcgagcgcctggaaaatagaggccttgagcc

SEQ ID NO: 30915 - DNA, 2300 bp, Homo sapien
tactggagatagtcaaatgagccagtggctctttaacaatatagggaattaggagcaagtatgagattctgattataaagttgtaggaaaactaacttcccagaaaaatgcacatagaattatgtatacaatgtcaggcgagttatgaactctgaagcccaatcacctaccaccagatccacagacctcaggttaaaaacccactaaaactaagttctcggggaacaggaatcgccaaacttgcttactaattctaattatgccttacccagggcaatgtatacaaacactacttagggaatatttgctgatcgataatttcctcataaaaataaccataacactggcgagtcgttttttccactaaagagccttttagtcaaattattttaaaagtcctaaacctttcactagtaacaccaatgatctcgaaaatcattattgcgctattcacatgtcgactaagctatcacgaatccaggtcttccagttgtctctctactcccttaaaatttagggcttcctccttcgcatcccaaaagctacacccggagccccgctgccgccagggagacagaaaatgatgctccacgaagcacacagcttcaaaacaggaaagatgggatccagtgatggctacaacttccaaacccttttctcaccaggtccagaggtgaagggatttacctcaagttccaggaaagcggtggcgattgctctcaaatacctggtacctccccgtcaccatagtgacttctaagagttacgctcccttcctcttcccgcgatacttctacgcggcacgtcatccgagtgggcccgagaccccgcctctcggcgagcccgccctcttctgaagaggcgtttctggaccactgagccccgcctcccactgtgagcggaaccctaccgtttttaaaaaaatctttttcaaaacttgccaggttgtctttccaaatatttttaataatagtgctgctgctgtagaccacagagaaaagaatccctcgctcttccttttcacttagtagaaacttctaccgcgtaggtcccgccaggagttcgcgcatgcgcaggagcgacaataagatggcggtgataatcgccgcactttttttcaaattagtggatcccagaaatcattgcgcgcatttgtaacgaatttccgttcgagtttgtattttaggcgccattttcgagtgaaggacccggagccgaaacaccggtaggagcggggaggtgggtactacacaaccgtctccagccttggtctgagtggactgtcctgcaggtaaagtacttctcttcctggtcaggttgtcacgctcttacttcctgccttgtccgcgagcgcctggaaaatagaggccttgagcccgagcggcgaagtccgggcttgaagctgccgctgggagatttctcttgctgtcacccctcccccctcggccgctccccggcggcccgggctcccgcgcgcagctcccgggcgccacttttccaagctactcaaatgtctcggggaggccctgagcctcgcagatcttttctttaaaaaatcctagtctctatctggaaaagggcgtctccccctacccctcttccttctgccaacggactagtcaccgggtctcagccttcgctggtgacctttcatggtttactgtccaacgggactccgcctggggagctggagagacaaactcttgccactccaaaattagcaagcgctgccagcgtccgacttgaagttgctagtggttagtcccagccttcgcccttcgcggtccgaccgctgagaggagggagacttcgttatgccccgggccgtcaacggcgccaggagctaaagggcgggcagacgaaagcgggcggcgagtcgccagttagtcttcaccgctctggagagagttgctagccacgggatcctgacccggacacgaactcgtttctccacgtcggtgcgcgcttgcatccctggccccgaaagcgtgggaatgtccggaaatgctggcgtatgggagttccttaattagaaatgcgttagcgaatattatacgcttatactatgggcggacgggtggagagccttaaaaacaacaacaacaaactaagcagttgctcaatcgttgattgatcctcaggcacgtctagattttcccacttacataggtcttgttaagaaaccagtcctgccttcttgccactcgtgtctttcgatggctcccttcccgaagtcccgctgcctctaagcggagtgttaagcggggctctcggaagccggtggaccgagatttccccgg

SEQ ID NO: 30916 - DNA, 2300 bp, Homo sapien
cactacatcatagagcaaatctgggaaaaccgtaacaagctatttcctgctgcctatcctaaacaggaggttaaatcctaaggctctagatgcaattctccgtaccgctgagcacctggaaccttcattttggaaactcatgaacttcagcgacactgccacgagggtttaataatgtcacccaactcctggactcacaaaagctacagtggcttcaaataaattatcgtcttctctttaacggcaatctaacaccacggaggtgaggttagggtcaaaaaacttttcatcatgctcacatagtcatattgattgtctctgggaaaaaagtccacttgctctcttgattgaccgtctcgattttagcgggaatacaataaagatattgaatttttgtttgtgacctgtaccattccacaggtcacaaacaaaaattcacaactgaacccgtttgctcgcccccatcccttccagcgccgttacaccaaaattgcacgggaatcctatctcaaagttgccaaatggctttcctgagcctctaccggaccgacaccggaccttcagatgtcaactccgcgctcaacaaccccagccagcctcgggctgggcgcgtttgcctgccagtcccacagcgcgcgttcccgccgagtcgcggcgggtcactcacctgcggcggtggctgggctctccgtgcggccggacggcggctcaggctccgcgtcgctgctggcgccgtcaggggacggcggcggcggcccttcctctctgcgccgggcagtggagggctgggtgcctttacggggcatggtcgctggggccgggggacagccgggagcaagtcagcccgcgggccgctacaccgcgcccgccccacccggggaaatctcggtccaccggcttccgagagccccgcttaacactccgcttagaggcagcgggacttcgggaagggagccatcgaaagacacgagtggcaagaaggcaggactggtttcttaacaagacctatgtaagtgggaaaatctagacgtgcctgaggatcaatcaacgattgagcaactgcttagtttgttgttgttgtttttaaggctctccacccgtccgcccatagtataagcgtataatattcgctaacgcatttctaattaaggaactcccatacgccagcatttccggacattcccacgctttcggggccagggatgcaagcgcgcaccgacgtggagaaacgagttcgtgtccgggtcaggatcccgtggctagcaactctctccagagcggtgaagactaactggcgactcgccgcccgctttcgtctgcccgccctttagctcctggcgccgttgacggcccggggcataacgaagtctccctcctctcagcggtcggaccgcgaagggcgaaggctgggactaaccactagcaacttcaagtcggacgctggcagcgcttgctaattttggagtggcaagagtttgtctctccagctccccaggcggagtcccgttggacagtaaaccatgaaaggtcaccagcgaaggctgagacccggtgactagtccgttggcagaaggaagaggggtagggggagacgcccttttccagatagagactaggattttttaaagaaaagatctgcgaggctcagggcctccccgagacatttgagtagcttggaaaagtggcgcccgggagctgcgcgcgggagcccgggccgccggggagcggccgaggggggaggggtgacagcaagagaaatctcccagcggcagcttcaagcccggacttcgccgctcgggctcaaggcctctattttccaggcgctcgcggacaaggcaggaagtaagagcgtgacaacctgaccaggaagagaagtactttacctgcaggacagtccactcagaccaaggctggagacggttgtgtagtacccacctccccgctcctaccggtgtttcggctccgggtccttcactcgaaaatggcgcctaaaatacaaactcgaacggaaattcgttacaaatgcgcgcaatgatttctgggatccactaatttgaaaaaaagtgcggcgattatcaccgccatcttattgtcgctcctgcgcatgcgcgaactcctggcgggacctacgcggtagaagtttctactaagtgaaaaggaagagcgagggattcttttctctgtggtctacagcagcagcactattattaaaaatatttggaaagacaacctggcaagttttgaaaaagatttttttaaaaacggtagggttccgctcacagtgggaggcggggctcagt

SEQ ID NO: 30917 - DNA, 2300 bp, Homo sapien
gaagttgaacaaattgctatgatgaaaccaaaaggccagactgaacacgatgagggtatgcttgaatatttagaagatataattggttgtggacggctaaatgaacctattaaagtcttgtgtcggagagttgaaatattaaatgaacacagaggagagaaggtgaatcatctgtagactttcattgtaaatcagaatgtttcatttatgatctaacaaattttagtaagtcagatattcatgttataatacttaatgaagaagtgttatattgaaatttatatcttaacatttaagatgaacattctccttattaactgtttttatctaatgtttgcatattttaagttcatattgtacatatgaagtgtgtattcagtctttaaacttttaatttctgtagttaaacagggtaaagatggtggaaaaggaaaaggatgccttagaaggagagaaaaacatagctatcgaatttcttaccttggaaaatgaaatatttagaaaaaagaatcatgtttgtcaatattatatgtaagtgccttgattgatattaccaatttttatattagtttttaaccattaagtcaaagcccttctcttttcctagagaaacatgaagactgaagtgaaaaaaaatctctaaatattgttttgtgtgactgaatgtgttagctcatgcctgtaattccagcactttgggaggctaaggcaggaggatcacttgaggctgggagttcaagaccagcctgggcaacatagcaagaccccatctctacaaaaaaaggaattatgtggtgaacttatccaatgtgaggactatctggctgtgacacctgtcatcccgttgatcaccagggttgaatttattaaattaggcatattaattcattgaagttgactttttagtatcctgctttaagttgggaggtaggttcacaggtatttattactgtactcagtccttttacgtgtgcactttttaaaattcgtgtaatagcagatctgatttttttcagcttatgatgaactgttttttgagatgggctgtttcacccagggtggagtgcagtgtgtgatcacggctcactgcaatctcaaccttccggactcagttgatcctcccacctccacttcatgagtagctgggactacagggcacacaccaacacacctggctaattattattattattattgttgctgggatttttttgtttttattttttcttttttctttttttggtagagatggggtttcgccatgttgcccaagctggtctcaaacttctgagttcaggcagtctgcctgcctcagcctcctaaagtgctgggattacaggcgtcggccaccacattggtacaatgaaatcgatttttgttcctaaattctagccttgacccagggggattttcccctcatagcctaggcagtcatatattgactagttaataatattttagaaacagttagttttactaaaattgttatacagttttggaaatggcattttaggagcttcaatttctttttttttttttcctccctatagttatgagttgcagaaacgaattgctgaaatggaaactcaaaaggaaaaaattcatgaagataccaaagaaattaatgagaagagcaatatactatcaaatgaaatgaaagctaagaataaagatgtaaaagatacagaaaagtaataatattttgggaagtactaaaagtatttagataattgtattacatgtgtatttatatataaagttacttctagcacattgtgagtgtaagacatttgccagcatatcaagtggtggcccccttagtgaaaaaaaaaaacttgccttgcatccagttccttgttacagatgaaattccctactctgaagtcttagaaccgtggggatgctaccccctagtggcgtagcacagtaacaaacaataagcatttggcttcacagtttaatcttttagtagtccacaaatctgatagagggataggatttgggtttttctagatagatttttaagggttttatcatgtccctacttgatgccatttttcaatgacactagtatctctaattatttttaaataaaaaaatttgtatagtaagtttattgtatagtaacttgtaagtatattcgtaaaaggtaaaaccaaaattttactcctatggtaaaatttttatatacctagacattgtagtcactggaaaatgtgttattttccctccaacttagaaaggcaaaatagctgtcataatcaaaaatacaggtgcttcttcaactatggggagaggga

SEQ ID NO: 30918 - DNA, 2300 bp, Homo sapien
tccggctaattattttattttttgtagagctgggttctcactttgtggcccagactgctctcaaattcccgggctcaagcagttcttccactttggcctcccaaagtgctggaattacacacatgagccaccacgcctgtcccacatgttgttttgacaggaagttacaaagatgtctatcaggatgactccaatgtttaatagaaaatgtacataaagtcaaaacgaatatttaccaccatgaaacagtagctaccactacaattcacacttcataagcaaccttttaaggagctgaattggtgaagctatctgagattgactaaggcctaatattgccttactttctgctttatatctttaatattttctgtaatttactgaataaaagcctaggacctggatgtactgcaatgtgcagtatatagagctcatagcttttttttttttctggaatgcagtggtgccattttggctcactgcaacctccgcctcccgggttcaagcgattctcctgccccagcctcccaactagctggaatgacaggtgcctgccaccatgcccggctaatttttgtatttttagtagagacggggtttcaccatgttggccaggctggtctcgaactcctgacctcaggtgatccacctgccttggcctccagaaagtgctgggattacaggcctgggccactgcacctggcctagagcccatatctttatttagcacattagtaaacaaaatgactttatagttattggaagttaaataattcaaacttaaagctgttggaactttattccgagccttgggaggaatgtggctacagcctgagtcaagcagcaggcatctgcaacgtctgccttttgtttctataaataattaaaataggaggaccaaaccataccagagatacaaccccctgagatcactaccccccctcatggagtaacaaaatactttttcttggaatgtagtaatctgtaacctaccaaatagctgtaagtatgcactggtctcttaggggaaatgaaatcctgttaaaatttgtctctggccacctaggcgaaaccctaacttcttcactttggaatgctaaccccatttggagctggtgtctcctgggtggctaccctcaagccttacgctggaataaactctatccttaatcatatttccagaacctcactatttaaggttgacaggagagggaagcggtgatgtcttgagataaagctgaataaagtttctcaagaaaaaaagggaaaggaacctctaagctgtacgttgttttctaactctagggagttagaggtgaagtaggaacttgaagttggaagtgttgagttggacagccctcatctctaggcaatactttcataaagtggaaaaacgggggaagaggacgaaggctagggagagacgcagggatctacccaacccagtcctgagtttcccactcgctcttggagttgagtacaaagagcgctccaaagccccttctcctgtgctcagcccagtgctccggtgggtcaggtctccggaatgcgtaaacaaaagcaaacagctgagcggcggagggcgcaggcgacagatgtgggtgttccctgagaatgtgtggcgacttcccggagcagcgggtctgtgaggcaacgatggaagacactgcgctccacagcatagcaggaggccccgccccgtgtggcgccaagtaaaagataattcctcagaagccgtcggccaccggcgcttcgcctcgtcccgcgccaggcccagcctctcccccagaccaccggtgccatgcggattccccaggcgggaccccagctcacgaggcccactggccgaagctccccacaggatagagagccgctcctgcgaggccaagcttccgagaggcggcctgcgcctagcacgcaggcgcggaaagctgggcgccagccttaaactgactcccgccacctgcctcgggccgcgccgtccaccgtttactttcgaacgagcccagcaatagttcccattggccgatgccttgcagttgaatgttgcctgcagactgcgcctgcgctgcgaggctccgcgaggccccgcccggtctgggcacctgaagcccttcggggcagaggagggcggggactcggggcggctctcagcatccgcctggagctcgtggcgctgtgtttccgtgctgtggagttgcctggtccgcttcctccccgcggtgagtctaaggacctttacggatgcggagaaggtggttctgagtcctttttcttttcctgtagcacagtctggtgtg

SEQ ID NO: 30919 - DNA, 2300 bp, Homo sapien
tggaaggtgaacacagcaatgctttacataatttgtgttttttagtaaaaaatattggattcaaagtaagccaatgagcttgtatacaaattttatatacaaattattgtatagaacagtgatatggaaaataggtaagggtgatattaatatctctgggtataaggactaccttatcgtttaaatattttatttccatctatagcctaatatagaacattgattttctagtagaaattctgggaagggcttttctgtctctgaaattgattcagtacagttgacagttcatcacggttacctggttaaacactttttttttttttttaattctccagtgatctaggaaattgtttcatttttaacacaggcttatttctgatggggatgggggcatagaataatatgcctaataagctaaacgttcttaacgtttcatgtcttaaactgtctttttgaacattgagaccacctcaagtgctgtaaaaataagaatgttatattaggggtgtgtgagacgccctagtctaaaatctatctttaaatatatttcctttgtaattttcaaagacttcagtaattgtgtgttatggtggaaataatactttccattggtccacattgctctggaccaaacctggagcatttctataattagagctatctatgaatcattaaaaatggatctagaataattttggggagagggagtgtatcatttagtttaggcttacctcagcagcacttcatagggtgaggagttgtttgtttctttaaaggtataactgcattgtaaaatgactgggtttattgtaacagtaatttatgggggcaccctttttggattctccattgcctcagtttcctcaaggaaaaagttacagagattaagctaaattttgaatttagagaataactgctgtgtaattttggtataattaccataaatttagtgtcttaaaacacaacatacattatttcacaatttctgtaggtcaagagtgtagttaggttttctgctcagggtctcacaaggctgcaataaaggtgtcagccagagctgcagtcttatctgaagctagggggtcctcttttatgcacatatggcaaaatccattgcctagcaactgaagaaatcatgggaacttcttcaaggccagcaagagaatctctgatctcagggaaggccttaagcgcttttttaaaggtctcacctgattagatcaggccacctacccaccagggtgatctcccttttgattaacccaaagccaaactgatgaggtaccttcattacccctgcaaaatcccttcacctttgccctgcattgtagtccaatcacaggggtgatacgcatcatattcaaagatcctgttcacagtcaagggagggggttatatggagtatgtataccagggaatcttgggagccatcttaagagttcttcctatgacaaggactcaactatttagaactggaacaatttacaagtgatagccttatatagttatcatagcaagcttatttggggatcaaggttgcctctgagaacctaatgaaaactggaccagcttccccaaaaagtgtatatacatggtagtttttcatacagttttaggggattcataagagtccatgaattacagtctgtcccaacccttccctttagatgatgagttgttgaggtgacttgcccaaggtcacacagctactaagggccaaataaagcccacatctcaactcccatactgcccagggcttctaattactattctaaaggtaatctaaattcatttaaatttgtgaaccaatgcaaaaaaatgtgaatgtagctttttggatattttttttgtttactaaggaatgggtaacattgttatagaagcttgcctaagagttttgaaattagttgacctttttgagtttccaaaattgaatcttccattgtagctattaaagtgaactataaataggccaactttaattgttaactcctcgggtttggtggattatctaccatttatatataaaatttcagttagaatccaccattggcgttttgaaggccaagatagctgagtatcttatcctttttgtaacttcttgattattttacttattggcaaaattcattaactgtcagccaataatttaatattatgggaggaaaaaattttgcccagatatctgaggcaatactcccaaacactaacaaactgatgcctaacaaacttgacattttgaacacttaaagttttccctaaactttttaataagcacattaataaagtatgctttt

SEQ ID NO: 30920 - DNA, 2300 bp, Homo sapien
tttctggttttcctgacttctgctttaggggcatatgttcttgcatttgacaaatagtccctgagtacttatgtgccaagtactattaggtgctgagtatacagtagtgaacaaaacaactatggttcttgacttcagagagcttactgtctagggaggaagacagattttagataaataaaattataaattgcggttatttcctatttgtattgcatctttctcagctggtaactaattacaactcttttttaggagtcttctgcagagagaaaactcgggttgttgtttaatcatcagagacactcagttgtagctggagacatgaagacatataacagacacgtctataaacttcatcatgaaagctaccatgaaatgtattccaagaagtacaaaatgttcatctattgatatgttgacaagataacttttactcatagggtgggaattcgctggtaatttgttttcttgaacactgcttatgataaaatccatgatggcgcaaaatacatacatactccagcttttcaagtgaattttcttatcctaaactcattttgaaaaacaccagtgctctggtatgcaaatacaatgttacttcagttaaatgagtctttgaagaataacagtttataatgaacatcatcatttgtatttaagatctgttctaaatttatattcaagttaaccttcagtgtgagttatttccaggcacagcttctgttgtccatagcccagttgatggtatataaagtactgacgactttaaaggtactactctgcttcctaagtttttaccttcctttcccccactacaatatcctctccaaagtgatccctaaagtactccggctcttttcattgcctctcccccaaaggaaactcagttgttcatatctgttaaacccactaacttcttccattttaacttaaaaaaaaattcccctctgttgcctttaaaagtgtttccttaggaagatctgcattttaaacacttatctgcacgttgttctactaaaaaaatatactagaaaggaccgagagtcaacgattctgaaggagtttgtatcagggtctcttctccctacctcgtcaagtttaaacacacccaacgcctcgattccttgcttccgacccgagttgctgctttacatatccctgtacatttgaggtgttattcgttgatatttcaatatattttaaaataattttccatttctgttttgttaaatttttgaatacgttcttttgtatctcgtgtcatttctgcctctggtaacgttgtccttggtatccttggaactcatttcctttctcaacacacaatattccctgtcagctgccacgggccccgccctccagaagttcatactttgtggtcaagcagcttctttaactttttaagacgaattacctaggaagtgctattgtcccaggatcaccagctctgcctaaattcctaactgttgcgggtgcttagtcacagaagatgaatcagattcgtctaatgggccctttccttttccacccacctttcctgtcgctttccgctgagcctcctcaactcacgtcatcccagcaggtcctggcccccagacccggccctggacggcacggagccccagcccgggaacgcagctgcgagcgtccgaccgggagacagcgaagctcagatctctctgcaaagcgaacggagagcgcaaggaatgcccaggaagacagggcgcgcccggggagaaaagaacgttactttaacgcagcctcgaccctgaacccccggcatctagggcttcctggacgagtggagcaaaacaactcgccctgctgcgttcccgggcctctccttccccttgctggtttccccttaagtctacttctctattgcttccaacccctctctccgaaggcacgtggtccttccccgcctgcccccgccgcacccctccgggcccggagccggctcctcccagcgtcgttcgcttcccctttccgttcgctctttccgccccggctctccatcgccccttctgattggtcgaacgcaccggagcctggttagccaatgggcgagccgggctggaggcgatgggcgtggccgcagcgccggggccctcagatcgaggctgcctccccctctcagccggcagcacattccgtcgccttgccgccgcccggccccacagttgtctttgccggagctgcagtcgcgctggggttagggcgggggggcgggcggggagaggagaaggccgcggcggaggcaggtgagaggaggaaggaagcggcggcgcggcggg

SEQ ID NO: 30921 - DNA, 2300 bp, Homo sapien
ttattttgtgtaaaaactctaaataaatttttagttttaataagaaaacatgtatatcacatggtatagctcttttaaaaatcatgttggtaagcgttgagggaagtctttcaatctggcaagttcattctttagctttgggaagtggtcccatattatttcttgataatttcctcttgtgcatattttttttctctctggaataagtcctataaatcagacttctgagttaagatttctgagttcatcctctatatgtcttatcttttcttctgtattttctatcttcgactttctgaaagactccttcaatattgtcttccagcctacaggtattactgatctttaaaattttttgaaatttgtgtttttaatttttaggagttttgtttttattctctgagtggtctgtttaataccatccatttcttgtcttatggatgtaatatcttctcaagtctgtataaaaatagtaattagaatttaatgaaaatgttcttctgttcccttcattagctctgtttaagctttcttaaaagttcttatttttatcttggtctctctcttattcatattgaaggcatgctatccattaagtatagaaacttctgtgcactgcaaagctgattgggaattctatgtatgtgagcaagtttgccaactgccaggttggctataggttaattacatgttgactttggcattatggtcagaaactcccaactgtcaaaacatggagatcttttttctgagatcattcaatttctttaataaaaaactcttcagtattttgcctgggaataaacatctagttgctgaagacacccagcagaggggtgtgtgtgtgtgtgtgtgtgtgtgtgtgttctgtttattttggcttcttgttaccttctgctgtttttagtcctttatttcaccccttctgtctgccatacctgtcacctcttgtctatctcctctgcatcagcactccaagccttggctttatcctgctatatcagttatcactcatttttccatctagtttccattttccagaattttgttaaaatttctgaccctttgatgaattatcttgctgttttgttatggatttatatgttttttttgtttttttttttttgagacggagtgtctcactgtcaccaggctggagtgcagtggtgcgatctcggctcactgcaacctccgactccctggttcaagcgattctcctgtctcagcctcccaagtagctgagattataggcacgggccaccacgcccagctaatttttttgtatttttagtagagatggggttttaccatgttgaccaggctggtcttgatctcctggcctcatgatccacccacctcggcctcccaaagtgttgggattacaggcgtgagccaccatgcctggcctatatgttcttttaatgcctttaccattattctgtggagtcttgggaaggagaggaaataaatgcatgtttttatttgccatctttaattggactgcttaatgtaaaactgttcgtgttataaattccccctcatatatttggttttgtgactgcagtagtgtaaattctctgcctagaattttaaagaaagtgattctgtatgtgattagggagtaaggttcagataaccttgagtggtttaaagtttcctactgagtaatctgaacaaggcggatttaagatactgcagacagagtgtgagaataactctctcttcacaacttaagaagcctggttccttatttacaactgggataagataaatggttgaatacctagagaagttccacaaaaagttacacaaaaagtttagttaaatttaagttaaaagttagttaaaatgaaaagttaagtttttattctgctactaaaccatgctcctctgcgtgtctgaaccttcaggttcctctagatttctagcacctgaaagaaaacaaaactgcagcatcagccaggtaggcctctcctaatcttactcattcacagagaatttcccctttgagtcaccatggcattggctggttactcataccacagatccctcaggattggctgggactgcaaataaaatactgtttgcccataatcaagttgataagctacaacataaacacatctaggttcttgttcttagaatacagcatgaagaatttgctttcttctttcttcctaacattttcatgtgagatccagaaaggacacattgtctctggccattcgaagaaagaaagaaagaaaaaaaaaaaaggtatttagagacagagagagaaaaaggctgaaatgggttcgctg

SEQ ID NO: 30922 - DNA, 2300 bp, Homo sapien
tatactattgagattatattgtatgtgccatttaaatgcttacgttttcattttttctgcttatggtggaaatatatggcctttgtagaaactttagaaaagttgtggaaaatagacaaaagtctaaagcagaaaatgaaagctgcatataatctactactgtacgcatgattaaccactgggaacattttagtgtatttccttccaggacttcttattattttgtatttttagaaaaggaatggggatcacaccaaggcagaagtgcttgctgggggacagacactggcttggctgggatcaagtagcctctttctgctctccagcccagcggactggaagcagcagatcagcactcttcttcctggacaggggtaatgagaatgagtattttcctttaaagctcacttgtttccgtattctaagcggacgcgaacattgttcttttctcgtgctttcccactttcaagacccaccaacacctgcctgcccacatttcgagttatcttcgtcggctcctgcaagcccgcactcttctccgcggtggctactctccgctcatccagactcccgccctcactgcgccttcttcctgcgatgaccgaggaggtggtgggagaccaccacttgcgagcttccaaaggactttcaaacctgaaccgcagagtcagagccctcgcgccgtagaaaagtcaggagcgccccggggcccccatcggaagcttcgtgccttcccgtggaaaggtcgcgagcagggaaggccttcgtggccactgagtcccctactccaggggcggcggccgctctccgaaagagcggcccttctcgtccctcccgaggttatcgtcagagtgcacttccttggggaaacagaggtcattctgtcgagtcccccctttctgctgttctcgggagggagaaggctgctggacccaggctcgctccccgcctctcgggagatccgggaaggcctctattgctgaacgccgagacagcggccagcggcccgatcgtctccctaccgctttgcaagccgggagaagtgcgtcccttctcgcttgccttatggctggcgaagcggggaccgcactatagtgcagccgccgaaggggggaacgctcacgtatggctctcggcttcccagtgagcagcaatagttcctggaaaaccaacgctaagactaccggggtcagtattagcttgtcttaggagccggcacagggggaaggaacaacgattcgcaagagctaggcagcggacctccctcttttctcccccttggctgtcctggaccgcatggggctgcgagcccgcaccggcggccgcggaacttgctcagcctctgacagctgggtgggaacacctcggggtgtcgagtcccgactcaaggggcgggacggggcggggcgagcgcgcggggggcggagcgcgcgcgagccgggacgcgaggagggagcgcgcgagtgaagccgagctgagccgagccgatccgagccgggaggtgcctgggagaggcaggcagagcccagccggccgcctgcggctcagtaccgaccgtgccgcgtcgccgggctctgcgtacccctgtctctgcccaggctcccgcaaaacttttattctctggggcccccggggtgtgtgaaggaattggaaccttccgccatctccgcgctccccttcggcggcgaccgaggggacctgcgtccctcgtccgccgggctctggagccctgcgcctcacctgctgatcgctctccggagtctcgagggggcacccccggagggaccgcgcgggcgccggcgcccctgaactctcccgctcaccgcggcagacccgcccagcgcaactttaacttgattcttcttgcccaaccggggcaccagcggctgctgctgcggcggctgctgctaccgccgccgccgcggtctcacaaaggggctcagggaagggaggcggcgcgggcggcagggacgggcctccgggccgccgaggcggggagacaaaagggaagctgcctctgctcgcgctgcctgctcggagccgcttgctcggctgcctctggctgggctccgcgatcctctcccccaccctcgggcactgctccgcctccctcccggcgggctgtccccgcagtgctcccggacccggcgagccttcggggcgcgcgtcgctggtggtggttgaggctctagcgataataaatgatagaggatacaatgactttgctgtctctgctgggtcgcatcatgcgctacttcttgctgagacccgagacgcttttcctgctgtgcatcagcttg

SEQ ID NO: 30923 - DNA, 2300 bp, Homo sapien
gtaggaacaaatggtaagtggtgtttctcaacctcatttgctaatggtacttttaaaatgtttccttggcagcacttttggaaagcatcgtgaaatatttaccaagtgcagccttaagaatacaatgaaattgagatatttctggaattttcctggtgtctagtcagttttgggaaatttgtgctgaaccccagtttgcattgggtttcataagacctaccagagagttctggaatccacaggaatgaccatttgctcactaggtatctgtattagtgagagttcttcagagaaacagaaccaataggatgtagatacagatgtacatatagatatacgagctgaaatttattagcgggattggctcacacaattatgaaggccgagaagtcctacagtggacggcatgcaagctgaagaacccaggaagccagtggcttggcttagttcaagtccaaaggcctgagaaccaaggcctggtgtaactctcaatctatggtcaaagacctgacaacctggggatgctgctggcacaagtctccaaaggctggagaacctggagttcttatgtccatgggtagaagaagatggtattctatctccaggggagagagagagagagagagagaaggagagagagaaagaaggagagagagagagaaagagagagagagaggagagagagagagaaagagagagaaggagagagagagagaaagagaaagaacatatttgcctttctttctatctgggctgtcagctgattggatggtgcccacccactttgggtgacggaggatcttccttattgagtcgactgattcaaatgtcaaatctcttctggaaacactttcacagacatgtgcagaaataatactttgccagctctctgggtatcccttaatctagtcaagttgacacctaaaagtaatcattacaatacatgaacctggaattgtcccagtgtggacccaaggcagaaatggaatttagtaatctggggttgggaatttggatgtacatattgtgagtcatcttggaattgccagagtccaagactttttttttttatctatatatattttctcctgatagcttacttcttaaaagggaacttcccaggttgaatatgcaatgcttattaagacccattccagaacccggctgtgttctcacagataggactcaatgagcacaatggttaaatctttatctttacagggatttttttttttttcagaggattggagattagattatagagtaatatggttttatagacattcatgttactttctttgtttctagaataaggaaaaggaatgcagagctacatttcttaatatgaaatggtgattgccagtacagcccaactgtatattttcagtttgtaatgacaacattaggaggaaaattgattagtacttttaaaacagtaggaaaattatttctgcccaaacattgattagcctttgaatggactttcttataattcttttcttccacagactgcagggtgcagcacagtcatattttaggcagagtcaagcagagaaacctacttgccgctattaaacttattactgccttttccagtgggtgcaaataactttgtctccagtagttacactctcctggcttgataacacataaggacttctttgtttattttgattaaagagactaaagatacttttgtcttatgtgaaatgtgaatacagtgaaatattgaaattttttgatgacatatattcctccttttggcttataaatgtcaacttgtttagcttccttgcatgagtgctttaaaatttattagctgaagctcaggtaatattaatttgttcctggttaaatgttatataaaatataggaataaagaaaactgaggtccttaccctcaggtaacttatatatttgaggagttaagacatagaaataagataaataggagagtttatgatgagccccagatgagtgggttggaatattacataaccaatacagggtttcagaaggagagagattttgtgtgcgtgcatcctgaaatagttggggaggactcatgcaggagctggaacttggagataggaagaattcatgcaggtggaagagggtaggagggatgctggtgccattagcagagagggctagaccagaacatgcctgctttttcaacagtgagtagatctgtttggctctaatagaggactcatgatggggggtaatgaataatgggaaataaaactagagaggtaggttgaattcaaattgggaggggctttgaatgccaggcaagg

SEQ ID NO: 30924 - DNA, 2300 bp, Homo sapien
aacatcccttttctctgggccaccaaagcagggctgcttttcactggcccatcttctttgcatgtatttcaataaaagtttgggggctattgtttcattgtcatgtttccacctaaaacctagtctgaggaatagggatctacttatttttgatgcacatgatttattttagtaaagtggacagattttaatgacacttaggaactgaggcttttttttttttcagtcatggttttacttgtagaaagcgatctgtattttaaacaaaaaaacacttaatctttgaattgaaacacatttaatatgacagttaatttcttcttttccaaaggagaaaatcacaacagaactttaagaagtctcctatgcaactggatacaaatattgttgattcatggaacgtgatgcctctgacattaagggtaatagttattgttttgggtttaaaacttcaaggtctggctcctcattttcagggaagcctcttgtatctgaatagtgtttctggaattgtgctttgatcaggtgtataaggactctgaaccaggaatgcgggctttactatacctgctctgagaatttgtttaattactcagcttctctaatccttgctttcctcatctgcacgatgatattaaattcatgggattgttatgaggcttcagtgaattcacgtttgtgaaatctagaagtacaatgcctggaacagagaagattctttccttttccccttttctccagcctaaattaataactggacttttaggagcagcagcgtagaggtaggactatatgaatgtcattacaataataataacaaaactatttagatataaaatttcctgcctcctcttttgtaactttcctatgcacatcattatcccttttcactattgtttgctcagctttggtgtgatttgtaaaagctcctggttattaagggtataaaccttatgttaggcataaggctgtaaccttataaccttatgttaggcataaggttgtaaattttttaaagttttcctcttaacagtatatatggtattttttgtcatatagaaatttcaagttttgtttttatgttgtcaggtctattgtttttttccaaaaattgtatgacatatattgatttcagagatgttaaaatgtgaaaaaacaaagtcttagattcaatggaatagaataacaatcttttataggttctgcctttggtgcaatgtatgtgtgtgtgtgtgtgtgtgtgtgtacaaatatttgtaggtatgtaaattggtctcattttttgtacttaaaagatattattgcaaacatgactgggtatgggaatgttctctccagctaagaaaactctaggaagaatgtagttgcatagagcttagaagccctggcatttgcttcaggcattgctatgggatgctttagtcttggcttgtccgttgttgctagaatcacgtgctgccctcactgctgctcttgtccagctgccactgttactcaatccctcctgatagatatctctgtggtagcaacaattcaaaatttgccctgaggacaaggttagtatttcttgccagcacctgccactttcccttccagatcctgaccatgggagaagtgtgtgtgggtgtgggggtaggggaggaggagttaccaaaccctgtaaagcagacatcaaggtagaaggctagaatgccaggtaaaggctcataggacagagtgctataactacatcttcaccactatgacaaagttgtcccacccactctccggaaaagagttaatgttggttgaagatcacgaagcagttgtcctccaaaatgccccaagagtattagaatatgatagaagattgtttatttgctaatgaagacatcagaactagccgaatggttcaaaaataattttaaatactttatacattgaaacaaatcaagccactataataattaggagccccttgctctggtgcagggcataataatcgctagcaaatccttagttgatgacatcacagtaatctgagacagagaggtggggactgtagtggacacttaaagcaacattgctgtgtctccttggtaattcatgaatgacagttcccggcaattcatgaatgtgacacttctcggtcatttctgtgttttggcaggtactggtggctttaaagccagggaatcaaagtccttaaagttgtaattaattttcctgaagctgataatgagacctactgcgatcctttcacataagacaggtctttacacacaatttatgaaaacagaataattaatagaaaatgattt

SEQ ID NO: 30925 - DNA, 2300 bp, Homo sapien
gattctaggaaattgattccactgttggattctaggaaattgagtccactgttttcctttgcgtttaatttcctttgtgtttaatttgaccacagaaacttttttgagtagcacctagtaacattgcaaggaacttgtgtatcaaggtgtatcttgattatcctgattttttttgttctctaagttgttgccagatctctcttgcaactgtgtcaatgaaaggtctgtgtttagaaaaggcagcatatcattgtatatttgaaactataggaatatatactttgtataaaacttttccaatgatttcagaaattcttttttcctccttttgacccacaactagactgttcataccctaatagttccccaaaattgccttagcatgtcacaccagcatttgtcatccagctctggagaaatgacatgactgttagatactatgcctgtttaattgcctctggattaagtcattgatagctagacttttgagctagttagctgtagaaataatagaatccagtgtttcccaaagtgtgttccaaagaacacaagttccaaagatgctcttctaaatataggattctaggatgaaataagtttggaaaacacataccatcttagaaagttagtgaacatgagcacatcaaaggctctaatttaaatgtcctgtgaggagagaaaaacacaacaaatatctactgtcagttagcccagtgttttccagattaatttgaccacagaaacttttttgagtggcacctagtaacactgcaaggaacttgtgttctaaagaacaccctttgggaaattctggtatattgaaatattgctgtgttttcattcacgatgactcttagtagcagtacaatttgcaacttagaagcatgagcctttcatatatgaagctgacttgttaataaaagcagtgttaagaagtagtatgacttaatatgaccaacagcagcctcatattgatagcagaacaatcctacttaaagctctaaacatcatccccccctttttttttttaacggaatctcgctctgtcacccaggctggaatgccgtggcgcaatgtcaggtcactgcaagctccgcctcccaggttcacaccattctcctgcctcagcctcctgagcagctgggactacaggcggcctccaccacacctggctaattttttgtatttttagtagagacggggtttcaccatgttagccaggatggtcttgatatcctgaccttgtaatccaccagccttggcctcccaaagtgctgggattacaggtgtgagccactgcacccggccatccctttcttttatatgaataatgagcaagagccctgccatagctaaatatgtctcaaattcattccaagatctttccattgcttttttgcagttacctttgctttttgggttgaatcaaaatgaatatttttatatttcattactatatgatatttaaaaatatacagaaaatcacagaaaaggaaaaacagaaatttgattttaattcacttttgaaattttaacgatttttaaaactaatgatctgttatataataactgaaatgtaaactattaacagttatttactttctttcctttattgtcctctctggattcagtgaaataatttgaaatcaattagagctcataccttctaaaactcctgtcccatatcatcccacctttcatgttttatgtacatagttaagtttggcatgttatctcttgcctaaaatgtgaggccttcctgtagttccacagtagttactcttggctgcagaaataggtttgggaagctatgagagattaccccaaagtcatggatgaaacaaatctagtcgaaaacatggtacagagtgaattaaggcaaaagtcattaacttaaaattacatccaatatttaggaatagctcatcctctgcacattatccaaaatattttaaaaaactaaaagtaagatctcttaggctaggtggcggattgcaaagggcagggggcagttgataccatgaagcttccaatagatgcatttctaaacattttttctaatatgtaaatttgctgatccttagtaatgttaatgctttgtctatttgttatttttaccactgttgaacagcaaactgttgaggctagggttgattattgataatttttatgtgtttagtaataaccacagcatcatacgtacaactgctttaataaatccaagttaaggactttgaggagagcatgtagcaagtattcattttaacaaatcatcacagacagtttccctgttcaaagct

SEQ ID NO: 30926 - DNA, 2300 bp, Homo sapien
gatcctgttttacagaaaacttggccaacccctgctacagctgaatgtatctatacgagtgagccaaatcaaaaccagagaggaaccacataaccaaccttcagaattatgagaaatattaaattgacatttttgcaagcaactatattttgggagagttcgatctgcagcaatagatgactcaatcacaagctgataaatgctacacaaagaaaaaggagactgcttcaaaggaaataatctcataaaggttttgggcctttttgtctcacttacttcatttaggagaatttcttaccccaatctgttgtccatggctctgctttgcattccagggaagttttggcagctatgagcacatatacctgctggttactcaaaggacattcaaaacattttaaaaatgagtattgaaatacaacttttctaaaattttaagaaacggaatttgtaaaatatagtattaatgccctaaagcattcttccaaataagaggtctattttttcagcatattaatctatctgcagtgaaacctgtctggttttgttattaatggacctccttgacttagtgaggtgaactgtcagcccaggtagggtgaagaatggctgtgataaaggcgtgcagcagggcagcaatcactttaccctctgcaaaggacacagctacctgccaaggctggaaccaggaaaacaatctcaaccataatttagatctgattattataatttagatctgattatttatgcagtgtcaactaagtccttgacttacactgctactatctaaacttacttttgttgtatatccattttgatctctatattcacccctattattttcagagaaccttcaaactatcctaagtaattttgcagaaaaaggctataaggaagaagcagtcaggccaaagagtcagtaaacaaaaagaaatggtgggccacgtttagtcttgatgcaaatgtgtgggttacaatcaggggtggtgctcatggctgagcttggtagtggttaaatacatgatccagacccacttgattttgaggaaaggaccagtacaatcaatactgcacatcttggtaaaaggagtttgaggagatggatctgggagtttaggtcagctatgctcaggtgtacaaaagcaactccctgggactcccatccatacacaggccattgaaacctgacgtgtctctcttacccccattccattccccatcgattccggaagaagaactggcatttcttctgagacagcaaagaactcctcctaagatttcctctttcctaattagttctgtatgaagtttaacaagaaaatccctccagggccgcctcgaggccatgcactcacgcagtttggaaagacgaccagggaaaaaggatctcaaacaaaaattctagctcgacgtctgccactaagttgtctaattttggccagcatcaactaaaggcatacataacacggccgtgctcggaatgcaaggtgaccgcgaggacccagagggcgcgccatgcgagctcacagggctgggggccgcctgggcccgcgcgtgcagccaggggcttccggccgcggccctggcgcgtggtctgcgcgcgcccggccgtgcgtgcggatgcggggaggctgcgtgtgtgcgcagggagagaacgccggccaccttcccgcttccgagctgggtgcgcgccgagcacaggaggtgagtgagaagggcggccctgcagggtctccgaggcggttgagtcctgccactgggtggagggtatagccaccggacccgcctttcccggaacgcgccgtcctcggaaacgcctagaccccggcagctaggccgggaggcaccgcccactcctctagagcggagcgtggcccaggttgagccgccgcaccgtgggtctcgggtctcggtgacgagcagctgcccgcctccggtgagcgcgggagaaggggcccagtggggcagtgggcgacgcggagggcccaggcccaggccgcggccgcgccgcatccgctggttgtccaccttgccttgccccagggtgcaatacctgccttgcgtcgcccgtgccgctccagccaccgtcaaatccgggtagcgacccggggcgtttgcagcggtgccgaggaagaggacgggaacggtgttacggtattggtgggcccctaacaggcctgcggcgaacgctttcccggagcgctagggaagggccccggcgcagggatgtcggagggattgggaaggaatgtgaaactaagtggggaatgtggagaacgggcggagagagaaggaaatcc

SEQ ID NO: 30927 - DNA, 2300 bp, Homo sapien
tgagtaagaacaatagctgccatcagatatcataaatttgaagtttgatgatttactttcaagaataaggttcctgccacttagtttagctagttctggccacattatctgcagctccttccatcaagaggcagagactatttgcctgccccttggatttggagaggcctcacaatttgctttgatttgtagaatttggcatatatgatcttgtgtgactcccaagtctaggccttaagaaattttacagcttctgcctgctctcttctggatgttgcccacagaccaaaaacatagcctactgcaggataagaggccacatggagccaacagcagacacatgagtgaggccaccttggactttcagcttagctgattctccagttcagggatcagcaaactacagcctgtaggccatagcctgcttctgtatggcccttgagctatgaatagctttgggtttttaatagtttataaaaattaaataaaaaagaatatgtgacagagacaaagtctaaaatatttactatctgatcctgttttacagaaaacttggccaacccctgctacagctgaatgtatctatacgagtgagccaaatcaaaaccagagaggaaccacataaccaaccttcagaattatgagaaatattaaattgacatttttgcaagcaactatattttgggagagttcgatctgcagcaatagatgactcaatcacaagctgataaatgctacacaaagaaaaaggagactgcttcaaaggaaataatctcataaaggttttgggcctttttgtctcacttacttcatttaggagaatttcttaccccaatctgttgtccatggctctgctttgcattccagggaagttttggcagctatgagcacatatacctgctggttactcaaaggacattcaaaacattttaaaaatgagtattgaaatacaacttttctaaaattttaagaaacggaatttgtaaaatatagtattaatgccctaaagcattcttccaaataagaggtctattttttcagcatattaatctatctgcagtgaaacctgtctggttttgttattaatggacctccttgacttagtgaggtgaactgtcagcccaggtagggtgaagaatggctgtgataaaggcgtgcagcagggcagcaatcactttaccctctgcaaaggacacagctacctgccaaggctggaaccaggaaaacaatctcaaccataatttagatctgattattataatttagatctgattatttatgcagtgtcaactaagtccttgacttacactgctactatctaaacttacttttgttgtatatccattttgatctctatattcacccctattattttcagagaaccttcaaactatcctaagtaattttgcagaaaaaggctataaggaagaagcagtcaggccaaagagtcagtaaacaaaaagaaatggtgggccacgtttagtcttgatgcaaatgtgtgggttacaatcaggggtggtgctcatggctgagcttggtagtggttaaatacatgatccagacccacttgattttgaggaaaggaccagtacaatcaatactgcacatcttggtaaaaggagtttgaggagatggatctgggagtttaggtcagctatgctcaggtgtacaaaagcaactccctgggactcccatccatacacaggccattgaaacctgacgtgtctctcttacccccattccattccccatcgattccggaagaagaactggcatttcttctgagacagcaaagaactcctcctaagatttcctctttcctaattagttctgtatgaagtttaacaagaaaatccctccagggccgcctcgaggccatgcactcacgcagtttggaaagacgaccagggaaaaaggatctcaaacaaaaattctagctcgacgtctgccactaagttgtctaattttggccagcatcaactaaaggcatacataacacggccgtgctcggaatgcaaggtgaccgcgaggacccagagggcgcgccatgcgagctcacagggctgggggccgcctgggcccgcgcgtgcagccaggggcttccggccgcggccctggcgcgtggtctgcgcgcgcccggccgtgcgtgcggatgcggggaggctgcgtgtgtgcgcagggagagaacgccggccaccttcccgcttccgagctgggtgcgcgccgagcacaggaggtgagtgagaagggcggccctgcagggtctccgaggcggttgagtcctgccactgggtggaggg

SEQ ID NO: 30928 - DNA, 2300 bp, Homo sapien
agtgactgctacttctttgctaattgcagctttatcctcctgcttccctttgtgtaaataagatttactgagacatccaatcacagaattgcccctgctttctgacagcatccaatctatagaaaaacctctattttcttagggcctccccgaaaacacccgcccaaagccccaatcctatgataggtttgttctaaacaccctcttactgagatacccaaagggtatccatggtgagtgtctgggctcacttcgaagagtaataaatagacagaagctgcttaactacagctgtgttcctagtggtgtttggttgagggcataggcagtgtgaatagaaaaaacggggagaaaaacactgtctcttcagagttgtggtgggtattaaatggataattaatttaccaatatatattgagggtctgttttgtgtcagctgctgtgctaggtgcaccaagaagaacaagacccgaattgctctccagggttttgaaactgctgggcatgcagagtagaaaatttatgatccaattcaaagcactattatagaggcatatacctcgtataaaggtgttatcatagaaccatatatacagaaggagcatgtaactcctctggcccttagggaccgaaggagtcagaaaagagaggatgtatggtggacaggataatggctctgcaaagatgtcctattccctgaaatctgtgaatatattacctaacatggcaaacgaactttacagatgtgattaaatttcttgagatggagagattattctggattatttggttgggcccagtgaaatcacaagtgtccttgtaagaggggtgcgggggggtgggggtgagaaaaggagactctgactgcaaaatgatgtgggaccacaagccaaggaatgtgggcagcgtgtagaagttggaaagggccagggaatggattttctcctggagcctccagagtcagccctcaccatctatttagacctgtagcttccagaactggaagagaacaaatttgtgttttctaagccaactaaatcagtgataatttgttagagcagcactaggaaactaattcaggcttaatctttagtgccgagtcccgggtagaagcaaaggaagactattttctgtgaggacctgccagttggtcttcatggcttgcgagtacgtgtgcttgggagtaggacaggatatgtggagatcagatcctgaaaggtcttctttccacacaaagaaactggaaataatgctgaaggtaatcagaggccactgaaggattaaaagcaggggagtgtgacaaaatcagaactgcatttcagaaggatgaattgaagtctacaagtagagacaacagacgagaggctacttaagtattctgggcaagaaatgatgagaggctgtctctgatcaccctctacaaaacgcctttgcttattccttgaaatttgggatgagaggatttagaaaaaaaaatggttgtactcttcaaatatttgaaaggctgtcatgagacagattagacacggtctgtgctgctccaagtttgagggataaatcagtcataagaagatattaaatgcactatccggaagcacataattaataatttgtctaaaaatcgcatagacttcttcacagataattatgctttacatttcattctttcaacaaataatcatttgagcagttagcatgtggcaggcatcaggcctgtatatgacggtgaaccaaacagacaaaaggcactgccctggatggagtttctttgcataaggtaccgtttacagataacttttatataaaataatcatttaatcaagaagcaagctcacagtcgggatagctgaaaagagactaatatacgggcgaggttggtttggagtaaaccctggcctgggaaaatcgagacgataactgaaaagcagtcactgacggcaaatgagcccctgggacttctctccgcgagctttcccagccaccaggccgctcccatcacccttccgcccgtcggtgccgcccctttcctcgtccccaccccgtcccttttaatacgtcactcgggccgcgggatttcgagcatttcgctcgcgagatcttctctgtggcggagacagccaggttggcagctgacgggacagccggggtctattttgttgcgggttttcagcaaatccagggctggtctggaggcgcgaagtaggttccggagtccgagacctgggctgtcggccgcgggcccctgagtagcggatggggcgggctccccggcctcggggccgtgctcagtctgcgtgagc

SEQ ID NO: 30929 - DNA, 2300 bp, Homo sapien
tgcaattttatagtgtacttttctagtgtgtccttctaatctggtaaagatagtgtaaatgtatttgaatctgttcttctgttaaaggatctaatagatttgatgtatatagttaataggagttgatgtttgtaagggtgagagcagattattgaggacatattgttattatgaggtttttttttctttagttattagaagccatgtatgataaaaagcttatgtttggagtaatttagtaatatgttttaaaaactcataacattcacgtgtaattaaaataactattgttgatggaaaagaagctcaataaattatatctggaatggtctgaaataaagattggatttgaaggaagaagacttcttctgaatgttaatgtttcattcctcttgattttctttgtcagcataaacaacttacatctattaggccattgagtaacacaaaactgcctaatgagtgtaaaagtgtatgcctgttatttccaaaatggattaagacgctaactttttgagtgtgtatctctagaggggtggttcatggactcctttgagaatttgaaaactgtatctcttccccaaaatatttacatacatgtatatatatgtgtgtgtgtgtgtatatatgtaaaaatatatatgtgtgtgtgtgtatatatacatatatatacacaaacacatgaaactgtgtactgtttcagggagtttacagtgtataagcttagcaagtgtgaggcttaatcttttataaatatttgctattaaaagcctggtggagttagaaaagtactgataaagaactaaacagacttagtttgtcttggcttcctcacaaactagctgtttgaaactcttagctgtttatcatctctgggcctcaatttcctcatcagaatgaagggttttattaggtgatatgtgaagccctttctaactctaaacgtttactcataggccaggcttggtggctcacgcctgtaatccaagcacttgaggaggctgaggcgggtggatcacctgaggtcaggagttcgagaccagactggccaacatggtgaaaccctgtctctactaaaaatacaaaaattagccaggcgtggtggggcacgcatgtaatcctagctactcgagaggcaggagaatcgcttgaacccgagaggcagaggttgcagtgagccgagatcatacactgcactccatcctgggggatggagcgagactctgtctcaaaagaaaaaaggaaaaaaaaatacgaaataaatatgtacttataaacaaagggagacctgtgtaatgtttttgattgaaccttgaaaagtgaaagtcaaaactttctgttatgtaacaagtatggcaaaaagacattcacataacatgtttggaagtattttatatttagcaagcatttattgaacacctactataagatgtatgtggcatagtgctaagtcctgggtaggcaggactaaaaaccttaaagcacatatgtaagagatttaagttttgttttagtctggttttacccaagattttaaatgttgttttacaatttacaatttgaaaaggacttgaaatgtagatgaatagactgaactattgctgatttatagtgttgtgaggtactaatgtaccttttttttgtgaaaaataagcagttctcaggcattttagaagtacataataaaccattttaatgccattttgagatgattctcacctgtttttcagagcatagctttaagagactcttggacattttagtggtgatttggtgattaaagtaataagatcactttagtaggttatttcagattgactttctcagtcagaattttacctttttaattaaagctgctagtctagttgaaagttttggaaccattaaaatatgtttgagttaagtgcttcatatcatccttgggttttattatgcctggttaataatttgggttatatctgtgtattcagatggaaatttctgtgtttcctgacagatgttggatttcagtatgttatcttctcttttaggtattttcaaccaccaggaacttggatacagtgtgctttagaatccagggaacttcttgctttgtgcttgaaaaaaatcaaagcccctctgagtaaggtaagttaaacagctaaaatcagtattcataggtatgttttcattaaaggtctcattttcagaaaattcttgtgagtaggtttttcaaaaggaatttttttttttttttttttttttgaggtggggtcttgaactgtcacctgggctaggctagagtacaatggtgtgatctc

SEQ ID NO: 30930 - DNA, 2300 bp, Homo sapien
tgaaaataacaaatcaatttagagatttctgaaactgcagataaggtataatagcaaaattttttttttttttttttaaagaaacaggaggctgggtgcagtggctcaagcctgtaatcccagcactttgggaggcctaggcaggtggatcacctgaggttgggagttcgagaccagcctgaccaacatggagaaaccctgtctctattaaaaatacaaaaaaattagccaggcgtggtagtgcaagcttgtaatcccagctacttgggaggctgaggtaggagaattgcctgaaccgaggaggtggaggttgtggtaagctgagattgcgccgttgcactccaggctgggcaacaagaacaaaactcagtctcaaaaaaaaaaaaaagaaatgggagtcttgctttattgaccaggcttgcgtgcagtgtcatgatcactcactgcagctcaaaattctgagctcaagtaatcctcccacctcagcctcctgagtagctgagactacaggcacatgccaccactcccagctaatgtttaaaacacgttttgtagagacggggtcttgttatgttgctcaggctggtctcgaactcctggcttcaagtgatcctcccacctcagcctctcaagtagctgggattacaggtgtcacctatcatgcctggcttcattttaaataatttttcttggtggggtaaatccaagatttattgtgattgttccttttctaatcacattttcattctcgatcaaaatacctgatattatctgtagagcaaaaataaatttagccgggtgcggtggctcatgcctgtaatcctagcactctgggaggctgaggtgggtggattgcttgagcttaggagttcgagaccagcctggaaaacacagtgaaaccccatctttactaaaatacaaaaaattagccaggcgtggtggcatgcacctgtagtcccagctacttaggaggctgaggcaggagaattgcttgaacctgggaagtggaggttgcagtgagccaagatcatgccactgcattccagcctgggtgatagagcaagattccgtctccaaaagataaataaataaatttgcagctaaaaatgatgacatttagcattttttcaggttcatttttattaggctcacttcgtttcacatacattgttcagttaagaaggcatttagagttaaggctgttattcaaagctgaataaaatatccgtgaaaaataatcttcacagtatcaagccttggaaaaaaactattaattctgaaaaatctgttaagttctaacatgatgaggttaagaatcatgagaaactgaatgaaattagtgtgaaagaccctgtcttctatacttgcttaatcttttagaataaacattgatttctttagcagtgagcaaaaaaagtagagccatgacaaatcaaggactccgaccacctgcccagttgtacttttattagttgataaattaggaattaacagcgtggttggagtgtaagtctaaataggtatttctaacaaggtcataagaggagatcatggcaatcttacaatattttgtattttgtaaaattattttcattctataatttattaaacaagcgttctaagatacattgttgtgaaagttatatatagttctgtaaatgcttattggtgggtataagagaaaaaaagtatctacttgtgatattcagaatgatttatatgaatggtagctgaaaactgaagtttgagttaaaagaaaactacagtttttgttattaagaaaaacagtattcagtcactgaaaaattttagcaaattttaacaattgtacaaataatgcttgaatccattctcataaaaagttaaatacatggagaaaaattttaaaagtcctcttgacactgtctctccatcccttctcctttctcctgaggtgtaaccagtgtcattagtttggtcattttttagctttattgaattttgtggcctcactgtatagttcccattctttgtaactttacaaatatttatcttgcaggtattaatcaagaagagctatgaccggaccaaacgtcagcgtcgtagaaactggaaattgaaagagcttgcaagagagagagaaaacatggatacagatgatgaaaggtctcgcttttctttaaatctcttatgttgtctcaaaggaaatatttatgataaatactttttatgttgtaaagaaataggcatcacacaattgatccttgcactcaattataatcttggattcttatcaaggtattaatggaatcagtataaga

SEQ ID NO: 30931 - DNA, 2300 bp, Homo sapien
tttgatggatgatgtggtctgtatgacttctgccttttaaaatgtgttgacctaagcctggacatcaaaatgagaccccttctctaaggaatttaaaaaatagctgggtgtactggcacgtgcctgtagtctcacctacacaggaggctgaggcgggaggatcacttgagcccaggaggctgagactgcagtgagctgtgactgtgcctctccgctccaacctgggcgacagagtgagaccctgtctccaaaataaaaataaaaataaaagtgttgacctatagtttgtgatctagttaagtttcgagaatgttctatagttgtatggaaaacatgttaatatgtattctccgtttggaggtgctaagatattcataaagatgttcctgtgtgtggttataatacgtgtatgttatttaagattatttttaatggtctgaatacatctgccagctgtgccagtttcccccaacctccagttggagtagttgcaaggtctcatatccatttcacaaacctttgccaagaaggtctatttctatatttccacaaatgtgcaatcacagtatggagggtggagtgtcacaactaagtgggggtaaatagataatgaaaaataagatttaccagtgtaaatagaattggcctcaccaacatggccttggtagtccccgccaagtcctttcttagggtttctatttcctgatctacatgccctgagtggtcatatctaccctgccaatattgcaaggtgtgtcgcgagaagccaaaagataaggaatgtgaccaacataaagtgataaagaaataaataacactagcagtggttgctgctatttagacacgggagcagaaggaaatgataactacgtaaaatggctaacacgggcccaagcaggtgctctgtttctattggttcccttccctgcccccatctacctttagcttcctctggggacatcctccctcctgcatggagacaccaccgcccaataacgtgagcctccctcttcgtaatagccctggcagtgtggaacccgctgaaagcgcgttgtgaggatgagcagagacctgccagcagctaaaattcgcgctttaacacaatcagccctggccgagcatgtgcagtgtctcctccttcggcagtgggggctgatgggcagatactgcccaaatgctcattcatcaaaagaggctttcgctcccggactcccctgggcctcgagcagaaagcgtctcggccacggagatacagaaccgggagccttcaaggtcctccgccactctcagcaagccctgctctcgatggagaggagatcgctgggtgatggatgtgggcttccagggaaggtgctcgcgctggtcccgagccctccggggaagatattcgagcgcggagcgtaagcgcagggcacgccagccccgggagccgcgggagcaggcgccgcgcgtctctgcaccaccgggccgcctcccagccttctttccccagtttgccctcctgccgcagtccgggccgagattaattctctgcacttgtgagtgggcacacacaagttctccgggcacgatcctttcatctatttccctgggggagtccacctttttaacgattaacctcctagctaccgcgggcaaggtggcaggatgcgagtggggcggggaggggcgtttcacacgttcagaggcaccaaaattagctgccagtgctaaaaggctttgctttcttcggtttttgacaaataaatggggtgggatgcttgcttggccgcccgctgccccagcccgagccctgggctcacttagcagcctgatgccgagtttcagacgcagtcctgctgcgcttacacccgggcttcttcgcccccttgccaaagtctgcagcccgatggatgctgggcgcgggctttccctgagcgctttaacgcagcttaggctaaagccccagagctcccaccttctacctcctgtttatccgcccgcccctctaccaccgccaaaggacgtgccccttcagtagagtcggggatcccagccccagagcgggggagggcgcctccctatcccctcctccccgtccccgcctcggctcggggttttactgcagcagccggaggtgacagcgacgcctcagccgcctctgttgctctcggagccccggcttcccctgcaccgggaaagcgccccctctcgagaggctggtccctggagaactgcgaacgagctgcagaaaaccagattttaaaatgtagaagtcgttgggctgcattcctccgaggaccagtctgatcgcccaggac

SEQ ID NO: 30932 - DNA, 2300 bp, Homo sapien
gattctcccatcaactcctttcttcttcctgatattgtagactccagagacatcccaaaaaaacctaaacacagttttacaaagtggacccattcctttcccaataatatctgtctccaaacatctcaggttacctaggggaatacacactagtgatgattacttttgaaagttttctactccagcagtgtgttttttagttatgcgatagaaactttaggatactgatgatgaaaggcctggttcaaaatgatcagttgatacaattatcattactttatgttcttacactattatattcttaacaattctgcctggttcttcaaatttcattcacctctgcacaagctgtagtgctaactaattattatctcacaagttccagtaatcagaacaaaagaagatgccatctcatgcacaaaaaaatatcaattgaggtgctttttaaattttttaatatcttccttatctgtggttgtatgccacctttctttcctaatgttatctgtatcttctctgcttcctgatcttttctagatttatttcttgatctttccagagaatatttttttcttttcttgatcaagtctcctttttcatttttgtttttgttttttactttcctactttattattttctgctgttatctttattagttaacataattctttcacaattttttctaagtctccttgtacattgttttgcaataaagacacttagtgtgtaatttcatagattgtttggcttttctgtattctctcaattttgttatgtagggtttttgtttttcttctgttcctaaagagtttgtaattttcccatttgtgctttttaatacagattcaaagcatctttaaatttccaatagtatatcaatcagggtaaatgtttgttgttaattttatccttattgtattttgatggatgatgtggtctgtatgacttctgccttttaaaatgtgttgacctaagcctggacatcaaaatgagaccccttctctaaggaatttaaaaaatagctgggtgtactggcacgtgcctgtagtctcacctacacaggaggctgaggcgggaggatcacttgagcccaggaggctgagactgcagtgagctgtgactgtgcctctccgctccaacctgggcgacagagtgagaccctgtctccaaaataaaaataaaaataaaagtgttgacctatagtttgtgatctagttaagtttcgagaatgttctatagttgtatggaaaacatgttaatatgtattctccgtttggaggtgctaagatattcataaagatgttcctgtgtgtggttataatacgtgtatgttatttaagattatttttaatggtctgaatacatctgccagctgtgccagtttcccccaacctccagttggagtagttgcaaggtctcatatccatttcacaaacctttgccaagaaggtctatttctatatttccacaaatgtgcaatcacagtatggagggtggagtgtcacaactaagtgggggtaaatagataatgaaaaataagatttaccagtgtaaatagaattggcctcaccaacatggccttggtagtccccgccaagtcctttcttagggtttctatttcctgatctacatgccctgagtggtcatatctaccctgccaatattgcaaggtgtgtcgcgagaagccaaaagataaggaatgtgaccaacataaagtgataaagaaataaataacactagcagtggttgctgctatttagacacgggagcagaaggaaatgataactacgtaaaatggctaacacgggcccaagcaggtgctctgtttctattggttcccttccctgcccccatctacctttagcttcctctggggacatcctccctcctgcatggagacaccaccgcccaataacgtgagcctccctcttcgtaatagccctggcagtgtggaacccgctgaaagcgcgttgtgaggatgagcagagacctgccagcagctaaaattcgcgctttaacacaatcagccctggccgagcatgtgcagtgtctcctccttcggcagtgggggctgatgggcagatactgcccaaatgctcattcatcaaaagaggctttcgctcccggactcccctgggcctcgagcagaaagcgtctcggccacggagatacagaaccgggagccttcaaggtcctccgccactctcagcaagccctgctctcgatggagaggagatcgctgggtgatggatgtgggcttccagggaaggtgctcgcgctggtcccgagccctccgggg

SEQ ID NO: 30933 - DNA, 2300 bp, Homo sapien
aaaaagtgttcaaatttcattagcaatacaaaaatacaaagtaagaaaagactgatgtactgtttcatctctcaaatcagcagaaagtttgaaaacaaagggatagtgtgagcaaaagggcgttcatatggtttgtagggacataaaatgctactgcgttctcaatctggggttgttttggtcggaaggctccgaagatgcataaaaatttgaacatatttgccctttcctgagaagagatgcaaaatccatcagattctcaaagggattcattctctcaaatgttaagaacaaatgtttaaattatttgggagaataatttggcaaaatgtgcaagaaagttatgcgtatgtgtattccaatattgttttgaatgcttaatcactataaaccacctaaatattcaacagtgggacatttgaaataaatcacactccagttctatgatagagtcaatgtagttattaacaatcgtgctgtagaattaatgatgccgaaatgttctttatacatgatgaggtagaaaaagcagtttgccatttagtacatgtgatatgatcctgagtttattgaaacataaacatatgacgtgcatgagaaaatatttgggagtatccatgaaaaatcccaatgccagtttgggtaactaaatgcaatgtgcttgtctttatttttagataaatttacaatgaatatattacttttgtaataaaaagcatgataaatataatataaaaaggaatgattaattttctatctattagaagatttgacacaggagattgttaacttttaattaatcaactgaactgaataggtacaatttgaaaaagcattttagaggactggaacaataattacgtaatactccacattgttactctctgcagaaagaccttcttaatatttaaaagcagtttaaaaaatctgtaaatttccaagcaaatagaaaaatctgtgctattctggacttttacaagacactagagcctttgtgagtcttttctagagcaagacagagtgaaataaaatagaataaattaaaatgaaataatttaaaaaattagagcattagcaaaggtaactaggccactttaaatatacaaataaactcttacaattttttttgttatttttagaaaaaagtttacacttccttcaccttttaggagtgaaaggagcaaaggaagtaagaaaggcttgggccggatgtggtggctcatgcctgtaatctcagcactttgggatgccgagtcggtggatcacctgaggtcaggagttcgagaccagcctggccaacatggtgaaaccctcgtcactactaaaaatacaaaaaattagctgggcatggtggtggacacctgtaatcccagctactagggaggctgaggcaggagaattgcttgaactctggaggcagaggctgcagtgagcccagatcatgccactgcactccagcctgggcaacaacaggaaaactccatctcaaaaagaaaaaaaaaaagaaaaaaagaagaagaggaggtgaggggagggaaggggagaggaggagaggggaggggaggggaggggaggggaagggaagggagggaagcttggtagaggagcaatgattcctgaactggctttttttttttttctttttaaactacaggtgaccaaacagaacttctccagtacaagtctgtctgtcattccatttgacattgtattgtaggcataagccctgccttccagttccttggcagtggtgaagcagtatggagctggggcagggaggtggcacattataggactgtgagaacactgctcctttatacataaaattcctacacaatggatcacttgaggtcaagagtttgagaccagcctggccaacatggtgagaccctgtctctactaaaaatacaaaaattagcccagcttggtggcaggcgcctgtaatcccatctatttgggaggcgaggaatgagaattgcttgaagccaggaggcggaggttgcagtgagccaagaccatgctactgcactccagcctgggtggctgggtgagactgtgtctcaaaacaaaaacaaaaaacaaaaaacaaaacaaacaaaacaaacaaaaaattcctacccgagaagactcatgactctggaacacagtgagtgcagctgttatggtaagtgaaacagctaatgatctggcagaaccttcaagatacaaggtaaagagaaaaaagccaggcgcagggtagtccacttgctgtcttttgtgtgaatctatctgtgtttttaaatgcagagactaaaggaatt

SEQ ID NO: 30934 - DNA, 2300 bp, Homo sapien
atatatttttcatgtaaaagaaaatttaaaataaaaagtattatttggaaatttattccaaaaatttattcttggtatttgagaaaatttttgataaagagaaggaataacaggcaaaaacacaaacaaaaacaaaaagtgttagtctttttagagacactaacactacattgtttccttcatacgtgtccgtgtgaagagaccaccaaacaggctttgtgtgagcaataaagcttttaatcacctgggtgcaggcaggctgagtccgaaaagagagtcagcaaagagagtcagcaaagagagtcagcaaagacagacaggggtggggccgttttataagatttgggtaggtaaaggaaaattacagtcaaaggggggttgttctctgtcgagcaggagtaggggtcacaaggtgctcagtaggggaggttttgagccaggatgagccaggagaaggaatttcacaagacaatgtcatcagttaaggcaggaacaggccattttcacttcttttgtggtggaatgtcatcagttaaggcaggaactggccatctgaatgtgtacgtgcaggtcacaggggatatgatggcttagcttgggctcagaggcctgacattcctgtcttcttatattaataagaaaaacaaaacgaaatagtggtaaagtgttgggatggcaaaaattttgggggatgctatggagagataatgggcgatgtttctcagggctgcttcaagcaggattaggggtggcatgggaacctagagtggaagagattaaactgaaggaagattctgtggtaaggggtgatattgtgggactgttagaagatatggttttgtatgaactgaaaaactaaacggaataaggagaaaaacaggtattaaagatctaagaattgggaggacccaggacatctaattagagagtgcctaaggagattcagcatagtcctgccagcaaagatgatttaagagtggcagtttggggatagcaccaggagatatcagctgtgatgggttggagaaacagtgtaaactggcagtgtaagcaagagcagggcatatatgagtagttgagaacagtgaataggagtatgactagacagaagatagtagggatgacaagttttttggggcacagtccaagttggtctggtgtctggaatgagactggggcttaataaaaaagagtgtctatacaggagcttaaatgggctgtaccttgtagcattccaaggacaggtcagaattctgagaagggaaggtggtaaaaggctaaaccgaggaattatgtctgacagaagggaagaaatgactgtggtggccttctcagaccttgtaggaaagacctctacttatccagtgaaaatgtctacttagactaagaggtatttttgttttctgactcggtgcatgttgagtaaagctaatttgccagtcctgggcaaatggtaattgtgggacttaacaaagagtgagtacagctgaaggagctggggatcagaaagtatatgtatcaggtgtgaggaagaaaatagcttttggaagttatgagagctgtagagagtgagttgagcatagtttgtgattttgagggcctgtaaaagtattaaagcagcggcagccactgcacgcagatatgagggctaggctaaaacagtaaggtcaagttgtttggacagaaaggctacaggacacaatcctggtccttgtgttagaatgcacagctctgcacttcagctgtgtgtaatgaaaagggttgggatgagtcagggagagctagggcgggggcagtctctaaagctgtcttcaaggaatgcaaagaggagtggggaaaggatttaggatctatggggtcagctaggtttcctttcgtgagtttatataatggttttgttaggatggcaaaaccaggtatccaaaggcgaaagtatccaaccatgcccaggaaggaaaggagttgtttttttgtagaaggggttggggtttgagagcacttgtgtttttatgtagaattatgctgaggtaggtaatggatggagaagaaatttgagctttggagggggatacctgatatcctttggagaataaatgctgaaggagcagaagtatgtcttgttgagaagattcaaaggaggggctacaaagaagaaggtcatcaatatattgaataaggtgagaagcagaggggtggaaagaaagtaaatcacgagaaacagcttggctgaagtaatgagggctgtccatgaaaccttgcagcagcacagcccaggtaagctgctgggactgatgggtgtc

SEQ ID NO: 30935 - DNA, 2300 bp, Homo sapien
ttctgcttgatctattctgctattacaggactctgatggattattcagtatagcaattgcattttcagctccagaatttctgcttgattccttttaattatttcaatatatttgataattttgtctgatagaattctgaattccttctctgtgttatctcgaatttctttatttccttaacacagctattttgaattctgtgtctgaaaggtcacatatttgttgctccagaattgttctcttataccttatttagtgacctatatgttgagaccatgttttcctgaatggtgttgagggtagcagatgttctttgatgtctggccattgaagagttaggtatttattgtagtcttcactgtctaagcttatttgtagttatttttcttgggaatgctttacgtgatgtgatctaagctgtttatgctttagggggcacccaaagcccagtaacactgtggttttgcagactcatagaggtaccatattaatgatcttgaataaggtctgggagcattttctggattaccaggcacagtcccttgtttcttctctcaaccataaagagctccccgcccccccgccttctctctctctctctctttgttctgagtcacttaaagttgtaggtggagtgacataaacacctctgtagccatcaccactatgactgcactgggtcagagatgaagccaacatagctctgtgtctcacccaaggcctgctgtaaccactccctggtactgcctgtgttcactcaaggtcccggggctctacaatcagcaagtaccaaagccagccaggctgatgtttttcccttcggggcaatgaggtcccgcaggacatgggtgggccctgaaataccatcaggactcagggcctaggatagaaaaacttaagagtctccctggttttctattgtgttgggactgagctggcactcaaactgcaacatgcagttcttcccattcttctctcccctttctacagacagaggaacctcacttcatagccaacacccactctggccacagggattagtaccagactaccaccaatgtcctcttaaggcccaaggtctccgaagtcagtttgtggtgaatccttcctggcctggtactcacccttcagggtagtgggcacctctttggtccagggcaggtcacgaaatgccatccaagagtcaagtcctggaaccaggaaccccaaagccacctttgtactctaccccccatggtggtattggtaacttaggtgcaaggcaaaattcccttttacttttccttctgcttctctcaatcagaaggagttttgccccataaccaccacagctggtaacctgaagtcagaaagtctcagaggctcaccaaggcccttgatgtagtacctgggaatacctgggtctcctcacatagcaggtgataaatgctggcaggtctgggtcctttccttcaaggcaatggcatcccttctggcccagagtgtatctagaaatgttatctgggagatggggcctggaatgggggcctcacaactccaactgttgccctgtcttgctgtggctgagctgttatctagatgtataaaaaagtcctctccacttttccctctcctctccctaagcagaagacaggggtctcttttggagccttatgttgtgcagcttgagtctagggaatgggtgatgccagcaatcccttggctgccacagctggtgtctcagtatgtcgtgtcccccgaccctcagtccattgtctatgggcctagtacagccctagaattcaactatatgttgcagtccttatggcctcgactgcatttcaggtttacttagaggctgagattattttgacccttcgtggcaaggtttgagcactcaaatctggaccacttgtatcagcaattgctctctgactagggatggtttaaatgctcccgttgtgggcaagcacctgttgagtttggtctggtttatgtttccgctttaacaggacagcattgaattcagagcctcacaattgctgtgttctacttcgcctagcaaccagagatgatccctgcaacatgctgctgttgctgggagtgggaaagaggtggcatcggcggttcaagactgagttttctatctcttcagtgcctctttcaacaatgaagatcaaaccaggtactgaggtagtgggagtgctcatctagtttttggcttttagtaagttgttttttctccatagatagtcattaatttggtgtgcttgatgggaggctgattagtggaactttctattctgccatcttgctctgca

SEQ ID NO: 30936 - DNA, 2300 bp, Homo sapien
gacatgaactcatccttttttatggctgcatagtattccatggtgtatatgagccacattttcttaatccagtctatcattgatggacatttgggttggttccaagtctttgctattgtgaatagtgccacaataaacatacatgtgcatgtgtctttttagcagcatgaaaatcacacaaagtttttaactggagagaacaaaagctgttacttgaaatatttctataaataaaggaacatgtaaaggaggactagttaaaacttgacagaggcttatcgtttcaattcaaagatgtggaaagctggaaagaatctttgctctcacttctaaaggaagaaataaaaagacaacttgttaactatttctcttgaatctatcagagaactaaaattaaagggaaaacaattgatctgaaatataagatttatcaatgttgttgcataaatcagtagtttataacttttcattgctgagtagtttgctattgtatggatatgccagagtttacagacacttttgttgtttccagtttggggaaattatcaataaagctgttatacaaattggtatacaaaatttacaatcagcttgtctatatttacttcatggagttttgatttagattatattttatgtgtagatctaatagtggcaaattggcagcttaatactgagttttgcagtctatgaatatggcgtatctctcaatttttaaaatctttaactttttcatcaacattttttggtgctattctaattgataatctagctatctatcaacttatatctctgtctatatctatattgtagtttcagtttccaattcttccttgctattaggtaggatcatgattgacctttgtatgttgaccttatatcctgtgaccttgctttgcttgcctattggttctaggagctttgagttcatttagtgagattttacacatataaaataatgtggcatatgaatagagagtaaatcactcaaaagttttattatatttttcctatttagatcattctggactgattttaaacttattgctatataactgattttatatactgaaatttctcctttatatagctactgagtcttacaacaatccatgcatactttttttaaattttctttttagactcatatttagtttgcttcaaaaactaattgctctactttatgcaaacacattattttaatatatattttgttgaaaagatagtatccagatggtatgcaaggcttagactctgacaatttcagagtcaaattggggtcaataataattaagcaatattagctcatataattcttttagtgattttataggtagtattttgcccacaatttctcaggtaagcatagtacagccagcatttatatccaaatttattatatcaaatccattgcttttaaacattatgctagcttaaaccagtagtgtaattaattttatacattttactacatgaaatgagaaggtttacaatatgattttttataattcaatgagtgctatctgtggtaaataaatagataaaaatgttgattttatctctaaattactgatctgggcacctctattttatgttttatacttaaggatttggtcactttttcaaccttaagatcaaagacaagatacagggaataatttttatttaatcattactttttataaaatattatcttctaattgttatatcctgaaaatttttcacagattctgtctttcaaatatgtttctactctccagtgaggatctaaattgcacacaatggacaaaatagttattataacaaaatccaaatataaaataaatataattttgaaaagagaaaaaatagaaagaactacttttatgttcttaagatattaatagttcacagctttgagaaatcaaagagtatctgacagtacaattactaattaacttagattcccagagagaaacatttatgtaaactactttcagggttaaggcttttaacaattgtatgttgagcagaagattattaaacactgataggctggtaagggtgcaataaaactttatgagtaggtcaatatatacctaagcagctttccttgatcattattttggcagccttatccaagtctggtacaacatagcaaagagaacaggctatgaaataaggtaagtctatggctcatatgttttttgttatttttatgttttcaactaattatattttttcttaatttgtgttagcagtattcccatctatctgcactaggctaaaatagcaatatcatatattttaagttgccattt

SEQ ID NO: 30937 - DNA, 2300 bp, Homo sapien
tgattccaggctcccagttatataaaaccaagggcaggctgctttccagggtccctcagtttctgtgctagaagagcagagacagaagagattccatccacctggggcagctctcctaagcctagggctattcatctttcttcataaattccaggcttctggtgttccttgctgcttacctgtaggtaatcaatcagcttcacatagcttgtgtgtaggtgttctgtcttactggactcaaacacgttagtaaccagtgcacagtcaacctgtttttcatacatcttatcatttgatgtcataactgccaagcttgctgtacatatttatgttccaggatctttttaatactgaaacataacaaatttaaatttgttttgatattccagattacattgaaacttctgcaaagttttattttctttttaatgtaacttgtggttaaacatttgtttcagataaataatggaagtttcatttaccccaaacaaaataagtagcagtggattctcttttcatagaagaatctagggctgaaaggctgaaattagtttctggagaagggacatatattgcttgtaataacaaaaattaaaacatactgatgcccttgtcacacttcagtaacacagcaacaagaaatgatcttactttcctcaaacaaaaatgtttaatacattgctcagaaggtatattatatctttagcctcacagaactctggttggattatttcaataagatttccgaggtaaatgggagagcaaaatttgtccctttacatatatgctcaccaatgttccacctgaagaaaaatatacacaatttggttctaacaaaacctatgtctacaattaattttattcataatacaaaatgtactaaaccttaaatacaatttttaaaaactattttaaaatatattaatttaaggaaccatattagctactcagcctcagtagagcagagcttctgaaagcaatgtgttttttcttcctaacaaactgcagtcatttatggaatattatgtcatgaggtagagagagtgggatgaaataatgaattctttttaaagactatgctactgaggtactggatatcattcttttctcagttttataatatatacatgtatgtgtaaatatatatatatatattccctacaggggataaattctagcatgaaagtacttttcagttttgtcttttatgattactatgtagcatagctaaaaagtgcaaatatttataaaagctgttcactctgaatttgttatccacaaagggataatttacccatggagtgatacattttgagtatttgttttgataatgttgttatggtaagcctgtgaacatattaagtatttcacctgtccccattgtttggaatggctatgggttgtcataaaatatgctcattttatatgactccattaaacaatggcttaacgatttctgcttgaaccggtctcagtattgagaagaaggatcaggagatgataaagaaaagtgttattaagccatacaggattacatgtgccagtcttaacagaccaaaggcttttctgcaagaaaaaaaaatgtctgtctgtctttccctgtttctctgtctctctctccctctgccatttttgtcaatgtatgattggaaccttaggtaagaataatgctgaggattatagacgtgaataacattcctggggaatttacattatggtggaatagtttacctccattggctgtaaaaataatacatggttacatttaccaccacacagaatatgagactgtatgattataaaaacagttttttttaatcagggtcatacgaagggtgagacatataaacttcatcatacattgtttcctttgaagtatgtattgaggatatagacttaagaaaagctataaaaatgtttagaggatattttagtgttgtaatgagccataacttcaagtactataaaaggatatacaaagcaagatgactgtacatcgagtacctggtgttagtggctttcataatgtaacaggtgtttagagacaccatgaagggatagctcaatgtttttaataaattttttaagttaacttgaatcaattttgtcagagccattctagccttctgagccataaacaggagttctgcattagaaacttgaaggccactacctgttctgttgaagctgatattagaacaagtggtctttattccaacacctgttcgtctctcaattctaagagccatgcacctgctaggtaagtgcttctgggaagagtgtgaatggtgggagaagac

SEQ ID NO: 30938 - DNA, 2300 bp, Homo sapien
agatgtaaaacatatatccaggcctgtctatcgaaggattttatgcataaattaaaagagagtactgtttctttgcaaagggtgagttagagttctttgaatgcttttgaaaataggttcaagatcattctacctacaattataatagctaaataactttgccttccttggacaatgtattgcattctcttcaggaagaaatggcaagagatacagagatgattccccaggctaccttctattcactttgggagttagtggaagactgccctctttccaacacagtctctgatgaaagggatctattaaaaagaattgcgttggtttacactgcagattgaatggagcattaaacgaatgactgcattagtatgactgcagtgggggtaatggtcgcctctgtaatgttgtaataatactttcacatacgtgttattacacgtattaattgttccagtgtccgtatctaatttatcgcgaaatggtatccagcatctctcaggcaaatgcccccctcccaactccctgtgccctacagttttatgccccccgcccccggcaaatgtaaacagatgaggaaatatgtgtactttcaaatcgtcacccatgtatcatgaaggtgggggattactgcaaatcacttggaaaccgctccccggaggcgtttagcgataccgcccaccaatacagctcagatgttcttaatttgatcaccctccaccttttgggctgtaattttccaaacaggcatctctctcatttgcaaataaaagttacaaatcaatccacgggtacagaatgctgacttcccgacactcaatttcacagggtgtctcttgaagagctgccaggttgtgaccgataatgggggagagggaaaggcggacagcgaaagcgagagagagagagcgagagcgagagcgagagagagagcgagagagagagagacagagagaggagagagagagagagagagagagagagagacagagagagagagagagagagagatcacttgcttccttgcttcctaagccgggattttgcctgcgatgcgcggcgagaggactgcggcggctgatttacacagttggcgcggaggaggggccgggggtgcgggggggacgcgctggcggagctccggcgatgggctgatctgggggctcccgagcgccgctcccttggtgcgcgatttgggggcggctgatggatttgcattcaggttccagccctgcgtttcctatattgactccttatacacgacctggcgctccagtttaggaggagacgttggtaagtaacgtgtaatccgattttagttatttcctaggccattaaagtggcacttttaaagcaggtcagtcttaaaagatgccgccgccgccgccgccgcgagcgtctccttggcctgaaacgttcagcagtcccctccccctcccacccccctcccccgcaccttctcccgctcgagaagtgagggtgcttgaatggtgagcggtcagaggactcactctctgccaacggtatcgcttcaccttcgtgctttgcctgagatctcccaaatccaagtggaatttggtgtgcacagccatactgtgtatttgtatcttctctccccctctccttctttccccccaccttcgccgtctgaccaatgctgggatctgagatctagtcgcccccttcctgcctcctttccgcctctccccacccttttcttctctcatctacacgccaccaacccccactcccacccacctaaagggcaaagagcaaagacaccctggaaaagcaagggctaattccatcttctcggatggaaggaggcctcgggcagggattgcgctgtgagtgacaacctttgaggaagagagaaagagagaaatccagagactgagctcaggctctcgggaacaacgaagctctccactgatccagagcaccgagattttaaatcaaaggaacctagtcctgggacactcactctgcctgcctgcctaccaaccatcgagggcatagggagctgtggtcgtgagctccctgtcgctggcatcgccgcgctaggtgcgcgccccgctctcccattggtatgcagcgaccatttccctgcaagtctcaaaggtggaaacatttaaacggattacaagcgtgattcggtagcctttcggaaagttggtggccagaagaggagaagctacaaggctacagtatgatggatacaattcagcttcgcagagagtttgcccctcctgctgggtagcccctcgcagcaaacctcggagatcctgagcgctctgcac

SEQ ID NO: 30939 - DNA, 2300 bp, Homo sapien
attaatatattcagaactctctcatcaaaatgaccttgaaaatagttccaaaaagttaaagagattcagtaactttaggagtgatgttgcccaatgtctttcagggttactttaatatcctccagccctgaggctcaaagggcatgtgtgtgatttcacacttgcccacataaaatatggtgtatccaggagtgagtctcctcaaattgggcaaccacctgaaaaggccaaaaatatctctgtgacacatcaaactactgatgcagtttggtttttcctaaatctgactgattcattatggggatgtactcctttggcaaccctgcctagatataccactttgaagcccaatttggcgacccagtgagtgaaacacctatgacaaattttctttgtatatctatgtcttcctgtatgtaaaattcacatggaagaatttattatcctagaaaatactggaaagaggtttggaattcatgccagtgagtctgaaatgctatatttaaaaagaatccattttaatacatggtgctttttattactttctgggtccctgtagatattttactaatcttaataatcttgaagaatgctgagtattttaaagaacaaatgaaaacattgtaagtatgatatatacacacacgtatacacgtatatatatataatctaaattcattttatgcagaaccaacacagttgccatactaaatttagagtgtgtgtatatgtatatatcccaaaaaattccacaggcccctggctgtctctgtgaccaactccatcctttcctatcttttaatgtaggtaatacggacactaacttgtggtattatatgtcaataatatgaactaacgatggtataaattatagtatatacaaaattcactaaataaagatgtaaaacatatatccaggcctgtctatcgaaggattttatgcataaattaaaagagagtactgtttctttgcaaagggtgagttagagttctttgaatgcttttgaaaataggttcaagatcattctacctacaattataatagctaaataactttgccttccttggacaatgtattgcattctcttcaggaagaaatggcaagagatacagagatgattccccaggctaccttctattcactttgggagttagtggaagactgccctctttccaacacagtctctgatgaaagggatctattaaaaagaattgcgttggtttacactgcagattgaatggagcattaaacgaatgactgcattagtatgactgcagtgggggtaatggtcgcctctgtaatgttgtaataatactttcacatacgtgttattacacgtattaattgttccagtgtccgtatctaatttatcgcgaaatggtatccagcatctctcaggcaaatgcccccctcccaactccctgtgccctacagttttatgccccccgcccccggcaaatgtaaacagatgaggaaatatgtgtactttcaaatcgtcacccatgtatcatgaaggtgggggattactgcaaatcacttggaaaccgctccccggaggcgtttagcgataccgcccaccaatacagctcagatgttcttaatttgatcaccctccaccttttgggctgtaattttccaaacaggcatctctctcatttgcaaataaaagttacaaatcaatccacgggtacagaatgctgacttcccgacactcaatttcacagggtgtctcttgaagagctgccaggttgtgaccgataatgggggagagggaaaggcggacagcgaaagcgagagagagagagcgagagcgagagcgagagagagagcgagagagagagagacagagagaggagagagagagagagagagagagagagagacagagagagagagagagagagagatcacttgcttccttgcttcctaagccgggattttgcctgcgatgcgcggcgagaggactgcggcggctgatttacacagttggcgcggaggaggggccgggggtgcgggggggacgcgctggcggagctccggcgatgggctgatctgggggctcccgagcgccgctcccttggtgcgcgatttgggggcggctgatggatttgcattcaggttccagccctgcgtttcctatattgactccttatacacgacctggcgctccagtttaggaggagacgttggtaagtaacgtgtaatccgattttagttatttcctaggccattaaagtggcacttttaaagcaggtcagtcttaaaagatgccgccgccgccgccgccgcgagcgtctcc

SEQ ID NO: 30940 - DNA, 2300 bp, Homo sapien
gtgctcactaaacaagccaaatccaattaattcaacattttctgtcccaaggaggtctcatggaaatttgaatggagaaaaatggagagagaactcaatcacatggagtgcagtaggagccatgtaccaaactgaaaaggctgtagtcacatcaggtagtgccatttttatgcctcaagtacacagttagtttgtgcaaaataacattaccattaaatccatttaatgttaattttatgtgtgcaatactttaaatatgttttgggacaagctaaatctataaggagtgtatacctaaatatgtatttatttggatttaagaaactgtataataaaagtaacttaagtcattactggtggtgaggagaatactttgcatccttccaagggaatattcacatttctcaagcatgagaaatgctgctatagtctatgtgtactctctgtggtcttggggtttgttacagtgatggggcaagacacaagaatcaatttgttccttcaggagttggtaaatatttttgtaaatgaccaaatagtaaatatctggggctgtgcaaatcagagcctctgttgcaaacactcacatctagcaaaaatgcagcacagacaataaataaatgaatgggcatacttgtgttctaacaagattttatttacaaaaacaagtacttcaccagattggatctgtaaagtaaactttgctcacccctaaaactacctgagtgggacatcaggagatgcactaataaaatatttcaaaagtcaccaattaccctagcttctacaaaggatatcctagtactattaacatagtattccaaaagaacacaagcacaaagctatcaagttgtttcttactttaacttagaaatggcttattatttaaagatgctgaataaaatctaccagaagtaaaagagataatattctcaacacatagaaatgataagtagcggaggcgatggatatccatacatgcatacattctatgactataataaaatatcatatgtactccataaatatacacaaatattaagtatcagtgaaaaaatttttaaaggtacattttatacacatcaaaaacttaacagtgacataaattagccaccttattaaatatttaaaaataaacattcaccactcctaaagccagcatttcatttttctcccttaaacataaattttcagaaacctttatggttatgatctttatgaatttggctactttttttggaaaacagcaatgtgctaaggtaacacattttagtaatgagagcaaaccacctctctaatgtcagcatgaatgtttctaatgcattctaagtaccctggttctgaacaatagcttcacatattttgaacaatgattacctttagaacaaataaatataacacatcaggcactttctcttcttgccaactcaaaggtattaattgaaaagcaataaagataaccaaagaaagtacatactattttttaaaacagatttcatattaaatataattagttgatactttgtgaaaaccagataattcaattctttcagcaaaacagcatttcttctactcaaaatacatttatggtattaggaggaaatcctgatgcttaaagaagtttaatgaatgacatgtgttactacttaagcaattttacagcaaaggtaatttgttgtatctaatggtgtacatgattgtgttttattttgtttgtaaaacagacataaagtagtgaatcatttatatcaatgtctaatggtcattacttccactcagctaaattttgatgtttagctttccattttattttttaaattctttatagaggattgtaactttctaatttgccatactcatttttctttattttcccctctgatataattcagctgtgtctcaccaaaatctcttcttgaattgtagttcccaaagtctccacgtgtcatgggagggatctggtgggaggtaattaaatcacgggatggtttcccccatgctgttctggtgacagtgagtgagttctgatagtgagtgagttctgatggctttatcagcatctggcatttcccctgccagcattcattgtctctcctgccaccctgtgaagaggtgccttccaccatgattctaggtgtcctgtggcttccccagtcacttggaactgtaagtcaattaaacctcttttctttataaattacccagtcttgggtatttcttcacagcagcatgagaatggactaatatacctactgttaccttattacgtttatactttcattctttcttttgcctgttat

SEQ ID NO: 30941 - DNA, 2300 bp, Homo sapien
attgccaacttgtgtaatcagttgatgttgctagttagccagtttaaacatgcgttaaagataaagatctgcttgaaaccaattattttattgtttggcttcctgtttaaagatgaaaatgaaatatgtgtatatatgtgacatattttacctagcagtgagtagatgcaggaagcatgtaaaatgctttgctgaattcactaacgtcacaaaatattccttaataattgccgcgtttgataggctgaccttatgctagcacaggaaacaatgcagtggacttgggttggagagaagaattttgacatttggatttttaaaaatcatgtatattgaacccatgaactctcatgtggaacatcagatttactatattttaaacagaaatgccatcactataaaaaccattgcaaatttgtcaatatacttccatttaaaaagccttttcctgcttttattgatttattgattaatttttttttgagacaggatctcactctgtcacccacgatgaagtgcagtggcacaatcgtggcttgcagcctcgacctcctaggctcaggtgatactcttacctcagctacctcccaagtaactgggaatgtaggcttgcaccaccatgtctgacccattttcttgcagaaattgagttttgctatgttgtccagacttgtcttgaactcccagactgaagcaatccgcccacttaggcctcctaaaatgttgggattacagtcatgaaccactgtgctccacctcctttttctccttttcagatagattatgtattctgtaccttttgtgtaactaacttgttattacataaactatattctaaatacattataaattattgtgatcatgatatttatcattgaattaacactgcctaagtagcaattttcacagaaaagataattttaaaagaccaaaatggttattctcttggaagcagttgacataaaataacagaataatacagattaaaattctgttttccaacagctactagtggtaagaaatatagtaagcttctgatttgtagaaaccttagctttctcatctgatgaggtggttaataatattaactctcatatttgctgaaataatataaaatatttaatataaattgtcaattataatgactggcataaggtagaattacaacaaatgctaattatatttgcttgtttgaaaatttaacactctattaaaaggcaaaaaagtgctcacctgcaaatattaatacatgccttctgtttagtccatagaaagcccacaagtaagagattcaaaagtgaaagctatcacttacagaagattaagaatatattgcattgagaagatagggattaaggagtttatcaaaggttttttaaaaaattattttcctgaacatcatttcaagaaagataagcgccaaagacataaatatattctccagagcatgtgcactgcaagttgacaaatgtgtctcttttatagagtttggtgaaggttattcattttatttttcctgtcttgaccagaaaattgtggcttctcatcatgtatgactgcctgcagggtcttctgaataggaaattaccaatgctgaaatttgtatgacttaaataagtgttgaagtgtgggggttgaaaggagatacatatcagagacatccattcagttaatagaactaagtttttgatttgcatagcttatatctagagcattgtgtttcttattttctatattactatcttctctaactatataattagcacagattgaagctataatggatttcaataatagcactactttagaatgatgtatacgtctttaaatcttaagacaagcataggaaatatgtatattcttaaaaaaaggaaaatttttttaaagtttagagttaaaagaaacatgcattttctgttacatttcagattattttagttaaagaatcttctatgctttttttcttcattcttagaagactacctgcaattgtaaagcatgaatcctgtaatacttctgtaaatgaatcactattgcatttataccattagcctctgaacagatttcaagttgctgctgccaactctcgcgagctttgtcagtaacagttgattgttacattcagtaacactgaatgtcagtgcagtccaatttacaggctggagcagcagctgcatcctgcatttccccgaagtattacatgattttcactccttgcaaactttgccatctttgttgcagagaatcgggtaagttgctctgaatttacaccttcgtgtagagatccaagttactgtaaa

SEQ ID NO: 30942 - DNA, 2300 bp, Homo sapien
ccactgatcagcatttatgctatttcagtcttttgccagtatatgctaaaatataaagtataattttgaataatgtggttttgcacaaatgtaagtatatcagtatgataaaatcctgaaactcctagataaaaaattatgcatttgtaatgttgatcaatgtgggcaaatgtctgtaacattttaattggtttccttgcagccaaacacactattttataatttccctctctttgccacactggtatatgggactttacaatggttttacatgtccaatgggtttaagctcctctgtgcagcaggcagagcccttgatattcttcccctgcttcctttctaccctttatattttctcattctttactttttgctacatcaatgcaaactgcttatagttccatgccaccaatgctgtttgactcccatgtcctagcatacgtatcatttcctttctctggaatgctgcctttggcactttttgcttatggaattcttgttttatctttcaaaatccaattcagacatcatttcccctgagttttacctgcttcttgcacctttttctgttgtggacttattaacctgtgtttctgtggccaacggttagcatggtgtctagtgtctgacaggtcctcagatactttttgctcgtatttaaaatttcttatatacgtctttaacaatataccctgaattgtactctaacaagctgcctgtttatttttcaattgcgggctgaacatagagatttatactctcatgtcttaaaagatacacatggatatttagcaatttgaccagtgtaggtaatccacatttgataattcagccattggtgtgggttttactttgcttgggtttcctaatgtggctgttctctctgattcactgcatagcttccaaatacttccttcattttcttgtgtgcttggactggatttatattttgtactgaattcatctctccacaaccatcattaatctgaggagcatgcattgtattacatgcatcgatgaacttcttcattcattccactgacttttaatgaacacctactttgtgccaggcacaggtcttggcactaagaaaaaagacaaaatccacaacttcattatatactaatggggaaggacaggcaataaataaacatatagaataaagtcacatgggagtaagtaatgggaggaagaataaaacagttaaggaattattaaatgggggaaagggggcctattagttttagaattggtagtgaggaactctctgagtaggtgatatttgagcatttcattgagtcaacaaaatgagggaatggctatgtaaagatatggagaaggctcattccaggcattgggtatagctaatacaaggccctgaagaggcaatgtgcttgatgggttctcagaactgcaagaatgtgagactagctggtacagggtgaatgaaaggagaatggaaggaggtaaagtaaaaggcaaggaaatacaaggttgtgtagggcggtgtaggtcctggtaggaacttggggtttcatagacagtcaacagagagttttgagcaggggaatgtctgatcagatttacattaaaaaaaaaccctgtttttttgatatgagaaggttgcggggagtaggagattggaggcgtagggagaatggatacaaggcaattgcacctttacagagagaacactggtgaacagcataatgataagtcattagttctgtaggctgtcatcttcatgatttctgaagagaccatttataattgccaatagagttttaaataacagagtaaagcatataaataagcacaacttaaaaatattctaagtttaaaaagtctgatttgtgatgactaataattagttctacctgtattttaaaacacagaatttttttattaaaacaatttttgtgggtaaatacagaaaatttaataaagcatgcctatgtatccttttaattaggtagaaattacaacgatgaaaagagcacaacgtacaaaaccaagaaagagtctgttgtgtgaagggtcattcgatgaagaagcttctgcacagtcctttcaggaagtgttaagtcaatggagaaccggaaatcatgatgacaacaagaaacagaatttacatgcagcagtaaaaggtatggctttttttttttttttttttttgagacagagtctcactttgttgcccaggctggagtgcagcggcgtgatcttggcttactgcaacctccaccttccgggttcaagtaattctcctgcctcagccttctgagtagctgggattacaa

SEQ ID NO: 30943 - DNA, 2300 bp, Homo sapien
acgcattttacttcagtggagagaatatcatctctctagagctgtaattgttttgacatgtttcatttcattttgtcactaatcatcattctgaaagacaagcacttcatactttttattttactatgtgacttagcataggcttagtttttgtctctgctttgccttttcataactgtgcataagctatttttctaaatataagataatgttcttttaatgctttcaaaaagtgcaagaatactttatacattatttttatgagtttaattttactattgtgtaagtaaatgcattgtaagaatcattttttggagtaaaagtcctttgtagaagtgaggagaagttatttgcaaaataatctttactgggacataattgacatgtgtttactgttctctctggactgtttcttcctctagtggcccatgtctttctctttccttgcattcagatacttccctggccatctaccctaaaacagaactcaattagtttctatttctttatttggctttagttttcttcatagcagctgacatgcatttatacttgtttattgcctttctgctcctgttaaaatatatttgaaaataggaggggctttgacgatttcttcactccagtatttttgggatctaggaaatggactttcaataaatatttgtggaataaataaataaatgaatagatcagtaaatggacgaaagctgaaaatatctttggtaatttgaagagcgcgcctgtatgggaaatagtctgtgcaagaaaaccagtagtatcgcacatccacctgaaactagttcttgtattaaagttaaaggaaggacgtggtaaagttataccatgaacacgttaatagcaaccatcatagccacaccagcaccactgtttcttactgtttattaagcactcaatatgggcctggcttagagctaaatacttaatatttattgtttcatttactcttccatactacattacgtatggactaactgtactgttatctcatttaagcagttagactgagcattgttacttgctcatggtcacacagcaggtaagttgtggcagtactggcactcaatcttgaatctgcctgactccaaaatccagacttataaccagaagactaccattgtcttctcttatccatagtggttgtaatcttatataattgaatatgccaagtgaaatcattatttttttttaaatgggtattggcaggcatagtaatgtcaaaagtaatggtgtaaagattagtacattaactgtaatagttaggattgttagtctggtaccgagacagatgcaatgtggttaagcatagaagcctatacagtgcagtaccaaccacacatcctacttgcagtatttaaaaagggagataaaaaacagcatatttaggaagccaaagataaattcactacaggtgcagctttgttcggaagagttgagttgagaattgtgggttaactgtgtgtgtgtgtgtgtgtgtgtgtgtgtgtgtgtgtgtgcatatatttgcttttgctttttgttttatacccattagactccacgggtcatgtattcggtacaaagaaaagagagttctggacttttgaagagacctggaatctctattgactttgcctatggtagccattgataaatcatttaaacatagcataaatgtgggagttctgagactaaactccttgaattaatttgtaggtctgccatttgctagctttgtaattttggattaagatagtcaaattttttgtgccttaatttttttagatttaagctggcttgctatgaggaagaatcaaatatgacatataagtctctcacttgtgcttggaatatgacacatgctcaggtttagcacatacataatctccaagatcctctctggcggaaagcttccagagcctgttgagtttttccgcccttttccttcctgtgatcaccattctctctcatttcgcaggctccttttcgccctctgccggcggacagtggcagaacccagctttctggttgctatgggtaccgaggtaacgcggtaaccaaggagaccaagacggaaactcccggcagctatccgcggccatccggcggtggtgacgcgagaggctggggtctccaggtgggttgtctgtctgcgggtggatgagaggggaggatggtctctgagtccgcctagcgggcagcaagcccgggctagttggtgcggggagcagagcgggcagcgcggctgggaagcagactcagctcgggtggagctggaggcaccggcccagcaagtgttt

SEQ ID NO: 30944 - DNA, 2300 bp, Homo sapien
tcataattttcaataggctaccttgtttgtattacttatatttacactaaatataatttaacattttcttttgtcagaacattttcctattatcactcaaaatttaggaacaatcttaccaaaaaaaattgcctgaaatgagtccatgcttaaatggaagaattaacttttaagttctttactgatgagggcatttgcttatacatttttaaagtttggaattaagtgcacttttacttgaaaaaactataaaaggataagaaaattgatgagatgataactgtaaccctttgctgtggtttttatatatattcctaggcttatactttacagtcggacagtaatggcgatcaaccttctaccaagacacgttggctctcattaatgaataattctccccccaccccgattttctaggagcaaaatagaattgtagaaaaaagcggtttgggaaaatattttaaaaatttgtggtaatattttatggacaattgtattgtcgtcattgtctattaaaagaggttaaaccagggagaataaatttatggctattgctttttactcctcaagagacaggaaaatgaacattctgcctgaactgctctaatataaggtccttacagaacaatttcattaaatggtcttagtaggacagagtgacggtctctgccattggtaggaaaagtaatggactatttctggataaatcacattgtgatctgagcagtgtacagacataatgatgtggtagccaagggtactggtgatatatgtttgctggtgtcagtaaatgggtagaaaagcattgattgaatgatagtcttgacattcagacttaatatttatgtattgcagtgtgaagcaagtagaatgatagtattcttgtattgcacaactctttttggaaaattatctctgtgttaagttaaagctacactagagtgtgcttatgatagagtaggtaatattagaataaaactcaagatctagaaaacatttggagatgcctatatgggaaatcaaaaaattttagttaattagtagattatggcctataatgatctattctcaggcctatttttaagttatagccatgttaggacatggaaagatgttaacagggtcctctgacaagtttttaaaaatgaattccatttaaagctatctatattcactttatttcttttacatgagtttatcagaaatagtattaaatttggggatcaacagatatttaattaaaagtgaactaaattttttttctcttctcaaaggctatagataaataatacaatgtgcttaatatctgattgccattgaggtgattgatttgaactacaaaaatgagatgaaacccattaaattatgcaattttttattaatgacctttttgcaaagaaaatcatgtagagtttcaaaagcacataaaggtaacagcaatttttatcatccaattacctatggctaatagtattgtcctgatatattttggcaaatccattatcttttttgctggcctttctgctcagaataaagaacatatttcttcaatatccactctttttcttaaggattcaaatggaccttatatccacaggaaactcctctgactattgtataatttgatgaatgttgagaactctgtcaatgcagcagtgatttgtctctgtattctggacttgatttagctttattctttttctcataggcattctgaaatatttatgacaaagtgcattggtaatctgatgtaggagtcctgtgagaaacaaaaagaactaattactagcaaatttacaaccagtagcgcatcctttcaaattctgtgcaacttttaaaagaagcaaaataatggataaaataataatataaatttaatacttttaaaaaattctataattgtttttttctcaattcttgcacatttcatcagttgatcattaacccgattgtgttagttcttaatacaaatgtagtgaacacctgcttttgttctagaggaattaatcaagcaatggtcaagataaatggagttggccttgatcgctcaggtgtttatgtacaagagttttccagcaagcgtattttagttgtaacattccagtgaataatcagaagtcagtttggggtaagtaccttagaaataaatagcttttgaataagtatgtatgcaataacattgcctatgaatgtttagtagagtatggaatggcatttcaatttactttggtgtaaaaatcatttgaatttatttaattaacatatcgcttttattctccttaaatgatttcaccacaaat

SEQ ID NO: 30945 - DNA, 2300 bp, Homo sapien
aggtttttcactccctcagtagcctgttaattctgtaccactactgatagcaccaacactcacacctgtgaagctcatctttctgttttcttcctgggacacttagtgtgactcaccctctttgaaatgaagggagccatgagaaaatagaagaaaaggaaaaacaattttttaatgtctattgaatctaaagcaacctatttcttgagcaaggatttagtgtttgccctctactatccattggtaaatgcatgtcatttatgtgtcttgaaggtgtttgaataagaatttaatatctgtggttatatgaacttgacctcatttaatgccacttcttttattttaccaaaaatacatatatacatatatacacatacatacatatgtatacatatatatctatccacacatatatagatacatgtatctacacacacatatatacatatatatgtatacacacatgtatatatagacagacggagagagaactgtattagttttctattgctagtgtaatacatgagcacaaacttagtagcttgaaacagcacaaatttattttgtgttctgtaggttggaatttgacatgagtctcatcctttctggtggctctgggggagaaaccattcctttgtcttttcaagcttccttggatcatggccctcttcaaagccagcaagactaggaagagtcctcatattgcaccactctgatcatttttctgcctccctctttcacatttaaagacccttatgattggactcacccaaataatccaggacaatctcaccatctcaaagtccctaatttagtcatatctgcagaatctcttttgccacctaagataacatattcacaggttctgggaattaggacatggacatctttgggggactactattctgcctacaacaaacacttactaaatgccaagccttataccagggactgaaatagaacccaacccctttcctagaggagcttacaatttaggagatatttaaacaggtgactgaaatacaaaataataggtgctatggcagaattgagaaccaattatagcactgtggaggaaacaactgtctgcctggtattgagggtgagctagaaaaaaaattggctaaaagattacaattatctttgacatattgaaatgattttatcacttttcatccaggttttgagactctgggatattcaacaccagctgtccatccagaggatagcttgttctttccccaaaagtcaggacttcagatgtctcttccactttgatgaagcccatggacgacttttcatctcgtttaataaccagctagcattgttggcaatgaaaagtgaagccagcaagagggtgaaaagccatgagaaagcagtcacttgtgttctttacaattctatcttgaagcaggtaatgatgctttcttttctttcactctcctaacatatctccaagtccagaggctcatttacttaattcagtttaaggtaaaatgaaagacaaatatagtaaaggcaaatatgggaagaaatgatttaatagccatgtgcttttctgcaataatatacattcaggtggacttggagaatgatttcattttcagccagtgaccacaggagcagtgatagagttataaggaattacagcattccagctaaaacaaaacaacctgtaatataattgaacttatctttgttatctgctagtcttgagccaaatgcaagtgaacctgcttgtaaaattctatgaacaccatcttccggtatccctgtggaaagttctgaaatatgcatgaaacataattagcagagatccattttgccagcatattttacaccagtggttcacagtggcagcccagaatgtattcataataaaatgattcagttaaacatgatgccacttggtatgcagcacaagtgttgtttgtctccccaccagtttaatgacgctccgcagccttggcttaggggaccactacctgcatctcaatgaagaagcagggctcccctggagcagagttactgcgcagaccacagcccttcttggaggacagggcggcccaggcagtgaagccagtgagctcagtgtggggcagcctgtgggtatcatgaagggagcaagcaacatcagaggttagcctgctgcagtgatcccgtcaggcctgatggtaacagcacagcaggagccaagcagaagcaagtctccagcttacagccaattaaacagtaactcaatccattctttcttttcccttctgcagaagcttctgcattcacatagaaatgactagtgg

SEQ ID NO: 30946 - DNA, 2300 bp, Homo sapien
attggcattaaagatgagctagacggataattgccctgactagactgtaaagcccttatggcaggcaccaggtcacaattcaggacttgacatatattaggcatatatatatatagagagagagagagatagagagagagagagagacagtgtctatctctgtcactcaggctggagggcagtggcgtgatcttggctcactgcaacctccgcctcccaggttcaagcgattctcctgcctcagcctcccaagtagctgggattacaggcgcctgccaccatgcccagctaatttttatatttttagtagagacggggttcctccatgttggccaggctggtcttgaactcctgacctcaagtgatctgcctgtcttggcttcccaaaatatggaattacaggcatgagccaccgtgccctgcctattaggctcttaataaatgttttttttgaaagaataatgagagatggatgaaaaaatgaaagcatgaatgaaacttcatttttttctataatgggtacaggaactcctacaggatgctcttctctctgttctgtaccatgcctctagtgaacaccagctcagagaatgttagagccggaagagaccctagagaagatgtaatgccaactttttagtttacagaagtgaaaataaagtgcaacgggcacatccatctaaagtgcagtgatacagttgggcagtgtccccacccaaatctcaccttgaattgtaataatcctcacatgacaagggcgtggccaggtggagataattgactcaagggggcggtttccccatactgttctcctggtagtgaataagtctcatgagatctgatggttttataaatgggagttaccctgcacatgctgtcttgcctactgccatgtaagtcatgactttgccctcattagctttctgtcatgattttgaggcctccccagccatgtgaaattatgagtcaattaaacctctttcctttataaattacccagtctcaggtatgtcttcattagcagtgtgaaaacagactaatacatgcagtatctgaagtttgggagccattctgttctcttccgtatgttactatttgtgtgacctttggcattttctttgctttttttttttttcttttttgagacagggtctcattctgttgcccaggctggagtgcagtggcacaatcttggctcactgcaacctctgccccccaggttcaagggatccttctaactcagcctcccgagtagctgggatcacaggtgtgcgccaccatgctcggctgattatttttgtatttttactagatacaatgtctcgtcatgttgcccaggctgctctcgaactcctgagctgaagccatccacctgcctcagcctcccaaagtgcagggattacaggcgtgagccaccttgcccggctttttgcttctttatcagtaaaatggggataatgatcacatctgccttgtaggattgttgtgaagcttaaacaagacaatgaacataaagttttagtgcctggcacatggttaatactcaaaaaatgttaatttttcttctttttctcctccttttcattattattagctgaaccagtaatgacactgcaagcaattttatcattagatttatcatattatgttatgctgtgtttttttatcacattttcaacaagttggaagcttttttgaaccatctctattttatatacatagaaactaagacaaaaagaatataagaaacagattccttttatataaaaataaaacattttctgtgtataaaacataaaattccagaatttcatgcttttctctttgactaatcatatagtttcataatatatatcctatataatggtaaaagttgtctttaaataatacaagatgtcgtttaataaaaaatgagtggaatgaactgtccttttatttcaaaaaaaaccatttcaacatttacattatatatttaaactttcagttggagagggggaagtgaaagggaaagttttagttggctttgtgttggttgccaggaaacatacaaaaggatcagaacagatgaaacaaacaactccacattgctgggaaggtggcattcagagtcaagtacttcattggtagggaaactctgcagctttgtcatctaactcttccagacaagaaagtggaattgaaaactacaacatgttaatggaagcaaggttagttaaagagatttttgggaaggtgcttttctaatgcatttaaaatgaggattggaagttgttttctgtgtcagttactataaatgtggg

SEQ ID NO: 30947 - DNA, 2300 bp, Homo sapien
tttctagtaatgggcacactaaactctcctaacgctacattatttgaaaaaagtgtagttttgtgaaagaattccaatcccactattatcagttttacaaaatgagagtaaaaacagtcctaaggtagaaaaagaaaagaatattcttctaaggatgggatatattgtttaactgttgttctcccatcctattacctacccgtaaaaatgaactgtgagagtagagtctatcatttaatacacccctaaaaaaaggggaaaaatctgtaaaagttgaaactggccatttttattttttccaaaaggatctttcctttattgaggaatttcactccggttcaagaaacaactttttatctcacaatggcttcttagatatactatataaaatacatttactttgtaacttcctccacccttttcaaaaagcacaaccaacgtccctactctaaagctggactcgaaccgaactagattcagaaagtctgtccctacgtgtgtgaccttgggcacgtcatataatccctcggtttcctcatcagcatcccaaaatgaaagcgctctgaaagcagtaaaggagtaaaaacataccttaggtatgacacctaagagggtcaagtctttctgtttaaggcaaaattatctccttagagggccacatcattaaactggaactgaatccgtagaccccaacatttgtctcttccttcttccagtgctcctcttccctcaaagggcataacccgagtcacccccaagagccgactcccaagcaccctttccttcctcctcccttttctcttacttacaaagcagggggaaaacagcagcctcacctctcggtccgaagccacaccttcaaaggaccccaccccaggcacatccgccctgtcccctctcccggggcaccaggggccaacctcgcccttcccctcccgcccccacctagaggagacttcctggaggcgttcgggcccaagccggcaggcggcatttacaaacccgctttacgccactcgcgtagggtaacctcgcttacgcccgtagggccccgctctcagccccgtccgctccgcctgccagaaccaagcccaagtgcctcagccatggcccctgcgtgaccctagacctcttctgctcggtgcagagctacggggactgggacagaacagctacaccttaccagcaactgaggcactgacttcacttcccaccttgcagccctcttcaactcccggatcaattcactccggcgacgccggaaggacccaagaggaaccaggcgttgtccggaatcctgcccagccggagtcgtgcagaggcttatggggactcgtagtcccgctcgccggcgttgtccgcaattcctgcaatcggaagactacacttcccggcaggccatgcgggggatcctgaggcgatgggtggtgacacttctagccaatagtaggagaattccctgcctttgcgggaggaggtgagatgaagagagatggtgcacggaaaggagaggaagggcggggcaagccctcacctgcgccaatcagggtgcggagtaggccccgcaggcgcctcacccattgagggggcgggctgacagagcagaggaaggaagggggtgaggggcctgtggtggggatcctggggctgtcgggctgagtatgccgtgtgggtggagaggaagcctcggggaaatcgcccaggtgaagggagggcttggtgtggggacttgcactgggcagaggggcagcttccctgagagcagctaagccccaggcacaccgggcatccggacacacaggtcggggaaggataggctgagccggggctcccagcagagacgcctgggtggggcaggaggccgctccaggtgtgagccacagaggaggggagagggacccccacgggagtggaagtggcagagcagctgcagaagtgcagggagcggaaaggtaccagggcagctgctttccgctgcctccggtccgggcagctgcagaaacagcagggggaggagcaacagctgccaaattcgccaactagaggagggagaggcggagcttgggtccctgtagaagccagaggcgcagtctggactgtagtttcccgggagagacgaaagcaggaacgagagcggagcggagcacagtccgccgagcacaagctccagcatcccgtcaggggttgcaggtgtgtgggaggtaagcgtgggtccttcttcggggcgtctgcactgccctggagaaaacgtcttccaataggaattacatcaagacacagctaaaagagtccgcgttggg

SEQ ID NO: 30948 - DNA, 2300 bp, Homo sapien
gaaatatgcaactgtcacaatgaaagcatttcagagcaaaatttgctgcaatatgctactatgattaaaagccatgtaatctgggaacctctgtaacaaaatgaaaatgaactaggaaaatagcttcttactacttctctaaaaataaaaggctgtaattttgtcataattacacaaaggtaggtgagactttcatctttacccagcattacaacttatttccatccataggtattacaattaacgttgctttgaatgcacatatagtttaataccgagaataaactattattttatgacactacatgtgttttaaactgaacccactatcataacacatattaagggtagtccttcagcacatactctctacccagagaaaagattcccacacagctttccatgtactcgtttttaaaatgtacacatattatcggacacaaatgagaaactaacgagcagcagtgaggtacaccatatgtttccattgtaggctgaatccaggtctttgttccaatattccagagccactgggaagaaagctaactatccattcattaaaattcatttttacattattgctggcaaaagttatacttttgatagattaagtcagagcccatcctatcctgactattcctgcctgcacttgcttctttaatacggatttcttgcaattctaggaaactgcaaaataaccaccctggataacaggtcggtagcaggacaatctgataaaccaacgtaaagggtagacactgaagaagaatgcaaagttattttcctagtgaaatagttcagaagttattctatatcaatagcaaaatttttgctttttataggctacgcacctataacatccaccagataacatccacctcgtcctcaattagcaggatttttctcaatcttcagatctcccagaacagttttactggtgcaactcaaaccaaaaacactaaccacgccctttatacccagagtcaagcttccttttgcttttttgcccttaaagtcgaaaaatgtaaatctttcacccgagaggttttgcaccggtttcctaacccaacgcggactcttttagctgtgtcttgatgtaattcctattggaagacgttttctccagggcagtgcagacgccccgaagaaggacccacgcttacctcccacacacctgcaacccctgacgggatgctggagcttgtgctcggcggactgtgctccgctccgctctcgttcctgctttcgtctctcccgggaaactacagtccagactgcgcctctggcttctacagggacccaagctccgcctctccctcctctagttggcgaatttggcagctgttgctcctccccctgctgtttctgcagctgcccggaccggaggcagcggaaagcagctgccctggtacctttccgctccctgcacttctgcagctgctctgccacttccactcccgtgggggtccctctcccctcctctgtggctcacacctggagcggcctcctgccccacccaggcgtctctgctgggagccccggctcagcctatccttccccgacctgtgtgtccggatgcccggtgtgcctggggcttagctgctctcagggaagctgcccctctgcccagtgcaagtccccacaccaagccctcccttcacctgggcgatttccccgaggcttcctctccacccacacggcatactcagcccgacagccccaggatccccaccacaggcccctcacccccttccttcctctgctctgtcagcccgccccctcaatgggtgaggcgcctgcggggcctactccgcaccctgattggcgcaggtgagggcttgccccgcccttcctctcctttccgtgcaccatctctcttcatctcacctcctcccgcaaaggcagggaattctcctactattggctagaagtgtcaccacccatcgcctcaggatcccccgcatggcctgccgggaagtgtagtcttccgattgcaggaattgcggacaacgccggcgagcgggactacgagtccccataagcctctgcacgactccggctgggcaggattccggacaacgcctggttcctcttgggtccttccggcgtcgccggagtgaattgatccgggagttgaagagggctgcaaggtgggaagtgaagtcagtgcctcagttgctggtaaggtgtagctgttctgtcccagtccccgtagctctgcaccgagcagaagaggtctagggtcacgcaggggccatggctgaggcacttgggcttggttctggcaggcggagcggacg

SEQ ID NO: 30949 - DNA, 2300 bp, Homo sapien
atgaagtgacagaccccagtccacaaatgaagatggaagcactgataaggcctacttgttagaggggaaagtagagtaagtgggcagctagatgtgagtaggtggatacatgcatgatagtaccctgtggaaatccttttctcattgtttaggcgagagtaggttggaggcagaaataagggaaattagaaaaaaaggaagaacaactgaaaatcatctactagactgggtgggatggggcaggttggagaatggttctgagaatttagtgtgactgccagacaacaccttgaggtgagtggttatacattttggagtgagaccagtcagcataatggtgcgtttatctttttttctttttctttctttctttcttttttttttttttttttttttttgagacagagtcttgctctgtcaccaggctggagtgcagtagcactatctcggctcactgcaatcactgactccctggttcaagcaattctcctgcctcagcctcccgagtagctgggactacaagcacctgccaccatgtccagctaatttttgtatttttagtagagacggggtttcaccatgttggccaggatcgtctcgatctcctgacctcaagtgatgcacccgcctcggcctcccgaagtactaggattacaggcataagccaccgtgcccggcctaatggtgtgtttttcttgaaccacattttgcttcacagaagtaggtacaggtaagtgaggagttgagagtgtataataggaacattttaaaatatgaatgcctgggccccacccactttcagatattatttgtttagttgaggaagggcctggacactggatttttttaaaagcacccaagataattctaagcaaagtcagagttgagtcgctggagtattacatagcttttgcccaaagcagttaggagtctggatcaattgttgtgagttataaagctaaaaaggtaagtttagttgtgttttattcatttttggataatcttggcctagaatttttggacttgggaaagttcccaggatgcttaaaaaagataagagtaaagaaaatgtatgacattggttctgtagtttataggcatacacacacacacacacacacacgagagagagagagagagagagaagaaaagaaaggaaaatgtctaacatttgtcatctctgtccctatcacgggaaaagtatccagaaagtttagatgtaatattttaggcatttgaaaatttttaaaaattatactaacttaggccaggcatggtggctcacacctataatcccagcactttgagaggccgaggcaggtggattacatgaggtcaggagtttgagaccagtctctgaagcagtaaagactatgggagagtttactatgattttggcagacagcaatttcttagtacacaaaaacacagctacattcttctatttttgggaaaggagacatacaactttcaagtttagaggacattcgttttatcagctcatgaagttaaaaattcacagtgctatctatgtacacagcagacactcagagcaggatagttggatcaataagtaagtacacatatactcctttttttcctgaaaagttgtaaaaaatttgctttgaaataaatatctattatttatttcttgttatgaacaaggcagaattcccagtcttcaaatcacaggagttttatttgagcaaacttcaagcaagaattggatatcttccattttgcttctttttctacagaagagaagcaagaaaccaaatactgggggatatattgcacaagtataacttcaagaaacccaagccagtgcaaacaattcaaaaaataatggaacccgaagacagcgaaccttccagggatgctatggacatttatcccctctgctaacatttatgtttctgtagttgaggttcagttatatcacagtttagacaactccctagaaacaatgatccctgttaaagctgctccaggagcacaggaattcctttgatgagctctaagagattggtaacaatacctcctgaagggccgtgttgctaggtaacagcttgtttccttggtcacagtgaatccgtggaagacccccaaaagaggctgcagattcttagtggacagctctcatatcccctccagggaaaatgatgaaaaatgtcttcagaaaaatagctttatgaaggcaagaggactttttgcacctgcaagacatgtctgaaaggtaagaaaattaaattaaaagtaaacttcatcattagttgagctagagaaaaaagccaaacaaa

SEQ ID NO: 30950 - DNA, 2300 bp, Homo sapien
caggctcaagggatcctcccaactcagtttcccgagtagctgggactataggtgcacgccaccatgcccagctaaatttttatatatttttttttttgtagaggaggggttttgctatgttgcccaggctggtctcatactcccaaacttaagcgatctgttcgcattaacctcccagaagtgctgggattacaggagtgagccaccatgcccagcctaaatttggatagtgtttttggaggaagagtttgtttaacaaagtactctgacaacagtaaggaatgtttagttatgaggaattttaaagagattccagtaattatccaatgttaatttctgagagtcaaactaaaaaagaggaatttaaagtggtagatttaataataaggaagattatgtagtatttacacaacaaaactcccaaactcctttagactgttttcttttacaatcagattctcatgttaatggagatataatttcttactgtaacttgtttaatagaatgagaacattgtttctattgaagaaaaagacatagagcagggtttggatctggattctaatcttgctgagtaactaactttatgcaagacctaaaaggtcctagagctgtcatagtcactttgataaactttggcttctttaccaacatgaaagtctaacaccctggctgtgatcagtgagacagtgtatctgcacacgaaagcattttgaataatttaacgcaagttattatttattaaggaaaagcacatgcaagacacactttatttttacagtggtataaatgccacagggtagcatcgttataaattcagtttattttagggctttagcaacctataatttcagagtccacctaaaaaaacttttgcaccaggaactgtctttctgttgcatttagctaaagagatttacccccattttgagcactcaggcccattagcaatggtaacgactaaagtccagttagaatataaaaattatgcagtgtatcataaattacaccacactatacagacagataaaatttacttttcttagaattcaggtcaacagcagaaacaaaaattatcatttgtgcataaccttaattattcccctcaagtacacagaaaaaataaatgcagtatacatttcttcgaagaggtttgtggttactacctttcctgtgctgtactagtttttacatagggaacctttgttgccctttaaaatgtaatttagaaatgtaactgatgtgttttgccaccaataaaacaaatacatatgacaaaatgaatggatactcatttcagtctgtacgatttgtttttaaattattctatttgcagctagaggagaaatgtgagaccatttctttcctctctgccaatggcaagccgatttccccagcccacgtggacaattgaacattaagtctagcgtgcttccagtctcccgactcctgccgggccatctgtgggcacacacacatctaggctagtacactggatggggtaaggcagtcgacatggcatctctggtttgactaccgggattgtgctatgtagctatcccatgtgtctgccgcatcagtttattggacagggaaagaaagtgtactcagcagagtgcacacagttactgccatccattctttcgttcatacacacattttactccgctctccacgtgcgttccgaacgagaactggaacacacacacacacacacacacacacacacacgtgttcaccgaacctcacccagactcaggcccggacaagtcccccgcccacccaaagctccccgcccttcgcccttccgcctgcctcttcccaccctctccgactccacgtgggcgcaccccggcgccaggcggccgcgctgcccacagagcccctagccggccccggcactgggagggaaggtgcggccctggggtcggacggacaaagccggcatccaatcgagcccggcactgcctccccgaagggagggagcgtctgctcggacgggcccaatgagcaaggaggccgagtgggacttcctcccggaatcccgttggccagaatagccgggccgtgggtgacacgtaagttgggcaggaggtggcggggcggcagaggcaccagccgacccgtcagtgacaccgctgtgccgtccccaaaaccagccgagacagctggcccccacccttccacccattgggcaggccgcacgggggcgcggcccggagtcctggtccctttgttgggcgcgcaccccctcccttaggtggcaacaaagtcgtgcagtgggagccgccgcgatagg

SEQ ID NO: 30951 - DNA, 2300 bp, Homo sapien
aataaaggaagagaaatgtctgaggcagagggctagggtgggcaagggaaggctttcacactaaagagacttgactttctatgtggttctaccatttactatcgtataataaacttggacgactttaactgcaatgaaccttagctgctcatcagtaaagtgatgacaataataggattagtggggaaattaaggaaagtaataaatgtaaagtgcctagtgcaatggctgacatagaaaaataactaaaagtagctattattgttatcatatttattggtccataatcactttcacacaatttaatgtatattaaaggcaaatgagagattctgaaaggcacactgtcaaaggaaccacccatggcaaacttgactggaatgagaaagctggttactggaagacattttgaatgagttttttttgtttgtttgtttgtttttttttttagttagagagcaaaaggaccatcagttcacaagccacagtctaaatctgtaccagaatcccatacatatctgatattaatatagctaatgcaagttttaaaatgagtcatttacaatttcttaacttacatgttaaaattagttcacttacctttcaggtgattttttgcttgtatatatttttttttgatataagagtttgaatttagtgagtagagcttgttgactttgtttatacagttaggaatagctcatataaccattgctgtaatttaaaagtttaccttaaatatttaatctttaaattttcatttagtattattattaccattattttgaaccaaatttttcttaacatcaaagattagaagattgatatctattctaataacaatcaacttatataagactgtaatgcctcagagaaattagtttttctttgcttaaagaaacacatttcagaattctgtcaaagatgatagatagccaagctcccccaaccttgcaatgaagataacagcaatgaacacacaactatgatatctatatatactaaacacggtagcgtatattgccatttaccacattacatccaattaacagagccaaaaacatttttaaaatttcatgtaccatctgctcttaagcagaatgagccaagagatgattgtatggcatgaacatacatacttgcatacacgcatgcaaatggaaaaggcatcaacaatctgaggtaaagcttagaagctcatacatgaacttatagtattgtgaacatattgaccaaagtctggactcagacttggtcataaactagtaagttgcatgcaatcaaggcctaaaattctttcttctctaaaattgtccacaaagcttgtactgacttgtacctagaataagttttctatcatatatattgaataattcgagagtgaatgaacattctacaaaagggtacacagcctgagaccactgaattaattaattatttaattatttatttatttatttttgagaaggagtctcgctctgtcgccctggctggagtgcagtggcgggatctcggctcactgcaagctccgcctcctgggttcacgccattctcctgcctcagcctcccaagtagctgggactacaggcacctgctaccacgcccggctaattttttgtattttttagtagagacggggtttcaccgtgttagccaggatggtctcgatctcctgacctcgtgatctgcccgcctcggcctcccaaagtgctgggattacaggcgtgagccaccacacccggcctgaatttattttaagtttttcatctaaacctcacaaacaaggtctcagaaataccttgtctgtgtagatgaagtagagtaaacttgaaaatgagtgaaataaaaataattggccaagtgtacttgagaaagaatgtgggggctatgcttgctttctatgtggcagtacattgttattgtttaataaaggtcacaagaggaacaccaatatgtctattatttcataagatctatcttatctctcaatgcctaaaagcagatattgtttaaattttcttagatgtggatgagtgtctggatgtcagtatagtctgtgaccaactacattaattctgtgggaacatacgaatgtagttgtgaagaaggctacagaattggaaatgacagaaaaacttacccctgtaagtcactgaagaattttattgtattaatatattttctaaactacttccagcctcatcttgttcttcaggagcaatggaggccacatatttcttaactcaacctgccttcccctttctgtcttcacagactaagatctttccttattttctttt

SEQ ID NO: 30952 - DNA, 2300 bp, Homo sapien
gaagatggtgcttactagatttggaaaagaccctttgtgtgcaagcagaaagttagaagcatggcagaaacataatctctcttcctcatgatttgtgtagaaagtgttttgggtgaaaaattttttctaaagtgttttgtgggagtacgtttactgtaacagggttttctaggttattctgctaagcacagaataaattgtgctaaatatagcatggttctcattgcagtgggccttggaggtaaacagagttattgcagagaaggtcataactttatacgcatttaaaaaaaaaaaaaactggggctaaaatattacaactaccataatgtggggtttcacacaatttttattaatatcgtaagtgaggaaagttgaagaagcttattatgccagaacagttttttaagggggaaaaatcaaatcagtacttgtgttggtttagtgatactatgccaaagtaactagttcaacagattatttttcctactgaactgactagacttctggcatcacataaggacaaccacagaagcccaagaactctagtggaatggggtgacttctgctttagagcacttgaaccactgactctgcattcagaagtgggaggagaagggcccttcacacatggaaggatgagttaagaattttctgtcctctaagattgaagttttcatttataagtcatttggaggctggacgcggtggctcacaactgtaatcccggcactttgggaggctgaggtgtgtggatcacttgaggtcaggagttcgagaccagcttggccaacatggtgaaactctgtctctacaaaaatacaaaaattagccgagcatggtgacacgtgcctgtaaccccagctactcgggaggctgaggcaggagaatcgcttgaacccaggaggcagaggttgcagcgagccgagattgtgccactgcactccagcctgggtgacagagtgagactccatctaaaaaacaaaaaaaaaaaaggtcatttggagaaagttaactttttttttcaagtaacatgccccccaaaatcataaacaaatgatggcaaataatggaatctttaccttaaaatgacagaggacaataccttctcaattactaaaaacccttttcttcttcattaatgagagctaggggaaggaggccttgcatttttgtattttcattttatgactaaaggaaaactttaaaaataatttatgattttttttatcacatggaagacagaaacaactaaccaaccaataataagtgctttcatgaaaaaccaacctgattcagactgctagagactcgttcagaaaaagagaaatgaaaaatagggggtaataggaagggagataaatggaagccctttgctttcattccaaaaagagaacttagtggcattattattttttttataacagtttaaagattaacagagaaaaggctttgtggtagctgattcttgggtatcagactaaattatttacattgttttagttttaaaagtctaaaatattgattgctattttgaaactgataatggaattttctttaggattagcacctgagaaaatgaatttcctgagaaattaatcagactgaaattttgaattaaaaagtgatattttattgtatttgaaaactatatgaatgttttttgtttgtttacaaaaaaattagttgtattgtcctaagcagaagataaaacaatgctactgttcctcaatgtgctttattttatgaggtttacttaaaatattggtactgattaatgaatttgggagcaatcaaatcactaatattttattatggtttctgataaagtcatgaaagtctttaaagcaatcagagtatattggaattgaaatcttaattgtgtgaatagtattctccctgtgccttttctttaaaatgttgttttatgagtggagatgatttttgatagctggctaactagtcttgagaaataccttttaatgtgcttgctaatattttctctttgtttatttttcagatgcaaatactgtgacagatcatttagcatatcttctaacttgcaaaggcatgttcgcaacatccacaataaagagaagccatttaagtgtcacttatgtgataggtgttttggtcaacaaaccaatttagacagacacctaaagaaacatgagaatgggaacatgtccggtacgtaataaattgtgttataagtcaaagatgacttctttttcgtgttttaaaagataataagataatgtgatctttcttcttttattccattttgacgccaaaatcag

SEQ ID NO: 30953 - DNA, 2300 bp, Homo sapien
tcagggtactgatactgtaatactgctggacagtgaagtgagtgattcttacctggtaaaggagttattaagggttacaaagtttggtcttaaaatatacttggctatagtggcacatgtgtgaggaggaagattctactttattgacaaattcttagcaaagaggcatatttcacagctgcatccaatgctgtgcccttctttctggattagagctttcacagtgctctcccctactgagcatagttggctataacacacagaagtcaagcctgagataaccagtgtagatatgacaacaagtggacatgtttcccaaggacggggttttcataaatgcaggaaggttagcacaaccactggtgtgaggggaagtcagaggacgtgatcatagttcatgggaaccagcaatgcaggatgggctacattcaatttagtttcctttgcaggcttaaaatagagccattgtaaattatgtcagtctttctcaaatcatgaaaatgattgttaaaaaaagtctcagaatacacaatgtgcattgttgtgtggctttgatgtgtgaatgatgagagcatatgatataataccaattaaataatagcagggcagtcacaggctttttccccaaggggagaggcaataaaggtgaagtttctggttgaggatattttattttgttttggtgcctacaaaatagaatttttaagtactctaaaatttgaaaggggttcttgttgtgttttgtacgtaatgcattttaagactaattttcaacattatattagtataataattgtgtggagaatcaatgcatgatggaatttaacttttcataaatatttaaatacacaaatattatgcaaaatattgcacaagggggtgacaagatatatatatctatatatatgaaatatttgtgctgcctcaagacatttgtcaggttggttgccttgctttggaatctagtgaaatggggttttctgtgtttggagcacccagattggtgcctccaatgtcttttactggcttcctaattgaaattttgagtaaaccaattgtgatatttgctaaattcagaagcaattgacataaagcctgagattcttttttgttgtttgcacacaggtgaggtctgccataaatcctatactcagttttcaaacctttgccgtcataagcgcatgcatgctgattgcagaacccaaatcaagtgcaaagactgtggacaaatgttcagcactacgtcttccttaaataaacacaggaggttttgtgagggcaagaaccattttgcggcaggtggattttttggccaaggcatttcacttcctggaaccccagctatggataaaacgtccatggttaatatgagtcatgccaacccgggccttgctgactattttggcgccaataggcatcctgctggtcttacctttccaacagctcctggattttcttttagcttccctggtctgtttccttccggcttgtaccacaggcctcctttgatacctgctagttctcctgttaaaggactatcaagtactgaacagacaaacaaaagtcaaagtcccctcatgacacatcctcagatactgccagctacacaggatattttgaaggcactatctaaacacccatctgtaggggacaataagccagtggagctccagcccgagaggtcctctgaagagaggccctttgagaaaatcagtgaccagtcagagagtagtgaccttgatgatgtcagtacaccaagtggcagtgacctggaaacaacctcgggctctgatctggaaagtgacattgaaagtgataaagagaaatttaaagaaaatggtaaaatgttcaaagacaaagtaagccctcttcagaatctggcttcaataaataataagaaagaatacagcaatcattccattttctcaccatctttagaggagcagactgcggtgtcaggagctgtgaatgattctataaaggctattgcttctattgctgaaaaatactttggttcaacaggactggtggggctgcaagacaaaaaagttggagctttaccttacccttccatgtttcccctcccattttttccagcattctctcaatcaatgtacccatttcctgatagagacttgagatcgttacctttgaaaatggaaccccaatcaccaggtgaagtaaagaaactgcagaagggcagctctgagtccccctttgatctcaccactaagcgaaaggatgagaagcccttgactccagtcccctccaagcctccagtgacacctgccacaagccaa

SEQ ID NO: 30954 - DNA, 2300 bp, Homo sapien
ttttctacaatgtattggtttaaatgtacccaaggtatattagaaagttattaaacataggatagtaccgattactaaaagcagcatttatgatgttaaacgttcaaaaataatctgagtcgtcaaattgcttattgcacgttttggcgttcaaggtgttttaattaatgtatcaaagaaaatggcaaagactcaccagacagtcatcaatctctctaaacccataatatgctgtttgggcgggttatatgccaataatttttcagattttaaaatatctttaaagaaaaatatggtttgaaaattttgcacgcccttcctctgacctagctacaagaatgaagggaataaattagagtatgagtttcaattaaaaaaattttttttaatgcttagcagaaaactggaaatgtacatgtcaacttttcactcttgaggttgctgttttctgagaatttctaaactatttatatttagtctgaactagcgtccctataccctaagctttatcctccccactccagcactacctctcccccctacccccgccccctcctgcctcggtgcacacaccctcacacccctgaaagcacttctctacccttccccatccctcccatcccccatctctctctctctcacacacacacatgcacacacacactcgcgcgcacacacacacacacacaccacacttgtgctttcaagacatcgaaacggaggctatttccctggggaaagaaatcctgcctggcgagatctccccattggttgtttacccggagaaatctacatgtttaagggggatggtgcatccataatcagtctgtccctataggacttgggtcttggcgacctttttgtgacctctcccgccagaggaggctgctgtcactttaaaaatttaaaagaggagcccgtctggcttccgatcagatcactctgggcggcgggagatagctccctttctccctcgccccgggttctttctggatggccgagcagatcctctttaaagagacagttcatgaaatagaaacccggcggctgagcttggagttgcgaaaggggacgatcccgtgagggtccaggacccgcgaaggcgctgcggaggatctgaaagggggatagagctcccctcgcctccccaggccccccaccttttcaaactctcctcctcctgcttgttttcccccattggaactgggaaggagaagtagaagttttagtgggtttcagataactttcattacacatcgggctgataagagcaagagaaagtgagaaaagagggaggtgatgtgaaccagaaggaatagctccgagctcatttaggaagggggaaaaagccaaaacacaccaaacccgggtcacccagacgaaagaagacttcatttcttgtattaaaaatacactgttggcggacaataaatccgaaacgcgtggtcctggagagcagatcctagagacggacaaagttgtcagagacccatttggaaatcgagacgcgaggcttttaaaaaattattattattatttttaaacatctctaaatgttgctcgggatcgtttgaaaggattttcgtgcaggagcgttgggggctgctgattattttattttgtttattttgattcttctgtgaatgcctattattgctgagttgaggccatagaaatctaaaggtaagagaactcctcactttaaaaggaaaaaaagtctgggcgatgtgaaagtttgtcacttcggacagtttcctgccggggcaccgtttctacgggcgccccccgcccccagccttctttcctcctcgcccgcagtctcgcggagccctgctgcttatctacgttgctaagccgggcgatttccttgttcctcctgcgaaacggtgcggtctggacacgtctccggggtgggtcgtccggccttcggtgggtttctctgccggcttgtcggcctcttttccttgcgctcttctcctccttcccctccctccgtgtgtctctgtccgtcggtttcggggacgcacaaggtgcggttgccaaaatctgaattcctggcactggccacgcgactttggagccgctctcggccgagttccaccttgccaagtaacagctttgctgtccaacatcgtgtgctgcttcgcgagaaagtcacattcggaccctttggctagattgtggggatttttttttttttccttttgctgttggttttttgaaagggcctttctctaaagtctacctaaacggtttttttttaagctatctttggaggttgacagcttttaaaaacacag

SEQ ID NO: 30955 - DNA, 2300 bp, Homo sapien
gtttaaccgtcagcacactttccagcccctcttgccccacctctcccccgcaagtgtccctagactcgcttactttgcttaactttccattgttgagctggggagttggattttgtccatttgtttttatgaatggagttttgtgataaaaacgcgtttacttccatttagccagtgggatttactaaatcttacaaagttggccatgaataaatctgtagacccttttgttttgctatgtatcccctgtattctttcttccaatgtcttttctacaatgtattggtttaaatgtacccaaggtatattagaaagttattaaacataggatagtaccgattactaaaagcagcatttatgatgttaaacgttcaaaaataatctgagtcgtcaaattgcttattgcacgttttggcgttcaaggtgttttaattaatgtatcaaagaaaatggcaaagactcaccagacagtcatcaatctctctaaacccataatatgctgtttgggcgggttatatgccaataatttttcagattttaaaatatctttaaagaaaaatatggtttgaaaattttgcacgcccttcctctgacctagctacaagaatgaagggaataaattagagtatgagtttcaattaaaaaaattttttttaatgcttagcagaaaactggaaatgtacatgtcaacttttcactcttgaggttgctgttttctgagaatttctaaactatttatatttagtctgaactagcgtccctataccctaagctttatcctccccactccagcactacctctcccccctacccccgccccctcctgcctcggtgcacacaccctcacacccctgaaagcacttctctacccttccccatccctcccatcccccatctctctctctctcacacacacacatgcacacacacactcgcgcgcacacacacacacacacaccacacttgtgctttcaagacatcgaaacggaggctatttccctggggaaagaaatcctgcctggcgagatctccccattggttgtttacccggagaaatctacatgtttaagggggatggtgcatccataatcagtctgtccctataggacttgggtcttggcgacctttttgtgacctctcccgccagaggaggctgctgtcactttaaaaatttaaaagaggagcccgtctggcttccgatcagatcactctgggcggcgggagatagctccctttctccctcgccccgggttctttctggatggccgagcagatcctctttaaagagacagttcatgaaatagaaacccggcggctgagcttggagttgcgaaaggggacgatcccgtgagggtccaggacccgcgaaggcgctgcggaggatctgaaagggggatagagctcccctcgcctccccaggccccccaccttttcaaactctcctcctcctgcttgttttcccccattggaactgggaaggagaagtagaagttttagtgggtttcagataactttcattacacatcgggctgataagagcaagagaaagtgagaaaagagggaggtgatgtgaaccagaaggaatagctccgagctcatttaggaagggggaaaaagccaaaacacaccaaacccgggtcacccagacgaaagaagacttcatttcttgtattaaaaatacactgttggcggacaataaatccgaaacgcgtggtcctggagagcagatcctagagacggacaaagttgtcagagacccatttggaaatcgagacgcgaggcttttaaaaaattattattattatttttaaacatctctaaatgttgctcgggatcgtttgaaaggattttcgtgcaggagcgttgggggctgctgattattttattttgtttattttgattcttctgtgaatgcctattattgctgagttgaggccatagaaatctaaaggtaagagaactcctcactttaaaaggaaaaaaagtctgggcgatgtgaaagtttgtcacttcggacagtttcctgccggggcaccgtttctacgggcgccccccgcccccagccttctttcctcctcgcccgcagtctcgcggagccctgctgcttatctacgttgctaagccgggcgatttccttgttcctcctgcgaaacggtgcggtctggacacgtctccggggtgggtcgtccggccttcggtgggtttctctgccggcttgtcggcctcttttccttgcgctcttctcctccttcccctccctccgtgtgtctctgtccgtcggtttcggggacgcacaaggt

SEQ ID NO: 30956 - DNA, 2300 bp, Homo sapien
agaacaagactgatgatgacgataatgatgatattaatataataataatgatgatgcaatgaattctccattcttctaggtacatcttccaaggtctcggagggtaagcgttcactcttggttgtatttggggaagagaagctcagacgtaggaatagccttctctcaggctgatgtctacatgcctggactgcagtgtgccttcctctcgtagctcggaaggacgcggaacggcgggcgaggcggaaggcagagctgtgttgccggcgcctggcgggcagaggcgggttcacctgggtggctggagccgccggcgctgcgctttatttcggagcgcaatgccatctaccggcgtcctgccgtacctgcaagtatccagaccttgaaagtcgctccgcctccccccacccgaagccaatataggggaaaaaactcggaggccctttccacgaaatcctaatttagccaggacctgccaatgattccagacgaccttttgttttcctaccgacgtttcctcgttttgaaagcagttttgtaaagggcaaggaggtgggggccgcagggttggggcgctgagctcccagaccccctgatcaggccgcactgtctgaagcaatcggttccccagattacttgtatttaatacacaatgcatcataaaacaaatccctcatcctgacaggaagaaaatagaacagctcatagctcgagccggtccaatttatggctaaattaaaaaaaaaaaaaaaaaaaagaaagctccgacaatgggcaagttgagggagggcaggaaatcaatggccacgaaccaggagctcttaaaggttctcaagcgcccaactctacgggaatatctgaccgggttttaggttatttacaaaggatttttcctgtcctacctaccactgctgtgcgattttctctcaaacaatggccattatctgaaataacagttcaatgtcacagataacaggccaccgaaacaaattagtcaccacctcttgtcattttctctcccccaatccctcccttttgctactatttttgtttttaaatcaatattttgggaaaatatagttctactggatttacacgtttatttgcacttggagaaaacaaaaagtgggtggcacttgtgttatcccgtttgcagctaaagtttaaccgtcagcacactttccagcccctcttgccccacctctcccccgcaagtgtccctagactcgcttactttgcttaactttccattgttgagctggggagttggattttgtccatttgtttttatgaatggagttttgtgataaaaacgcgtttacttccatttagccagtgggatttactaaatcttacaaagttggccatgaataaatctgtagacccttttgttttgctatgtatcccctgtattctttcttccaatgtcttttctacaatgtattggtttaaatgtacccaaggtatattagaaagttattaaacataggatagtaccgattactaaaagcagcatttatgatgttaaacgttcaaaaataatctgagtcgtcaaattgcttattgcacgttttggcgttcaaggtgttttaattaatgtatcaaagaaaatggcaaagactcaccagacagtcatcaatctctctaaacccataatatgctgtttgggcgggttatatgccaataatttttcagattttaaaatatctttaaagaaaaatatggtttgaaaattttgcacgcccttcctctgacctagctacaagaatgaagggaataaattagagtatgagtttcaattaaaaaaattttttttaatgcttagcagaaaactggaaatgtacatgtcaacttttcactcttgaggttgctgttttctgagaatttctaaactatttatatttagtctgaactagcgtccctataccctaagctttatcctccccactccagcactacctctcccccctacccccgccccctcctgcctcggtgcacacaccctcacacccctgaaagcacttctctacccttccccatccctcccatcccccatctctctctctctcacacacacacatgcacacacacactcgcgcgcacacacacacacacacaccacacttgtgctttcaagacatcgaaacggaggctatttccctggggaaagaaatcctgcctggcgagatctccccattggttgtttacccggagaaatctacatgtttaagggggatggtgcatccataatcagtctgtccctataggacttgggtcttggcgacctttttgtgacctct

SEQ ID NO: 30957 - DNA, 2300 bp, Homo sapien
aagctaccttggcggttgggcaccaaggcaaggtgctcagccacccctggggtgcctggcagggaaggtgaggattggagggacaagacctagattttgacagctgggatcttcaggtgctgctggtctgtcccctggcctaggggatggtccctagagagtctcttacaccgatcagaagcagccttatgaacttcttgccagtcagcctagtgtttgtctctccctagagattttgtccccccttccaaagcctctcaagacccatttctccgtttcctcggaggacatttgctggtcagagggtaggcacctctccatctaaactgagggaagctggtggagtcacattttgggggaagtttcagagtcaaagacctgtgtgaacctaacagaatgttggaatggctggtgcttttgcacacaccaaatgtgttagcacactcacctttatgcacaggacagcgggaattctaggtctggaaaaaaacccaggtgcctctttaattcagagtggataatagagttctcttgtgcccacgcgtgtgggcactagagccttctcttttggaagttgttttactcctgttgtgagtaattccctcctttaccttcctacttcccttcctcacatttcaaccttatacatctgtctcccttgagacctgtagcttggttctccagggacctctatcttacagccaaatgcccccagaattacacagctctggataaaggaaaatggtaggcatccttaacaaggacaaattctttgaactttgattctcttgaataaagagatttgcaggccattgataccctttggggttgaaccttgttatttgctctctcatgtctgcagtcctagatttgataataaataccaacaggtacgactgggcattctcaatgattcccctttccctccacagcctttgccaaactcatgcccaggacctgcttttcttttcctttaacttgaacatcaaggatgtattgttgcagcacggagactgaaaagattgtaattttcttttatggtgtctggcaggatttgcaacagatattaatggggacataaatagcacatggaaggtattgaacaaaactgtttaatgcaagaaggttgtaccaaaagaaaatctatacctagttgggattgattcataccttgtacacagctagcccctttaggaattcccatttctgagtggcacttcattggtaaatcctgtaattaaaggaaatttcaacaatgtatttttttaagagtgtgtgattttcctccctactcctctttcttttgaccccgaggttgtaggtttaagcgagtgagtgaaaatggcaggcaagcagagctgcatcgggaggcgaccggggcagcagtgggggaggccggaaggtgacagccgacctctgagaaagcaggaggtctttggatgtcaaatgccagcgccggcccggacccgggaatcaagggtgatcattactacttggtagggaaagaatactgaaatgtcccaaggatggcagcaagcattggtattacagctaaaatcgaggaaaaaaccagttatttattctgcttacaaccctgaaagcggaagctgcaatagcttcagtagcagtagcagcggcagcagtagatttctcaagttcaggatgattctcactttctcctggattattagccgagggtccagcccttctagttctttaacaggagaagggtttttaaaaaatgtttttaaagtttttttcccccctggcttcttgcttccctcgtagatggtatagaaaaatgtctgcaatttatggtgggaaaaacaataacaataatcatgatacaagcttgttggcgattctaacatggaatcaatcctctgcccaagccttttcaattcccccctcccctttttttgggcgaggtgtctgctcccctctggctccctgcgttcgctccccgccccccgccgccctccccgcggctccctttctccgcctcctcggcgattgccatctgacaagatctccaaatcaaagtgataaatcgctccaaactttttttggcggcgctgagatgttggaggggcgtctagcgcgcatgtgcgaaggtgtccaaactgacaatgctggagagatagcgagtgtggattgagagaaagggagagagggagggagagagagtgaaagaagaaaatacagagagtgagtgtgtggaagagagagagaaacaggagagaaacaggagggagggagagagagagagagagagagagagagagagagagagagagaga

SEQ ID NO: 30958 - DNA, 2300 bp, Homo sapien
gttgcccttcctttgggtggccttttttttttttgtctccctggaaaggcgttttattacacatcctttccgcaggttgagctgctcagagtccggggcgaagcagggggctttcgttattcagccgcgaaaaagccatcctttcagcttctggtggaaggacgtgtaaaattacttttgaatttcctctttttgcttccgaagaccaagcagaagttctaaattgactgcttgttttcaaattctctacagatgtatgcagaatcagacaccaagatgcgtttattgacatgcaatgtactttcaaatttttccaaacttgaatttcatatgacctgataaacttcacttttcctgcaaaaagacaggcacgtccttcagcctaaaaatcaagagtagcgaatgaggcttgcagattacaccagaaggatagaaatcgaaatatatatatttatatttattatatataaatataaatttttatatatttattatatataaacataaatttttatatatttattatatataaacataaatttttatatatttattatatataaacaaatttttatatatttattatatataaacataaatttttatatatttattatatataaacataaatttttatatttattatatataaacaaatttttatatttattatatataaacataattttttatatatttattatatataaacataattttttatatatttatgatatataaatataattttttatatatttatgatatataaatataattttttatatatttatgatatataaatataattttttatatatttatgatatataaatataattttttatatatttatgatatataaatataaatttttatatatttatgatatataaatataaatttttatatatttatgatatataaatataaatttttatatatttatgatatataaatataaatttttatatatttatgatatataaatataaatttttatatatttatgatatataaatataaatttttatatatttatgatatataaatataaatttttatttatgatatctaaatataaatttttatttatgatatctaaatataaatttttatttatgatatctaaatataaatttttatttatgatatctaaatataaatttttatttatgatatctaaatataaatttttatatatgatatctaaatataaatttttatatatgatatctaaatataaatttttatatatgatatctaaatataaatttttatatatgatatctaaatataaatttttatatatgatatctaaatataaatttttatatatgatatataaatataaatttttatatatgatatataaatataaatttttatatatttatgatatataaatataaatttttatatatttatgatatataaatataaatttttatatatttatatttatgatatataaatataaatttttatatatttatatttatgatatataaatataaatttttatatatttatatttatgatatataaatataaatttttatatatttatatttatacatataataaatataaatataaatttttatatatttatatttatacatataataaatataaatatatatatttcgatttatatccttgcttaaatatataaatatatattttataaatatataaatatatttatataatataacatatatttatataaattatataaatttatatattttttaatattttatatttaaatttatatatatttatataaatatatataaatttatatttatttacatatttaagctaggaactactattttgttttaattgcgtacattttgcttggaaatcacaggaagaaacacaacaaagcattgcccaaggtacagaaacaataataaacgtacttaaaactcatttaaattccagcatttttctccttattttagaagtttaacatttcagaagcagacactgcctcccttcctgcaacaactttctcctcttaagtctcatttttccccagtttcaagggcgaattctagaactccccggaaccgccaccagttaaccagaattccgtggctttggaaaataaaactgctgttatagctcttctgggtatttgagaaatgcacttgtgaagggttagagttgaatcttttgatgcgaaagtcgggttttcctgatactgggattccgggattccaggtgttggggtggcccaattcctgcgagaagcaatagcgggcggtaacatgaggagcacggtg

SEQ ID NO: 30959 - DNA, 2300 bp, Homo sapien
agatatcatatataaaaatttatatttagatatcatatataaaaatttatatttagatatcatatataaaaatttatatttagatatcataaataaaaatttatatttagatatcataaataaaaatttatatttagatatcataaataaaaatttatatttagatatcataaataaaaatttatatttagatatcataaataaaaatttatatttatatatcataaatatataaaaatttatatttatatatcataaatatataaaaatttatatttatatatcataaatatataaaaatttatatttatatatcataaatatataaaaatttatatttatatatcataaatatataaaaatttatatttatatatcataaatatataaaaatttatatttatatatcataaatatataaaaaattatatttatatatcataaatatataaaaaattatatttatatatcataaatatataaaaaattatatttatatatcataaatatataaaaaattatatttatatatcataaatatataaaaaattatgtttatatataataaatatataaaaaattatgtttatatataataaatataaaaatttgtttatatataataaatataaaaatttatgtttatatataataaatatataaaaatttatgtttatatataataaatatataaaaatttgtttatatataataaatatataaaaatttatgtttatatataataaatatataaaaatttatgtttatatataataaatatataaaaatttatatttatatataataaatataaatatatatatttcgatttctatccttctggtgtaatctgcaagcctcattcgctactcttgatttttaggctgaaggacgtgcctgtctttttgcaggaaaagtgaagtttatcaggtcatatgaaattcaagtttggaaaaatttgaaagtacattgcatgtcaataaacgcatcttggtgtctgattctgcatacatctgtagagaatttgaaaacaagcagtcaatttagaacttctgcttggtcttcggaagcaaaaagaggaaattcaaaagtaattttacacgtccttccaccagaagctgaaaggatggctttttcgcggctgaataacgaaagccccctgcttcgccccggactctgagcagctcaacctgcggaaaggatgtgtaataaaacgcctttccagggagacaaaaaaaaaaaaggccacccaaaggaagggcaactcgggagtgcctggtttctactgcggtacccgggcactttggaagaaagtgcgtgcagattcaagcttttgaaatggtttcagctctgttcaattgggcataggctatttttccttttctgtttttttctttaaatacattatattcattcctctcaatttgataataatcacttgagaattgcgaattgacacttacatatcaaggactttacaaaaccctctccaaagtggggtttccgtagtgtagtggttatcacgttcgcctaacacgcgaaaggtccccggttcgaaaccgggcggaaacacactaaaaaatccctttttttttttttttttttttccttcgcttggaagaaagcgtgagatcacgctttgttttcttttgttgtttgttttgtttttttttctgagggaagccttagcttaatgtatgccggtccttcaaaagacatgatagcaatttgagagtctgaactgtaagtttttgttactttattcgttcaccaaatgtttttatggaagccttgccacgtggaacatgtgtcccgggttttaaaaaatgaatttgactcaccagctaacactgaaaaaataatgtacagcctagaaggaaagatcaaagtgtaaaagtggttagtcctgtcgcctcctgagcatttttgtattatatcacttggtttttcgtctgaagtggctgtaaataatcgtattaaaaatcttctggtccagacgcaggaaaaccttttccggtataaagcccaccttcctctaatgttgcgcatgcccactgtgcccagctgctccgctttcgtgcatcccagacttctgtcaccaggtaagggcatcttggaagctgagctacagttggctggggcacaaaaaaaccagggggtgccaagagttttcaggtacgtaagcgggaaaggggtgccaagtctcagctaaaaaatcccctatggcagagatccgagtacacatgcagcagtttccaccggtggggccccgaggaaggggaggatgatgggagaagaca

SEQ ID NO: 30960 - DNA, 2300 bp, Homo sapien
tatataataaatatataaaaaattatgtttatatataataaatataaaaatttgtttatatataataaatataaaaatttatgtttatatataataaatatataaaaatttatgtttatatataataaatatataaaaatttgtttatatataataaatatataaaaatttatgtttatatataataaatatataaaaatttatgtttatatataataaatatataaaaatttatatttatatataataaatataaatatatatatttcgatttctatccttctggtgtaatctgcaagcctcattcgctactcttgatttttaggctgaaggacgtgcctgtctttttgcaggaaaagtgaagtttatcaggtcatatgaaattcaagtttggaaaaatttgaaagtacattgcatgtcaataaacgcatcttggtgtctgattctgcatacatctgtagagaatttgaaaacaagcagtcaatttagaacttctgcttggtcttcggaagcaaaaagaggaaattcaaaagtaattttacacgtccttccaccagaagctgaaaggatggctttttcgcggctgaataacgaaagccccctgcttcgccccggactctgagcagctcaacctgcggaaaggatgtgtaataaaacgcctttccagggagacaaaaaaaaaaaaggccacccaaaggaagggcaactcgggagtgcctggtttctactgcggtacccgggcactttggaagaaagtgcgtgcagattcaagcttttgaaatggtttcagctctgttcaattgggcataggctatttttccttttctgtttttttctttaaatacattatattcattcctctcaatttgataataatcacttgagaattgcgaattgacacttacatatcaaggactttacaaaaccctctccaaagtggggtttccgtagtgtagtggttatcacgttcgcctaacacgcgaaaggtccccggttcgaaaccgggcggaaacacactaaaaaatccctttttttttttttttttttttccttcgcttggaagaaagcgtgagatcacgctttgttttcttttgttgtttgttttgtttttttttctgagggaagccttagcttaatgtatgccggtccttcaaaagacatgatagcaatttgagagtctgaactgtaagtttttgttactttattcgttcaccaaatgtttttatggaagccttgccacgtggaacatgtgtcccgggttttaaaaaatgaatttgactcaccagctaacactgaaaaaataatgtacagcctagaaggaaagatcaaagtgtaaaagtggttagtcctgtcgcctcctgagcatttttgtattatatcacttggtttttcgtctgaagtggctgtaaataatcgtattaaaaatcttctggtccagacgcaggaaaaccttttccggtataaagcccaccttcctctaatgttgcgcatgcccactgtgcccagctgctccgctttcgtgcatcccagacttctgtcaccaggtaagggcatcttggaagctgagctacagttggctggggcacaaaaaaaccagggggtgccaagagttttcaggtacgtaagcgggaaaggggtgccaagtctcagctaaaaaatcccctatggcagagatccgagtacacatgcagcagtttccaccggtggggccccgaggaaggggaggatgatgggagaagacaagcaactacaagcccccgcacgcagtgcgcagctggcttcaggagagaggcccgcggtgctgtgctgccgggcctcggcgcagagccccggcagagcgccagacgctgactgccggcaccagaatgctcgcgatgaggaagacaggcggagcgctgcgagctagcgagccctcagctctcgtatccatgacgcctgctgcttcgggggacccctggcatgctggggagtgggtctctgtggtacatcctgtaccgccctggccggcgccggacccccatggccccagaacctcccgcactgccacgggaagacagagccggacgtgacgccaccgtggaaggaagggaggggcggagcgtggctcggtgacgtcctcccaagatggcggagacagagtgaagaaactgtgttccccccttgggttgctatcggtgagttcctacttcacccccagcccgccatcccggtctctctagagcctgggccatcagagggcaggctccttggagttccagcacgggtcggggcgcaggtggaaggcttgggctaggcagccc

SEQ ID NO: 30961 - DNA, 2300 bp, Homo sapien
aggtgctagaggtattaaagtcaaataaattacatagcacttgtcttcagtgagttttccatctaggtggagggagcttgacaagtctggagagtgatatgcccggggtgccatggggacataaggagggtaatcagaatcaaagcaggggaggtgagtgtggtagggaggttctcagattgaggacatgacaggagattcgagggctaaatacatttctggattttatctctgtggaaatatgtttatatataggagatcacattataagcatgatccctttttaaaatatgttgagtggtgtcattcctaaatccacctgaggatgcttattattaaaagcccaggcccccttgttgctctcagcttggtgcttctggcagccagctaggtgctagtctgttttgttcttctccaggacagccactaccttctctatccccaagggtactattctgctcttaaattgctgttcccaaatacaaacctgcaaatctattccatgtacgggttttactgttttattaccgtggaggaatgggataacaaaaagctgttaagatgttggacttcacctttaatgctcattggcattatccggggagcttgaaaaatactgatgccaggtgccactctagacaaatcaagtcacaaactcagtgaatggggctaaaaccctttactatttctgacaatagttcctcccttaattaggatactcctgctttcaagcgttgtagcctaaaactgcaatcaaggcccaaacacaaaaacgtactgagtttgtcctctgtgcctggcactaggaagagcaatagtggaaccccctaagtggttggtttgcatttttttacgttcctagactacatagcatccctttagcatggttggcgtgcatttttaaagatcctagtctacatagcattcctttgggtgtatcttttcagtgtcaaagcaatttcagcaaatacagaattacagaatattgaacaataataaatgctttgtaggctgcttatggaacacttattttgtgctaggtaccttttattagttaacttatttctgtgagggaagcataatttcagctactttactaaaatggaaactgagactcagctagatgaaaatatttgcccaaagtcatatagccagtaaaaggtagagctagtatctgacagacttgatttttataaagctcatgtactttctgctattgctatgtggtttcatttaaagtttttttcaaagtacctttatatataacaagaacacatatagttatctgtgttcatcatcagcatttccagtgactaaaaaacttattatgttatacagcaatcatgcaagagtacttcttgtcacaaaatactttgggccattcatttgaaaatatgctttgattttactaaaaacttaaaatgcctggtattcaaatcttcattgatgccatgtatcttttacctagaagtagctagattgtggaacttaaaaaaaagtcttctgatgatcagaaaataagaataaaacctcttaggaatttgagatgaatataaagggaaggatcagatatatcacagggttaatgagtgtattcttaatataaaataaagattgggaaatgtctttgtattttgtctgaaaaccatcaagagtagagatcaagagcaaagttcaggaacatatggaaggtataagaaaggtttagagacttgaaagatggattacatgctcaatacatgatgggaccaatttttttttcctttcgaaatgactgattattgtttttttaaaaaaccaaattaaccagcctcttttacatcacttaggtagcaggcacttgtaaaatatagtgactatattttaccttctgagaaggtaaaaaatatcatttgtggcaaagataattttttaaagatagaccaaacaaatgcaaattgtggactaacagttttaaccaatataatctttttaaaaagctaatttaaataacagcatatgtctgaaataaacatgtactacttcaaaattatattttagaaataagattttatccacttttaggaagagtctacagtccatgtaggccgcatgttgaaagaaaatcactgtcttgttgcactacacatgtgtaagcatgatataaaaaacagtggtatacaacagttatgtgatgcactgtatctgaacagtagcctgcgctaccttgatgtcagctggtaagtgataatttacacattaataattcaaagttaaataatgggaataatctatataaatattcatggtacttgggatac

SEQ ID NO: 30962 - DNA, 2300 bp, Homo sapien
ccacgtgtcctaacaccatttgttaaaagactattctttctcccattgaactgtcttgacagttttgtccaaaaatcagctaaccatcattacaggagtttatttctgtactctcaattctattcttttaatctgtatgtctatccttatgccagtaccacactatcttgattactatagctttgtagtaggttttaaaatcaagaaatgtgtccttgttcttttttcaggattgtgttggctcttctgtgtcccttgcatttccatatgaattttaggtcagttaatcaatttctgcaagaaaagcagctgggagttttttttttttttttttttgagatggagttttgctcttgttgcccaggctggagtgcaatggcgcgattttggctcaccacaacctccacctcctaggttcaagcaattctcctgcctcagcctcccaagtagctgggattataggcatgcaccaccatgcctggctaattttgtacttttagtagagacagggtttctccacgctggtcaggctagtctcaaactcccgacctcagattatctgcccacctcggcctcccaaagtgctgggattacaggcatgagccacttcacccggccagcagctgggattttaataggaattacagtaaatctgtagatcaccttggggagtattgccatcttaagtcttccaaacctcgaacataagatgtttcatttatttaaggcctttcatttctttcagcaatgctctgtagttttcaatgtgcaaatcttacatttcttttgttaaatttattcctaacttttttttatgctattgtaagtggaactgttgttcttaatttcatttttaggttgttcattgttagcatatggaaatacagctgtttttgtatattgatcttgtgtcctgctatgttgctgaactcttgtgttagttctaacaggtttttttggtggaatccttaggattttccctatgcaagatggtgtcacatacagagtttcacttcatttccaatttgtatggtttttctttttgtttttcttggctaatttctctggctagaacctccagtacaatgttaaatagaagtggtgagaggacatccttttcttcttcctgatctcagaggggtttgaatcgtgataattatttacactattatatgtcctaatagttactcattagaatgatgaaatgtctgtgattttgtgaaatatttatcaaattatattactttaaaagtgatataggaggaatggggagtgactggttaatggtataggaccggcttcggggatgatgaaaatgttttggaactagctacaggtgatgactgtgcaatattgtgaatgtactaaatgctactgaattgtatactttaaaatggtcagttttatgttatgtgaatttcacctcaatttaaaaaagtgaagtgctataattttcttaagataaatttacagatttttccagtgaaagtttattaatatatgttttatttactggttattgcttgggcatctgtttcttgggcattctttctactcaactgttaaactagatttttatctattatggtagattgaatgttacctttaaggtatatatcctcttctggctgggcgcggtggctcatgcctgtaatcccagcactttgggaggccgagctgggcagatcacgaggtcagatcgagaccatcctggctaacatggtgaaaccccatgtctaccaaaaatacagaaaaaaattagccaggcgtggtggtgggtgcctatagtcccagctacttgggaggctgaggcaggagaatgctgtgaacccaggaggtggagtttgcattgagtcgagatcacaccactgcactccagcctgggcgacagagcgagactctgtctcaaaaaaaatatatatcgtgttctagctccatgaaaattggagtctgcaaatagtaatacagtctcctaattcatgtaatatatagaattctgtggattaacaattattaaataagttttttttccttttcagaagaatcggactctgaaatacctaagaatgactggaaacaaaattgaaaataaaggtggaatgttttttgctgcaatgctgcaaattaattcatcattagagaaattagatctgggtgactgtgatctggtgagtaaactggttatgagaaaatcatccagatagtgggtcattagagaacagctaaatcagagtcttatgaatgattaattttgcctcttatgtctaatatcagagaaaaggtgtttttcccctagacat

SEQ ID NO: 30963 - DNA, 2300 bp, Homo sapien
cgtagtggggggcgcctgtaatcccggctattctggaggctgaggtgggagaattgcttgaagctcggaggcagaggttgcagtgagccaagatcaggccactgcacttcagcctggaccacagagcgagactctgtctcaaaaaacaaacaaacaaacaaacaccccaagaccctagtaggcacagacacaagcggctggatgttgagaggaacacaccggcggaggagcacacaggtggctggacattgagaggaacagaggagcagaagagcacaccgacaggcaccagcggacgctgccaggtcaccgacaagcagcacgatgtgtagaccgaggggaatttggccagggcagtcagtggagagtctggctgctgagcggccggactccaggggaaaaccacctttccactccattccctttctggctccccatccatctgttgagagccacttccaccaatcaataaaaccttgcactcattctccaagcccactgtgtgatccgatttttccggtacaccaaggccagaaccccaggaaacagaaagccctctgtccttgcggtaagacagagggtctaactgagctgattgacgcaagccgcctatacacagcaaaactgaaagagcaccctgtaacacacgcctactggggctttgcttcagcagctgtaagcattcacccctagacgctgcggtgagttcggagcccacgtgccccacaacctgcccgtctgcatgctccccctagaggtttgagcagcggagcaccaaagaagcaagccacacccccattgttaccggtagaaggtgtccaggttcttggcgtcttgaacaaagaattggacaaaacgcacaaagcaaggaaggaatgaagggatttactgaaaatgaaagtatactccacagtgtgggagtgggccgagcacaggggctcaaagaccccgttacaaattttttgggagtttaaatatcccttagaggattccattggttacttagagtacgccctgtgtaaatgaagaggatgaagtaaggttacaaagtcgtttatggtgtacaccctatggagaggatatttcctgttatagccgaagtgcgaatcggccttatgttccctacctccagaccctattttcctgcctcaccatcgcatgccctgcaagggggataaggaaactattaccatttcagtatcaaggaaatgaaacttaccagatcgtcacatctggacaatgagacaccagatccctcacccaccatgattccctaaacgaccacctgattcctgttgaccaactcctcttccttacccctccctaattcctgatttcctgcaagtagtcacatttctttcttgctatgtaaacccttgattctagttggttggggagacagatttgagactgatctcctcggctgcagcaccagattaaagccttcctccctggcaattctcattgtttcagtgattggcattctgtgccaggagcagctggatctagacggaacccctggccttttagtaacacatgtggatctggccctgcccgcctccccgctgtctgtactgatctgagtacattcaagtacctgcgcatgcccagaacgcaccaagcattctgtcctctggcagcctccttcggaccatccagatgtcacctccttcaggaagccctccctggtggccccgccctttgggagcacaaaaccctttatgctcccaaagcccaacgcctttatcatgtgctgatgctactctgcttcttcgctggcccggcaggccggtgcacactttgtaggagcgggctttgtcataatcttctttgtagccccagccctagctcagcagcggagcccctcaaacctcgggaactcctccctgcaaaggagccaggacgccctccctcaggctgcctttaaccagggcagggtgacaaaggacctccacagagtaggcggtcactgccttagcagtgaggcctcagggcccgggcaggcacagccagcgggactcgaagcaggctggcgccgaggctcgtgtagccgcctcacagctgcaggcggactgtaagtgcgcgcgcggtcgccatggcagcgcagccgccgcggccagtgggtgagaggagcatggggagctcccgggaggccgcccgtgcgccggccaggtccccggcttgggcctccactcaggccagtactccgggcgcggccctggcggtccagcgcggtaagaagtagggagcacgtctgcgcggcctggcccagacaaaacgcgcgaggggcgccggggtcg

SEQ ID NO: 30964 - DNA, 2300 bp, Homo sapien
gtagccaaactagcatggtactggcataaaaatagatacatagaccaatggaacagaatagagaacccagatataaatccatcatctacagtgaactcgtttttgacaaaggtatcagtaacatatattggggaaaagatagtttcttcaataacggttctgggaaaactggatatccatatgcagaagaatgaaactacacccctatctcttgccacatacaaaaatcaaatcaaaatggattaaagggccaggcatagtgcctcacgcctgtaatcccagcactttgggcggcagaggcaggtagatcacttgaggtcaggagtttgagaccagcctggccaacatggtgaaaccctgtctctactaaaaatacaaaattagctgggcgtagtggggggcgcctgtaatcccggctattctggaggctgaggtgggagaattgcttgaagctcggaggcagaggttgcagtgagccaagatcaggccactgcacttcagcctggaccacagagcgagactctgtctcaaaaaacaaacaaacaaacaaacaccccaagaccctagtaggcacagacacaagcggctggatgttgagaggaacacaccggcggaggagcacacaggtggctggacattgagaggaacagaggagcagaagagcacaccgacaggcaccagcggacgctgccaggtcaccgacaagcagcacgatgtgtagaccgaggggaatttggccagggcagtcagtggagagtctggctgctgagcggccggactccaggggaaaaccacctttccactccattccctttctggctccccatccatctgttgagagccacttccaccaatcaataaaaccttgcactcattctccaagcccactgtgtgatccgatttttccggtacaccaaggccagaaccccaggaaacagaaagccctctgtccttgcggtaagacagagggtctaactgagctgattgacgcaagccgcctatacacagcaaaactgaaagagcaccctgtaacacacgcctactggggctttgcttcagcagctgtaagcattcacccctagacgctgcggtgagttcggagcccacgtgccccacaacctgcccgtctgcatgctccccctagaggtttgagcagcggagcaccaaagaagcaagccacacccccattgttaccggtagaaggtgtccaggttcttggcgtcttgaacaaagaattggacaaaacgcacaaagcaaggaaggaatgaagggatttactgaaaatgaaagtatactccacagtgtgggagtgggccgagcacaggggctcaaagaccccgttacaaattttttgggagtttaaatatcccttagaggattccattggttacttagagtacgccctgtgtaaatgaagaggatgaagtaaggttacaaagtcgtttatggtgtacaccctatggagaggatatttcctgttatagccgaagtgcgaatcggccttatgttccctacctccagaccctattttcctgcctcaccatcgcatgccctgcaagggggataaggaaactattaccatttcagtatcaaggaaatgaaacttaccagatcgtcacatctggacaatgagacaccagatccctcacccaccatgattccctaaacgaccacctgattcctgttgaccaactcctcttccttacccctccctaattcctgatttcctgcaagtagtcacatttctttcttgctatgtaaacccttgattctagttggttggggagacagatttgagactgatctcctcggctgcagcaccagattaaagccttcctccctggcaattctcattgtttcagtgattggcattctgtgccaggagcagctggatctagacggaacccctggccttttagtaacacatgtggatctggccctgcccgcctccccgctgtctgtactgatctgagtacattcaagtacctgcgcatgcccagaacgcaccaagcattctgtcctctggcagcctccttcggaccatccagatgtcacctccttcaggaagccctccctggtggccccgccctttgggagcacaaaaccctttatgctcccaaagcccaacgcctttatcatgtgctgatgctactctgcttcttcgctggcccggcaggccggtgcacactttgtaggagcgggctttgtcataatcttctttgtagccccagccctagctcagcagcggagcccctcaaacctcgggaactcctccctgcaaaggagccaggacgccctcc

SEQ ID NO: 30965 - DNA, 2300 bp, Homo sapien
ggcttattaaagtttttatataaagaggaatttcccagacatattttcaagaaaaaattattattatttttaaatatgagtatggtaacctagcacttaactactatacatgaagaaatgtgcaaatgcttcccccttttcattcaaaagccttccttcctctggcatggtcctttcttgttgccttattagcctcctggttgctttctattctcctgttcctttcctctccttcacatcctcttctgttccttggttcttgtgtttcttggcttcctggctcccctgttccttagtgtactgatcttcacagagaactggctgggcctcagaagctgggtgtggtttcacctgggtaaattaccacatcctggagcaccctccagcactgttttcttaggacttggggagttggagtcagtgcatttggggggaggataaaaaagtgaaaccatttactgagctagctccccagagaatagccctgtctaaatctccaaatggtgaaattggctgaaaatgaccatggaggtgtcctgggtggggggccagaagagtagcaaattgagaaaggcctggggtgatggtggaatcagggtgaggcagccagggctgcaggtcatgtttagatttatgagttagcgcccctttccttcttcttttccacctaaccccctgagactctagtcagctgtgctgctgtgcatggagtaattgtttagttccactgctgtctgttgctgggtaaaccagggctgggccctgctctaatatgaaaggaagattttaaaagaaaaatggaatgtccaattgtgacttccaaagcagtgctccaagtgcatggaacattccagccctcacgagtggaggtgggctctgcaaggtccatttttaggattccctgtgtaaaatgtttcttggaccattctggaacataatgttacagaaagagctattttattagagaggagactatgaaaactgtaatttcaagaatacttctgctgggcatgatggttcacacctttaagcccagcactttgggaggtcgaggtgggcggatcacttgaggccagaaattcaagacgagcctggccaacatggtgaaaatccatctctatgtcaaaacaaaacaaaacacttctgtgtatccctttagtttaagtccttagccctcccataaaatataagcaaatttcaggagagataatagattgacctttacgaatcctttttagcttcaattcataccagacctcacccctaacctccacaccccctgacccacatccccacctccaatgctaggctcttccagccgttcctgcctgggagctcttgagcttaccctttcttctgcctgggatactcttccctctcttaaaaagctaactcgcagtccttcaaaacccaggcaatgtcactcactgttccaagtctgttctccaaggcatgcttagtttactgtgggttccctgaccacctcccatctcttggctcttgtcccactcaatcaatggcatacaggtccatcttcccaccaggttaagatcccatcaaagacaagaactgtctcttgttcgtcattgaatcttttgcatttagaacattaactggcccacagtagattctttaaaactatttatggaatgaatgaattctttactgccaacatgtttcagtggggtggtggtgcagggttgggggtagagaaaatatgaatatgcaaagagaaaaaggagcttatgtgcaaaggaaggaggtgggggtcaccagaaggcagaggtcgctgaaggcaaactcctctggggacagctttgcaaatggccagtcccttttaaaggcatattaagtcttcaggtaactaattgacagctgtaatttaagatgtgttgacacacttgatgtgcttgccaaagtcatgcttaatgacttgtatctcacacaatgaaatagggcaaagttaaaaactcaaattgctttgagtttgtattggcttctggatcctgggttacatcattcttattttcatgttaaacattaacagcaataaaaaaacagaaaaagaaaggtggtgcggcagggagtggggggcagtcatgtaggggaggatattttgattgaacacaggcttgacagaatcttcttttcttcttagaaatcctagaaaacagaaagcaacaggaagatgtcttattgggaactacccccatcaacttcaccatgagtcaaacaaggaagaaaacttcctcagaaggagaaactaagccccagacttcaactgtcaacaaatttctcag

SEQ ID NO: 30966 - DNA, 2300 bp, Homo sapien
gaatgagtaccgctgttacactgttagattgatgtttatgggctggtgcaaacctaattactccttatgatgttgcttctatgaaaacaatacatttataagtttctgttgaacaatgtataagcaagtctttcagatacaagctcttctaatatgagactaccagagtgattacaaacaaagtatatgcattagggcggggcgcagtggctcacacctgtaatcccagcactttgggaggctgaggtgggcagatcacaaggttaggagatcgagaccattctggctaacacggtgaaaccccgtctctactaaaaatacaaaaaaaaaaaaattagctgggcatggtggcgggcgcctgtagtcccagctactcaggaggctgaggcaggagaatggcgtgaacccgggaggtggagcttgcagtgagctgagatcacgccacagcactccagcctgggtgacagagtgagactctgtctcaaaaaaacaaacaaacaacaacaacaaaaaaaaacaaaaactgtatgcataaatattataaatgctaataatttatgagacacttcaaaatgcatatacaacacaagaaagacagtttagtaaaaattagggcaaagggaaaataatgttaggaaaaataagatgaagccatagatcatttctggttttaaaatgcatgtctaggctgggcatggtggctcacgcctataatcccagtacattgggaggccgaggtgggtggattgctagagtccaggagttcaagaccagcctaggcaacatggcgaaagcctgtctctacaaaaaaatacagaaaaaaaattagccaggcatgcggtcgtgcaccagtggtcccagctacttggaggctacggtgggaggattgcttgagtctggggacatagaggctacagtgagccatgattgtgccactgcactctagcctgggtggcagagcaagaacttgtctcaaaaataaataaataaaaatataataaaatgcatgcctaaaggcaggtcctgaacttcctactaaccaacacaaagaatgcaacacactagttacgtgattcctgaggttttattttggccttatttttcagaacaacaacaacaacaataacaacaacaaaacaattgtccctagtactacaagctgagaaaaattcctcccatggatcctcaacagaggactctgtgcaatatagttacctaacataatggctaatgtttagtgagaactattcaagcattttgtctaccttgttgccttccctttcccaagaagggctcttctgagatgaggaaactaaggctcagagaagttcagtaacttggccaggccatacagctaatgagtggtggtgctgaggcttattgagtctgttggtcatctaagtccctgctgttgaccactgctttatgaacaataaccctggaataaatacagtcagttccacatgctatttcttataatgagttcaacagccaatgataaaaatgtgtgtcaacaaaggagcaggttaccttcaaactggaagcctaaagcattacttgaaacacaacttaaatttcttatattcaattcttattttgtacttcctactagtaaattactaggaatcaaaaaatatggatgttctttttcaagctataaatgtttctctagcaaatataacaggtcacattttcaaaattccgtgttttccctcttatatagatcacagctctcacacagatgataaagggttttctcactgcctgtgagaattaaagtacagttgtccattatagaagcttctttttaaaatagactgccatctttcatcaaatgtttcagctctgtggaaaataacttaggttttttcctactcgcaaaagaaatgtttccacttgaaacctgttggaaatatggaataggctatatagttccatcaaagaaaagcttattacttatttgcatagtatatttcttttgtgtcaagttgaacagtggtattaagtgaatgcccacaaagcatcttaaaggctaaggaaggattacactaaaggctaagctctgagacaggtttatgcaccttgcagggcactttccttgggcttaacatcttttagcctatctgtagaggatatcagagggcaaagtttctgtcatgaaataggactaatcaacttagttgaatttgtatttaaagcaaggttaaactgaattaagaccatttttgaaagaattgtcagatgtacctttcaacccgcagccagagaagcttctgcagttgaaggccagaaagtctttg

SEQ ID NO: 30967 - DNA, 2300 bp, Homo sapien
gaaatcagaaagaagttgatatacatgccaaagaaggaaaagaagtcaagaagaacagtcaatattgtcaaatactgagtaagatgccagctgagagaaggtattgggtttgacaaaataattgttactggatggtggaggtagaaaccaaattgttgtaatctaaggagtgaatgacagaacaagaggacactaaattaaagctctgctgatgaagaaaatagtaaggcagtaacttgaggatgagtcattgtctataaaggatttttattccccaccatagtcctaacctaacatttgacatctatctagtaggcactcaatacctactgaatgcaataatattttcatttatagaccaggtctcctataaaatagtccagtgtttatgtccacataaaacagcacaaaacagattcatcattctgggtgggtagagggattgaaggaaataaagacatttcatattctatattatgttttgggttaattggcaagaataattacttctttctcaccccatccctgactatacacacacccaaattatagattatagaggagaaaggaattaaatgactcctgagaccagaactgcatagtccaaaaaaaaaaaaaaaattcagcaatcttactttattaaaaaattaggcatcaagatgctgcaatttgccttacttacatatttaattgctcttaggttagatatataatatgggaaacctggaaaaaaattttaatggtataataaacgcttacaacctaacattaagtgaaaaaagcagctgccttattgcatatgatctcaatttgggaaacaggaaaaaatataaatacaaacacacatgcacacacacacacaaagtcagaatactataagaaaataaactgaacggtcacagtggctcacgcctgtagttccagttactcaggagacagagacaggtggatcgttttgagcccaggagttcaagacccgcccgggcaacataaggaaactccatctccacacaaaaaaagtaaaaattagccaggtgtggtggctcatgcctgtagttccagctactcaggaggctgaggagggagatcagttgagacgaggagttcggtgatgcagtgagccgagactgcgccactgcactccagcttgggcaatatagagcgaaactcagcatcaaaaaaaaaagaacatctttctattctgaattttcccaattttctacaattaaaaacgctttaaagatctctataaagtcagtcaagggaatttctatctaagcacttaccagcaatttgagctccttctcttttggtctaggtggctctaaaataacaataaaggctacagtgattgaaattcaccagacttgaaatagactgcagccttcttccttcccaccttcttagaatctttgtcctattcatcttccttacgcttccccgggttctcttacttctggattctaacagtgagttgtgagaagcaacgcggaaaacggaatggagactccagcttgttttaaacgagctgtattaccccgcacagtgcaggagaaaagataattggctcaggtctcggctctgccatctaccacctgtggagccttagataagtcagttcttatctctgtcactcaacggtctcggtcttgtcatcttttacatggaatgtcatgaaatatacagtacattgcaggaactgcctcaggtaaagacttctagggttcagtaggtctcagtcgatccctctgagaaaggccgcaccctaaatgcacagactctgactctaaggggatggggtcggggaatctgcattttagtagcttctcaggtgattcagatgctcagtcaggattgagaaaccaggactcttcccagccctcctgttctctgatccacttctctgcttcctccacgtcctaacgattctccagttcccgcacagcaggagcggagggaagaggggagagaaggcaccgctaaggaccgctggccccgccaggcggccgacctccccattccaggggcgccagccggcggattacataacgggcctcggggcgcgttctcgcgaggtttccaccgccccctcctcgctccacgtcagagggaaccgggcggagcggccaacatggcggaacgcaggagacacaagaagcggatccaggtagcaaagccgagctctgggcagggggcttcggcgcgctggatagtggaaggggcggggaaagccccctaaaagggcgagcgaaagcaagggcgaggtggggtggggtggggtggggttccgccgcgaggca

SEQ ID NO: 30968 - DNA, 2300 bp, Homo sapien
agtagattttaataatcaatcctcaaataatagaaagtaaacagctatactctacataactcccaacctaatagtttactgaatagagggttgttaatctttcttcagcatatcaaagagtagttaacaaaaaataaaataacaatccaatctaaatccttcatcctgggtaaggagtagaatagaagggaggggctgcgtgccaaacacttttaataacttttaataaataagttgactcacctattattttcacagcaatcttaaagtttttcttttttcttgctttttttttttttgaggtaaatatgttttcttaccgatgcagacagggaggtaaaaattaacttgctcaaagttactcagccaataattggtggaggtggggtacaaacaggcagtttggctcaagttttagctctctgccactgtcacattactccacagcctctgtttaatataagatcacaactaaataagagcagctattcaaaaggtgaattatatagcccttacaacaatattaaagagcaactggaattgtaaaacaatgtgtattgaagggcataaaattgtactgtcaagtgtaaatctaaggagttctgtaagtacaaatctgacagacaatttcaatatacaatctaataaaatactgtatacccacgtcagaggaataacactaactcttgaaagattaagaacagtataattagaaacttctactgatcttaagacctagtcttatctgtctgaactcgaaatctgcctctttctaattcccttctgcaccctgttcggaactactttatttctgccaaattccaaaattccaaatttactgatcatgtgtgtctttttcacagcacttaaaaagtttacagaagaattttaacttgcatagctcaaaacatctgtattgtacgccaataaatcgataaacttaaaaaaaaaaagaagggataaaatggaagaaagaaaaaatcattctaagcaatgaaatagtaaggaacagaaaggcaatgatgaatgtaacaatttatgattatagtaacaatttactacatgtgatcaatttgagggcttatgaaggtttctcagcacatcagctgatgagacgactaataaatatcctgagtccaagatgttctacataattaatcctcttggcaaagaacaagaaccagggaaaatcgcaaggaagaaatgcacaaatgacacgcatgtggaattagggggagatgttatgtacgttactacgaggatgacacactggcatgtgaaaggtttctgggctccaccagctcgttgcagcaccaacgaggttgtggttgtttacaccacgtcgcccggaaaaaagccggcaagcttcaagtggactattaagttaataatattgaagggaaagaagggcaacgcaactgaacatctggatgagcagatccctgcctaggccccgaggcagctgaccaagtccagatcattcccccttacggtctatgcgcacaaagaaccagctgctttaggtcagtccgccgcctcctgctacccctattaccgtggccttaatttcaggccagctaaggccagaggatggggtgaagggaggggaggagccccgggaagggtcagcgtctgcgccccaggggaggctgaccttccagctcaggcccgggacagcgcgaccacaggaactccaggcccacagccgcgcctccgcagccggattctgagcgcggcgcctccttccttcccctgctgctccaccaccacctccgtctctgtctccgccgtcgccaacaccgccccccctcaggcccctcacaacgcgcagcctgcagccagctgcctcgcggcggaaccccaccccaccccaccccacctcgcccttgctttcgctcgcccttttagggggctttccccgccccttccactatccagcgcgccgaagccccctgcccagagctcggctttgctacctggatccgcttcttgtgtctcctgcgttccgccatgttggccgctccgcccggttccctctgacgtggagcgaggagggggcggtggaaacctcgcgagaacgcgccccgaggcccgttatgtaatccgccggctggcgcccctggaatggggaggtcggccgcctggcggggccagcggtccttagcggtgccttctctcccctcttccctccgctcctgctgtgcgggaactggagaatcgttaggacgtggaggaagcagagaagtggatcagagaacaggagggctgggaagagtcctggtttctcaatcctgactgag

SEQ ID NO: 30969 - DNA, 2300 bp, Homo sapien
ctgtgattcagttggcctctgcacttctccaggaagttctctctgccactccaggccaggtgaagctgctcctcagtctccctagcaacccacacttaattctatcagggttcttcttgcacccttgggcaattactgagttccttgcaaggctagtccagactctcagtgtataaaccacccttgaggtaactaattccatcttagaaaaaccctccattttatatttcatgggcactttgctaacaaggataagatgttttgcttgacgaacaaattttaaaaaagaacacaaacaagcacactcatccactataagttctcaccagaggaccctctgactgtaaaagagcgaagccttcagcttggctgtcttcactaacaccgtcttgcagtcactcatgataagaactcagaatttgccaccgaaagctctgccacatcaaagactcttccttgcaagaccaccaggcccagaccaggactccctttgtcttcttccctccctttggactggttcattaaccctttctcctcttcttcgtcttgatgttaaatattactttgttgtggaatgtttaatctacaacattcgtatagtgattaagtatactagtatgtatggtttgcaatatttactgacttatggagtggcttgaacctatgtgctctgactacagagtgaatgggaaggactaaggagaattgcctccttgggaactccatgtagctcctggattttgtgattgaaatagcatttaaaaaaaaaaaaagactgacattgtggagagatacaaacgtgtatggacatggtcatctttaatctctaactgctatgacactcagagaggttgagaggctcaggacactccccttgttcaaggctctgcgtgaagaggagaaggaagaaattgtgcaatattttattttattttatttgtttcagatgaagtctgtctctgttgcccaggctggagtgtaatggcgtgatcttggttcactgcaacctctgcctcctgggttcaagtcattctcctgcctcagcctcccaagtagctgggactacaggcatgtgccattacgcccaactaatttttgtatttttagtagaggcagggtttcaccatgttggccaggctggtcttgaactcgtgacctcaagtgatccacccgcctcggcctcccaaagtgctgggattacaggcttgagccactgcgctggcctaattgttcgatattttaaatgtttaaatgaccggcaagtcgtaggtgctcaacaaatatttgttgaatgacaacaaattagcactgttgacacaaaaaaggcaatgcaatatatgggctatttaatatttgcagatttttatttaaaaatctgaattcacagtacactgcaggcggttgcttagaagcatacaagtttcaagaagttctgtcaccctgtgtatactcttttttttttttttttttttttttttttttttttttgatacggagtcttgctgttgctgcccaggctggagtgcagtggtgcggtcttagctcactgcaacctccgcctcctgggttcaagcgattctcgtgcctcagcttcccaaatagctgggattacaggtgcgtgccaccaagcccggctaatttttgtatttttagtagacatggggaccaacgtggaccatgttggccaggctggtctcaaactcctgacctcaagtgatccgcccaccttgacctcccaaagtgctaggattacaggcatgagccaccgcctggccaccctgtgtaaactcttatctggagacaactgccaagtttacatttgcagaggtaagggaaggagaggccctgacccagtggcccccgctcgcccgcctgctggggagatggggagctcctaggacaggggccgggtcctcaagatgtggcatgaggaagggggtctcactgagcccccaagcggctcccgcactgcgcacccctggctgcgtccctctgccagcctcaactcagccctctcctagccggcggggggtgacagtctctgtgatatctttccgtcccgccggcaggcggcgccctccggcccttgtttcgttgggcccggacgggacgtgcgcgctcaaaggttgcccgtctctgacgcccgcatttcctggtctggagccggctgagccacagcagggtcgccgcggggtcccggggccgtgctcccctgcccctcccgggagcgcgcggggcggggcggggcggggcgggaccaggcgggcgagctgggccctcgcccctccctcgggcggtca

SEQ ID NO: 30970 - DNA, 2300 bp, Homo sapien
cccaggctggagtgtaatggcgtgatcttggttcactgcaacctctgcctcctgggttcaagtcattctcctgcctcagcctcccaagtagctgggactacaggcatgtgccattacgcccaactaatttttgtatttttagtagaggcagggtttcaccatgttggccaggctggtcttgaactcgtgacctcaagtgatccacccgcctcggcctcccaaagtgctgggattacaggcttgagccactgcgctggcctaattgttcgatattttaaatgtttaaatgaccggcaagtcgtaggtgctcaacaaatatttgttgaatgacaacaaattagcactgttgacacaaaaaaggcaatgcaatatatgggctatttaatatttgcagatttttatttaaaaatctgaattcacagtacactgcaggcggttgcttagaagcatacaagtttcaagaagttctgtcaccctgtgtatactcttttttttttttttttttttttttttttttttttttgatacggagtcttgctgttgctgcccaggctggagtgcagtggtgcggtcttagctcactgcaacctccgcctcctgggttcaagcgattctcgtgcctcagcttcccaaatagctgggattacaggtgcgtgccaccaagcccggctaatttttgtatttttagtagacatggggaccaacgtggaccatgttggccaggctggtctcaaactcctgacctcaagtgatccgcccaccttgacctcccaaagtgctaggattacaggcatgagccaccgcctggccaccctgtgtaaactcttatctggagacaactgccaagtttacatttgcagaggtaagggaaggagaggccctgacccagtggcccccgctcgcccgcctgctggggagatggggagctcctaggacaggggccgggtcctcaagatgtggcatgaggaagggggtctcactgagcccccaagcggctcccgcactgcgcacccctggctgcgtccctctgccagcctcaactcagccctctcctagccggcggggggtgacagtctctgtgatatctttccgtcccgccggcaggcggcgccctccggcccttgtttcgttgggcccggacgggacgtgcgcgctcaaaggttgcccgtctctgacgcccgcatttcctggtctggagccggctgagccacagcagggtcgccgcggggtcccggggccgtgctcccctgcccctcccgggagcgcgcggggcggggcggggcggggcgggaccaggcgggcgagctgggccctcgcccctccctcgggcggtcacctgggcacgggcgctgcaggtgtcggggcctcaaccttgcggagccgacagccatcgatcctcgggtgagtgcgggcgcaggtggagggcgcccggcgctctcgccaccggcgtcccagcctcggggcggcgaacggtccccgcgccgctcccagcctccctggccgggcgttcagcgcgcctgggaggggaaggaatttcctttgcaggaactcaggggctgggggttctctgctacttaagagatccaggagtggagcccggacgcccgagccttcctgcttcgggatggggattaccgcggagccttagcaactggggtctgtcgtgggtttgagggcagggggtctggggaatgggcgtgtcccgcacccagagactcgccaccctctctccaggggagatgctttttaaacatgacaaacccagcaaggttatagaaatgggtgtatgcaactcttcgctctttcctggcgcccagaggtgaatagtctcacacacacgcgcgcgcgcgcgcgtgcgtgcattcattggggccgactttgcctcccctcccctggcctcgagcgttggggacggcgcccccgcccgcgcccgccactgggattaagccccagggccttgcccggctatttgttttccgaggccgttgcgtccgggtaggttcctggatgaccatcctggctggctcaaaattccctctagattacctgcgaccacccccaggaacccggagactgaaactccttttctcacctgcgcaggtggcctcgaggtggtggcagggccgccccctgcagtccggagacgaacgcacggaccgggcctccggaggcaggttcggctggaaggaaccgctctcgcttcgtcctacacttgcgcaaatgtctccggtaaggggaagtgtcgcttaaatcccagagataacccccaccgagaagcatcacaaaagacatgaacgagt

SEQ ID NO: 30971 - DNA, 2300 bp, Homo sapien
gtctctaccaaaaatatagaaaaagtttgctgggtgtggtggcacgtgcccgtaatcccagctactcggaaggccgaggcaggagaatcgcttgaatccgggaggcggaggttgtggtgagccgagatctcatcattgcactccaacccgggcgacagagtaatactccgtctcaatttaaaaaaaaaaagtttaataacaatgatatatgagcaagtcagaatgaaagaaaaagcagtaatattttaaagcatctacaaggactttttattttcttttgagatggagtctcagtctctttcccaggctgtaatgaagtggcactgtctccctgcaacctccatctcccaggttcaggcgattctcctgcctcagcctctggagtagctgggattataggcaggtgccactacacccggctaattcttgtatttttagtagagacagggtttcaccatgttggccaggctggtcttgaactcctgacctcaggttatccgccttcctcggccccccaaattgctggtataacaggagtgagcctctgtgcctggtctacagggacttttaaaaggagactttctcaatgaattctagaagtagtagtagatagtactgctattaggtagacaaggtaaaaaaaaaagatgttatcagatgggaaaagtgggcaaagggacaatttaagctcacatagatgggaagtgttcttttcccttccttaggcacatcctggcatataggatttctaagactaagtatacttttcatcagaccatattacacttccggatggatttatatcaatacttcattctcagttcttgaaattattgtgactccatcacctcacaaaatgcaaaaagagacattgtttatggttcgtatgctttttttttcctgtaaagggaggtaaagatttattatacaccttgaactttaaactttccaaagcacttaatagatctgtttcagaacactttttcctcagcctcctgagtagctgggatgacaggtgcgcgccacgacatccggataatttttgtattttttgtagagatgggatttccccatgttgcccagggtggtctcaaactcccgggctcaagcaatcctcccaacttcacttcccaaagtgctggtattatgagggtgagccatcgtcccggtcttcagaacacattatattgtatgcaaatgtctataaaacccgctccgctacttcttggaagacaaggactcatctttattatttcatatttatatttaaatgtgttattttacttatctttatatgtttgtctcacacacctgagttgttggcatttagcagactacactagcaaactggtggctgttcctgcttgttccttgtggtgttcaagtttgcaattcctactaagcgctcagcaaattcatactgaagacatgaatgatatgcctagggtagtcaggatgattccttaaccactcattcactggcatctgaacactatctttcagctggagagaggtactgctggttgggaccctcaagccccaaagctcccaggcaacaagccctgcagccagccctgaatttcctttctccctgagacctcagcctctaatcctcgtgggtattttctttgaaaccactctgcagtttgcataggctttggtatattttagatattcttcaaaattattattattattattattattgttgggcttttttttggtagagtcagggtctcactttattgtcaaggctggtcctgaactcctcgcttcaagagatcctcctcaacctcccagagtgctgggattacaggtgagccaccgcgcccatattctttaaattttaaatttaacaatctaagataactttttatatctttattacagatatctccccaagaggaagatcctggaggagagaaagagaggggtttggagaggagacactggttatcttagtgggggaaatctggtcactttccagaaagagcaattcctatggtgggcgggggcgattggaagctgaggacgccacgtgacctctggctccgggggctgagccgaccccgcctctccgcccgccgccggggggcgcatgcgcagcccatgttagtgatggaggagagaagatggcggaagcggagtgagtgactagatggtgactgatgtcgtaactagggggggcgagttggggcagcgacacgttcccccaggggaaagctcagggctcttttgcgggcagtgtggggaaagagagactcgagacccgtcctatcgtggaggagccggctaggccc

SEQ ID NO: 30972 - DNA, 2300 bp, Homo sapien
tgcctgtagtcccagctactagcgatgttcagaatagaaaaactcatagcaacagaaaatatattattggttgccagaggttgaggagagtggggagtaactgctaatggatatgcagttactttcagggtgctgaaaatactctggatttaggtagaggtgatggttgcaaaactttgtgaagatacttaaaactatcaaattttacactttaaatgagtaagttgtatggcatgtgaattatctttttttaaaaaaatgagacgggatctcactgtgcattgtgttgcccagggacggagtctcgctggagtgcagtggtgcagtctcagaggctcacagcaacctctgcctcctgggtttaagcgattctcgtgcctcagcctccggagtagctgggattacaggtgcccgtatattttataatatattccataattaatcgctccgtattaaacttgctgatgcaggtctccaattactgaaaaacctgataccaagtttttcaatgggatttttttgtttgtttaagagatggggtctcaccatgttgctcaggctggccttgaactcctgggctcaagtgatcctccagcctcagcctctcaaaggctgggactacaggcatgtagcactttgcctgactcaaggggaatttttagtaagagtatataatccaagtctgtagcagttggaggatgtcgtaccacgctgaagtgtcacacataactgatgactcagtcccccaagcctattttatcatcgtaaagaaagctatttctttgattattccaactctttcagcaccaggactgctgcaggggctggattcatgctacctgtagttgcagtgtaaattatgtgtcagagccaagatcctaggaaagtcaaagactaggttacaagagcgattctttttttttttttttttttttttttttgagacagagtcttgctctgtcgcccaggctggagtgcagtggcacagtcttggctcactgcaacctccgcctccctggttcacgccattctcctgccttagcctcccgagtagctgggactacaggcgcccgccaccacgcccggctaattttttgtgtttttagtagagacggggtttcaccgtgttagccaggatggtctcgatctcctgaccttgtgatccgcccgcctcggcctcccaaagtgctgggattacaggcttgagccaccgcgcccggccaaggacgattctttctaatctttggtaagccagtttttacagaatgaaatgctcttggattgactgacttgattgggtaagtattcattgggctcttgttccatgcaagggcagtctacaagggcctagatatgggggcccccaaagaagaaaaatcggtttttcatcatattttctggttgagtttcttcctttattatatttgttacatatgttattaaattatttccataaaagaggttatgctgagcaggtaaccaaattcttgttcccccaaaagacatgtataattcagacgatttatgcaattagaagaagggagacttcatcagttaataaagtctagaacgtgaggaagcccagtcatttccaggaccttcagatgcccaagctggatccaggttttccaccccgacagctccagggagcacgctggagagacagacttcaccagcgggaaggcgcggcaccctacgcgcaaggaacctcaagtcccagaatcctatgaggactccaaatcccagaaacctgcacgcaaatctatcccgggtgccaagtcggccgaccgcagacgtgaccaagttgcgaggctagggtgaggtgtcgtagaatttgtccctaccattgtccctgcagggaagagactttagtgatctagagctggtcattgtctctttcacagctcgcgtgaaagcacccctctcggcgtgtttgatgccatgatcagcgtctcccattccctctgtcccctttctctgcccccgtaaggatggttcagcccggtattgaggctccttgagctggctggatggttgcgcccgccctaccccggaatgtgggcctttggagcgagcgaagtgggagggaccgacgcaggaggtgtcttgggcccgggcggctgtagaggcggcggcgcctacgggcagtgggaggagccgcgcggttccggctgctccggcgaggcgacccttgggtcggcgctgcgggcgaggtgggcaggtaggtgggcggacggccgcggttctccggcaagcgcaggcggcggagtcccccacggcgcccgaagcgcccccccgca

SEQ ID NO: 30973 - DNA, 2300 bp, Homo sapien
gtgaatcacctgaggtcaggagtttgagaccaacctggccaacatggcaaaaccccatctctactaaaaatacaaaaagccagaggctcggcacagtggctcactcctgtaatcccagcactttgggaggccgaggcgggtggatcacttgaggtcaggagttcgagaccaacctgaccaacatggtgaaaccccgtcactactaaaaataaaaaattaggtgggcgtggtggtgcatatctgtaatcccagctacttgggaggctgaggcaggagaatcgcttgaacctgggaggcagaggttgcagtgagccgagatcgcaccattgcactccagcctgggtaacgagcgaaactccatcttaaaagaagaaaaaaaagccaggcgtggttgcatgcacctgtaatcccagctacttgggaggctgaggcgtgagaatcacttgaacctgggagacagaggttgcaatgagccaagatcacgccactgaactccagcctggatgacagagcgaaactcggtctcaaaaaaaaaaaaaaggaaggcttgagttttgtgctgcccctcttttttggtttagaattttgtaccgtataatctataggaaagtggttaagttctaggtacatatgttctgttgaatttcatatagttgttaatattagaaagtcttcggttgtgtaggaaatgcttacaaagttttaaaacatgcttaattatgtatgattcagttgtctttagacttttttattgttgattttttttttatttgccttttggccagagaatggtttgaatattagttcattggaatacattgagatttcctttatgacctaatatatggccagtagcccatgtgtacttaaaaggatatataatctttacatgcagggagtctctctctctaatgtctctcttccttctccctcactccacacacacatatagacgtacatatattctacatgtatatgtattttgtatatatatatatatattttaactctagcttttttccaaatctttctctgcctactgatttttagtatgtgtgatctatcattttctaatatagattattctcatattaacttctcctattatgattggagattgtgaaattctcctaataattttgtccttttttactctttgtattttgaggccatgttgttgagtgtatgcaagtgtatatttgttacaatttcttggtgattgtcccattaattattgggtagttcctttactctgcctgttagtgtgttttgccttattttttttccatcctacagctattaaaatacaggcccggcatggtggcttatgcctgtaatcccagcactttgggaggccgaggtgggcagatcatctggtcaggagtttgagaccagcctgagcaacatggagaaaccccattttctactaaaaatacaaaattagttgggtgtggtggcacacgcctataatctcagctactctggaggctgaggcaggagaattgcttgaatccgggaggcggaggttgcagtgagctgacattgtgccattgcactccagcctgggcaacaaagtgaaactctgtctccaaaaaaaaaaaagtgttcttaggaaaaataaacagaaggaaaatattgtagtcttatcaatggttgtattaggaggtgagatttaaagtgcttcttttcttcatgaaatatgccttattctactaatattaaaattttgttattaaattttaacttgtatgtaaattattttaaattcaagtcgtaccttaattgaatcaactctagcaacatctaatgaggacaggttttcttcaagctatttagtggtgatctgtgattttaataataaaggcagttgccaggcatgatggctcatgcctgtaatcccagcactttgggaggccgaggcaggtggatcacttgaggccaggagatcgagaccagcctggccaacatggtgaaaccctgtctctactaaaaatacaaaaattagctgggtgtgttggtgcatgcctgtaattccagctactcaggaggctgagacacaagaattgcttgaacccaggaggtggaggttgtagtgagctgagatcgtgccactgcatgccagcctgggcgacagagcaagaccctgtcaaaaataataataataataaaggcaattgttctagtgatgttaagtgagcttaatgtatcactgcagatgctgaacttatatgataggtgaaatagaaagggtgaatttaaaacagaactttttatctcattctttctttctgttcttttta

SEQ ID NO: 30974 - DNA, 2300 bp, Homo sapien
tgatttctcaaaagtctatttactgtccaatttatcttcgtccttggacatgctagcaagtaattattcttatggctggtaaaatgactgctaaacatttattaataattgcagttttggaattacttttttattaaccagtcatgttggtttctaaaaattgttacttctggctagacacaggagccaggtgctgagagttgacctggtgccaagtttcaggactgtccagtcttcacatcagatcttcagctaggccttctgaatattctcacagttagaaaatctatccccctagactcgcagatgctgtttttcccccactggctctgcacagaacatcattatctttgccacgcttctgtctctatggcaataacagatggaaagtgctgtggaattattcatgttcaggaaaggaggcagtcaagaaggaagaaaaggtgggggggcggggtggagagggggcacgacctgggagctcggcggtggaggcctaaggaagggaacttgggtgggggtgcggggagtggtggggattgagaggcttgtgagcctttcggaggcctgttgtgaggaaaaaaaaaataaaaagtacgagcacaagagtatttccagccggccgactgcaaatgtgggcccccacaggaacaacccgaagcagtaaaactagaagaaattggacgaaaatgggggggaaaaaagggacaaagctcgagtctcctgaattttgtgcactgctactcggtggactatttcagttcctgatcttgtggtggggtggagaaaaggggatttcttggtgtttcgaaatgtgacggagcagctctgcagagttcaatatgctaatcggctaccctgggaaccaggaagaccaccctacacgcctcagagggtcacagccggaaagctcttgagtcctatcttccctacctcgtctcgtccctctccaaaaaaacacacacacaaaaaaacaccctcagtaaacactgtaaaaacctttaatttatagctcccttctggaaccgagagagcagcctggtggggtggaggcaggaggctggggagtagggacagaaatgtttgctctcggttttgccggaactttggccacccctcccgcccggcccgatggcggatggaggtcagccaggggaaggcgtctgggtggaggccgcccgggcgaggccggggccgccggggcggggcggagcgccggcagctggctgggcggccctcgggcaggaggccccgcgggggcgaggggcagcccaggagggaggtcccgcgggggcggggagcagagccggccccgggggccctgcagggcggccgccgcccggctgcctccggggcggggcggcccagctgcggccccgcagggggagggtcgcccgtgcctgacctcgggcggcggcactctgccgggcgggcactgcctccgccctgccggctgctggggtcgcgcacagtgcaccgcgcggctgccctgccccctcttccccgctgcgcggcgtccgagcggccagggcgcccccgcgtctggcccatcaccacagagcggcgggtggggcgggggcggggcggtggccccagacagccggctgggcgactagaggaaggaaggagggagggcggcggtgagggtggggtggggagggaacatcctgtctgcgccgggtgcaccgcagacagcgccgcgcgccagcttcccagacggcgcgcggggccagaagcgccgggcgcgcgcctggggggaggggcacgcgcgcgagacgacggggccaggggggcgctctgaggagccacaataggccagacggcacgcgcgtccacgagggggccgggagccgcgaagtggcggcggcggcgacgacgccggcgggcccgcgcgcgcggcgccgccgctggctccgttcccttcccctccccctccccgccgccctcgctctcccccgggcggccggagacggcggcggcgtctgcgggaagctgtgtgtctccgcagtgacgtgggcgggccgaggactcggtgacgtcagagggctgtgtgtagcgatgtgtgtggggttcggagccgcgccggcacagccgaagggagcgggcgagcggcgacggcggcggcggcgggcacaggtgcggctccggcttacggcggcgacgcggcggaggcggcgggaggccagaggcgctcaccctcctaggagcccgacggcggcgacaggggcggtggggaattcacaaagctcgtcgagcttacccgggcaccgaggcccgagtagggggtttggatgcgcggg

SEQ ID NO: 30975 - DNA, 2300 bp, Homo sapien
taactaggcattctatccatttgtagatcagagaaagtgaagagattatatattagtacttaaatttttacattttccaaatgaatgaaaatgtatgtttctttgtacttttttaaaaaaatcagcttagtaacaatactatatggtttcaactagtaggtaatctgcttatatttctaatgcaaacttaacaattgtgtactttttaaaagctgcaatatgtgttggaaaatagctgtggtcaattttgttatccatatttcagactcaattttagatacaatggtggctttatattttaagtatatagagctactcaaggagttgaatctccccttttctcattaacacaatttttctaagttgatatggtgtactcattaacatacaccaaatttacttttactttgttcagattgtggaatgaatttccaccagttctcttctttttaatgtgtaccctaggaggaattttactgaggttatagcataccccatgagcacagtggggaagaagaatgtgttgttatgtgctgctgctaaacagaagcagcagttgtaatttgtttttcagtttaaatgtggttatagttagatttttttttaagcagcaacttttcaaaaataaaatgtgataatttctgaacttttgtttgtgttgttaatagtggtgtgaaaatattaacgttcttgagaaaaactgataccactgttgtgtatcagtttctatacaatccataatcctcctgtacagtttttacatgtagttatgagtcttactaaaatttatataatggacttgttttcctttaagttgtaaaatgttaaacaccttgaaggttattttggacttctgtatgtttaaatgttgtcttaccaaaatttgcacgaatggaccattttcatttactacttaatatcaaaatcaggaatttacagtcaactgatagtacatgataggtgcatataggacagtttagttacctgctactaaaagatttttagataagttttagaagataaaggaattccatagtttcaggagggacaacatcttctgcactttttttttgcacagaaaagtctgtcattctctaatggcaaatttcatatttgttaattcttggctcaaaatatattaggtaaaattcttagatctgtttttaaagggagtttcctgaaactatcattaattgacattattaccccatggattttatgggataataaatgtttttcatgttctcttataagatactatgtatgaaattacttcagagagctatatttattttaaaataaattagctagggttaaggttatattctatttccagcatagaaggtagataatctaatggtgtagaaagaatcactaggttgtcatttaaccagttattttcatattttgcttaatagtacatatccaaaaagaattttgtacttccccaaatgtaatttatttactaaattgagtataacctaaatgtgtgttttctattttccatttaaattttgctatattaagactaatttaattcgttgagtcttggaatcttctcaaggaggaacaaatattaaaatgacatgtagaaacaaatttttttttttttttttttttttttttttttgagacagagtctcgctgtctcccaggctggagttcagtggtgcaatctcggctcactgcaagctctgcctcctgggttcaagccattctcctgcctcagcctcccgagtagctgggactacaggcacccaccaccactcccggctaatttttagaaacaaatatttaaaatgacatattctcccaatacaatctatttagatctggagaaggaaaaatcagatatttatgatatagttttattttaattttgaattatttgtgtcacagctcagctttttggaagacaaactcaaacacctataatttcatttatatttctaattcacttggaacctttctgctttatgttacctagaaaatgataatttgtttaacccaaaacttctaaaataaattgcttaatccttgaaatatgttattggaaaattttaagcagtgcttaaacaccattaaattattatgaacttgtaattcagaattgagtaaagaaatattttttctagtccttcatatattgaaaacttgccacatgacattgtatcgtcttcattttccagaagatgcgttggtgtgccataggtttctaacttccttgaaaatagttttttaagtcaattgtaaatatacgtattattgttaaaagtaactttaaactgcaacacatagct

SEQ ID NO: 30976 - DNA, 2300 bp, Homo sapien
attatgaacttgtaattcagaattgagtaaagaaatattttttctagtccttcatatattgaaaacttgccacatgacattgtatcgtcttcattttccagaagatgcgttggtgtgccataggtttctaacttccttgaaaatagttttttaagtcaattgtaaatatacgtattattgttaaaagtaactttaaactgcaacacatagcttcaaaacaatatagagattttgtaataccttataagtggagttggctaaaataccttatccatataaaacttattctattctttgcatgcttattttgtgtgttggttgctagcttaaagtttgatttgttgttactctttgtgtgccaaattcactaggcaagcggatttttcctcagacttcaaaaaataattcttttaagaaaaaatgtaaaaatgtttattctaaaaagctgcattaaagggacaacctataaaaagttttgctagctcatctttagaaggaagaaagaatattagcttgggtgatgtttaatttgggtggcgatagtttctgtaggctaaactttatgagaaaagtgtacctactctataaaggtaataaatgtaaaacctcttgctgttattgaggaagctcttcaactaccctaaatttcacaaatgtaacttataacactatgaaaagatttgaccaacaatttacgtttgctgtgtgctttagtttttgtttaagcatattcttttgcttgaatttctgtgttcatgagagttagggtgttttatgcttcttgaactaattttataacatatttaatatattaccagttaagatataaaatcatttgtacatagcgaattgtaaagcagctattaaagtaggtgaaataaagtatatatttgccggttatccatatcttttagaagtcctgacagaacaaccagtttatttgcacataggtagcttctgtttgaaggaaggtaaagttataaggaaactcaaatactataagatgtgtcaaggtatttctccagaattaattgcaaagctagtgctgaaggattttaatcagcttctaaaattttcttctcaataaggcatatgttttgattacttagggaagattcctcatttttatttgccctttatgcatttaatccacatgataggacattaaaaattaatataaagaaaaatcgtgctcatactgtacatctgtttctgtgcttggaactacttgttaatagtttttatcgaagctgtcagcaataagggacataaaactgctgtattatacattgtggaattgaataaacagcctaattttttttttctagtatagggtacttaagcatttccacttttggaagaaaagtgtattagtattttatattgcatttcatttaaaaggacagttttttttttttttttgtaaatccattcattgaaatggtttctaaactgtataatgtaatttggagcctatttagtaatagaattaaatgtcctatgtagtgctacaatttttgaattagaaagtgatcaaatgtaagaaaaaaatttaaaaattcagcccagaaaacaaaatagtgtattaaattagtttaatgtaaaaggaatttataagatttttttcctcaatatagatacctcacttgaaaagaaagcacagcatacttaaagtagttctagtaaacatgtcctagaaaacagttgctaaatgtaggacatcttttgaggaattagtttatgagaaataaaattttacttgtttttactatcctgttagaagtatttgtttatcctgataattttaagccaacatagtagtcttaaattacttttgaatttctaatctgtgaaggcagtaaatgaaatatctgttctgcaactgttgaaacaaataattggctacattgaccataattaaagttaaaattttgccaatgatgtacagttttatggttaaagttgctgtggttggttgcattacatgacacagaaaactgtcctctacctcacgtgaaataaatattttatatggttttactaaaaataagactcatgtatctggtcacctagtttacaaattttgaattatatttattgaaacatgacatactgtgctctgagcttatacctcaattgtattttgtgctgttttccattttcatgccttgtaaataacttgtatagattgtggatcaaatactaaataaaaacttttaatgccaattaaatttgattcaagttatttcagtatcgtgtgtgagcttaactttctcattccctaagattgacattttctt

SEQ ID NO: 30977 - DNA, 2300 bp, Homo sapien
gacacagatcttgtctcaaaacaacaacaacggcaacaacaacaacaacgttctgaagcatcacattagccaggggtttctgaatacttactttgtaccaatgttactttaagttctgcatatatattactaggttggtataaaagtaatcgtggtttttgccgttatgtttaatactttgcaccaacctaatagctcacagaataaaaaaaaaagtctatgaggtaggtacagttttcatccttattttacaaatgagaaaaggaggccaagaatgataaagtaacttggtctcacagccagaaagtgatggagccaagatttgaacttgggcagttggactgtgttcttagtcactgtgcttcctgggtgattactgtgacccttgtacttgacactctgctatcaattacaagagccatttctgtgtgtgcacttgatttccttggggtctccagggaaatgtaattgtctcctcaagtccaggctttcctagaagacatggtgattgcactgataaccagcattagggctggctttgggaaagctcagtacctatgatttatggttagtatcttagattttagaacgctgagcaggaagtttttgtgctttctgaaatcctcacacctttaagtctcatgattggtgaggaggcagtggtccaagggaatggatagaaggagataataagataagccaaatgtttcaaagggagtgaaaactgttgaatgtaaatgcagctcaaggaagacttccctatctgaataaaaaggtgcaaataatgcggcctatttgtatgcatggtggcttaatgatgttgatggtgatgatgatagctttacactatcagagcgctcattctgggctaggcagttttctcagtggggtacagatattaatttatttacagtgagccagagaagtctgctgtagcttttaatgcgtctaaaatgggacacatgaaccccttaggaattttcagactgatcaggacagtttcctagaaacagttcgtgaaagggatgagatgggcccatggtatctaccccttcctagctgcgtgaacttgggcaactcaaccttcttgtgctgtttctctatggctagtgcgtgtaatttgttgttgttgttgttgtttgcttttgagacgttgtctcactcagttgcccaggctggagtgcagtggcacgatcttggcgcactgcaacctccttcaagttattctcctgcctcagcctcccaagcagctggggttacaggcatgcgccaccatgcccggctcatttttgtattttctgtagagatggagtttcaccatgttggtcaggctggtctcgaactcctgaccttaggtgatccgcccaccttggcctcccaaagttctgggattacaggtgtgagccaccactcccggcctagtatgtgtcattgacaattgttcctacctcaaaggctgttatgaggattaaatgagctaatgcatgtaaaatgcatctgcataatatataacacagctcgataaatgtgagttgctattgttgattattatggccacgtttgccgctgatgatgttcaaccactgaaaagcatcgttttctttcttctagtaactgtgtgtactgaatgcctcgcgtttgtccctactgcacttttcagtctgtcacaatcctgggtcgtcgggggactgtaccgagcgcccttggagtgctcgcagcagggaagaaggagcgagcagggaggagctgaggagggtcggagcggaatggacacccagagactgagatgagagaggggctataagaagagaaaccagtcgcaggaaaacagaactctcgacaaacgcacgccctctttgcgctctccgtttctctggacctggatggaattgttttactttgcatcgccggactgcgctgcggacggggtggggcggcccaatggcccccctggggttactctgctccccttcacgcttccctcccggccccgccccgcgattggccggcgcgccccggggctgccgccgattggtgctcgccggccggagccgcggggcttaaagagggggcgggggcgcgctgcccagcagcgctgctgtccccgccgtgcgcccttcgccgctgagctcgcagcctccggcgcccacctccacctccagtgtcccgcctcgggccgtcgccctccagcggctcgcgagcgtgggagacgtacctgggcaggcactgtccagcccaggcccaggcacagccgtgaggggcgaggcacggggacatcctggcggccaccatggtggcca

SEQ ID NO: 30978 - DNA, 2300 bp, Homo sapien
cctccaccaatgactgggtggtgacctgcggctacaccatccccacctgccgcaagctggatgagctgggctccaaggggctgtgggccgactgcgtcatggccacggggctgtaccactgcaagcccctggtggacatcctcatcctgccgggtaaggacccgagcttggcggcggctcccaaatccttatcctctgggtagagagcgggatattagacggcgtcacagagacattttgggggcttgaagacctttgggtacgtttttgacatccctagtcccaccttgttgtaaaagaattaggcagccccgaacttaacttctctaggccgcagtattcttatctggaatttgagataatagtggcaatgtggccggtggtaacactggccgggtccctttgagaatgaacaaaccggaacacctaataggaactgagtccgtgttaattactgcggtcccagcccgcatccttccaccgtccgcttcccgaagtgcttcccgctcccgcccggcctcccccggggcgccgagccttcgcgttaggttccgcccgcagaggtgagaaggagcgtgtaacacaagctgacaggagaatcgaaccggctcaggctgagtttctcggtcctcatgggatgggcgaagcgcccccggccaggttagagccctcctagctccgtccgcgcagccgctgagcaattcacgtccagggctctctgggctgcctggtttgggaaatgtcacgttgattcccgcacgtgcccagggccatctccgctgcccccgctacccccgcccctgctgtgggcgcgtcagactgcggggctgcggtgacgccggctcccgctccgcgccgctgggttggatagggacgagcgggcgctcctcggagggcggactccactggggagatacggagcgcgccgccgagggtcgctcgccgccacccctccagcgtgtctcagattgggaaggggaggtaaaaattgacagcctagcgccggccaggggccacattttcacatgtgtcctgtggaaacattttgggcgacagcctcaattcagatttaaaccaatgggttgggcaatggcgaggtcgcgggcacccccttggttttctgctggaatctctgctctacccccaaggcatgtccctacaaggtgggcttctgtcccccagccttcgtggattgtgctcacttaaaggattttcccggtttcctcaagatggggagaaacctgtccctgaagccgccagtcagataagactgtgctcgccccttaagcctcctccaagcacgccctatttccggtcctcgcagtcggaatctgaatccctcctttctccttgctgcctagtacttggctcttatcctcacaaaggcacattttatcttgttttttgttgattgttcgtgagtgaagttctcccactacgttttaaattccttgaagatagagatggcgtcctgttattctctttgcttcctcttctggacctggcatggcctctggcacacaatagctgcgggcagtgcttgcctggtttgccttacgctatcctttccttcattttgaactttcagaaggccagaggtcaacgaacgcagatctagactcagctttggctaatgctggtgttggcagacccgggccagcctccggcatccaggactcacaatctgggtgaggggggacaaattgctagcctcagtgaaccacggttgtcttcttttaaaagttaaaatcagatcaaccacccatctttcacgattatttgaggattaaatgagataagaaatgtaatctcctttgagatagtagatgcttcatgaatggtacctatagtattttattaaaagctgggcatggtatttgtagggatctttgaagcataaaattaactttgttttcttctcctgaaattaactttactgagcattcagtgccaagtggtttgttttcagagaacaaaggctgtcctccagaggggagtgcatactctgggggtggggggggggtggggggcggcgctagtccttcctgccttccccctccctcatactttgggtggaggcaggaacagtcctctgtccctatcttttggtgtccggacatggccttggcactgtagcatgtggacagccagtgccatggatttcagaacctgcattgccagttgactgcctgctttgtgtgagtactggctctctacaagccgcagaggcggacggctgggtcaggggatgggcctcagacttcctggagctcctttctggagatcttcaagtcagtaga

SEQ ID NO: 30979 - DNA, 2300 bp, Homo sapien
attttagtttaatggtatacattggctatgattacgatatgtaatttatttaaagcatattttttaaaaactagtttcaattcatctttatatgtatgttaaaacccagtgcatcagcctggagacttgtcaagtttgttgttttatctgcatttaccaggctccagtgctgctcatccatggactgtagcccccaagggcaagtgccatgcttctattcattcctgtcacttagcattgggtctattctcaaccagtgttagttgaatgaaaaaatggacttttacctccttgccataatcctaaagcatgccaagatggcatgagcctcagcctttcagaaagaacagacttgagtgctagcgaatatgttctggaaaacgtttggcatactgatacatccaggagagaaaggacaaggaatttcttcttttgtccctctttcaggaaatcctcacagagattttattaatagcttgattaattttaatagcttggttaattctatgatagcttgattcaaattgtgccttcacatacatttgtacgtatctcagtgcagccacaggaattcttgtaacccaagagtagaatttatattgtagcccatgtgtgtttttttcctttgcaaattctctcatctattctatttctgagaaaattcttttaatagccccttttatggcccaaatttacatcttaccaggtagatatttctctgggcttcagtgaaactactctgggaaataacaggaaaaaaaaatacacctctgaaagtgagctagccccaaggaataaggttcagaagtgaaatgtgatctcatggaatgcaactacctaagtcgctatacttcagcctattttgttttcagagtagcacacaccaatcaagtggttgcctatctcaaaaactttagaatttataattttagaaatatgaaagagaatttgcaatgtgatctcagtggctggctcacttctccttgtaaaaatttttatctgattataaaacaaacaacctactttttcaaggcatatcagtgccatgaaatcatgctccacctttgcccgctttcatcatatcaccaggagctgcagtctgatataagagaggccatgacagagagttaatttctgccaatgcccttctggcttttaccgcaagatatggttatttaattttcttctgggcatttacatagagctttgatggtgcttcttaccatatcactgggtctgcctgactgctttatggtgaatctgaaaccattgggaaaatggtccagagtccctgaactttgctggatcctaaaattatagtttggaagctgtgagaatgttggtgaataaaaagaagcatgtgtcttttccatgaattaattttgggtgagattgcaggataaaatgatgcttgctcaggaagtgccaatgcccatctacccaccctgacctcggggagcagcactcagcctgacatgccaagaacagagctttgtccccatgtctcaggtgactgaaattctgccttctgcccagagcccctgcttgggcttcaaccagcaaagcaaaggcctaggaaacatttggtaccatcagctctggtggttgcacctaagatggaatttcatatagcctcttgtttatttatttattttatttaacaaggcgaccagttaggggacccaggttaagcccttcaacagaactatcctgaagagcaaaagtagcaaatgacaggctatgactagggattgaatttggggaaggctggatttgtgaaatgagagccaaaaaagttttcaccttctagcccacaggttaagttactgaaaatcagtcatcaccatttctacccacttgtgtgtttctcctactctggagagtaatctaactcatcatttgcaatcagggcctctgagttctgtttgtgtttgcttttgctcttcgctttgctacttgtccggccgtttgccttcgcatctgacatctgttggtaatagaagcctttgtcttcagtgggcccgccccagtcctcctggctctcgccctctgtggcgtaggagaaaccctcctccactgagaaggggtcatccacgtcgtagcgttggtacgtgctttggtgcagggcctcttctcgagcgctgatttccagggtgctgttccagatgccatatccaaaataaatgagcagacctgtggggcgaggggaaaggtacaggtgaataagcaattgctttgggatcctgggactagcagagagatcaccttcagtgatgaaatcaaagctggcggggtggggg

SEQ ID NO: 30980 - DNA, 2300 bp, Homo sapien
ctacaagcctcacgccatgcttggcacataacaggtgttccttatatgctggctgagtggaaataaatagacacgtggattcatgtccccacaagacctcaaccaaagcagttgttctagcggccttctcggtaaacatatggtatattttcttgccaatacgaaaatctttagaagaagaaagaggagaggaggaaggggacgtggaagggaggaatgcagacactctagcctgttaaatatctctggcgtgttatccaactatagtgatatctaaggtgttgtcaagaataaaaacacagcacgaagccacactgtcaaagctaggaaaaaattaaaccagaaaggctgtcacccaaacctgtgaaccaaacagccacatttcacctgattcttctaattagcgtttgaaaagcctttagaagcagacaagtgctacattaagtgcttagtattcattaatactatgagtagatgaggtaggcaggtacttactgattatataaatgtcctgagcttgtcagtacagtatttggaatcaacgtctggctatacttcaaaaattctatacatttatgagttttataaattttatacagtttttataaattttctccagcttccggcttccaaagaatgtagcttcatatatttgcagttcctaatttactaaactttagaaattacctaacactgtagttcttaattctatcagatccaacacccctttttataataaatactttgtcatacctccttttagtatcctgaagtgaaattattgatcatctacctatatacaacatatttcagtgtgtaaatacccaggcatatccaaatgacggtgtcaaatgcttgcactatgtgaaaaatcaccgcaaacgtgccagttccagatggcaggctgttccagggtgcagcatgagaaatgcaataccacgggtggcattcccatggggtccttggttttctgaaagggcaaacaactcctcttaagttccaaactaaatacattataatcttcctttgatttattctatagttgtattcctggaaaattcaatttacttgtatattaaggctatccaaaatatcctatgagtttatatgtaaaagagagtgagttgacaggctcagatcatcatcaccaggatttttatctacaggaaagtcaagcaaaatatctaaaagttgtgtgacaacatcctacacaactcacatctcaggttccccccagatgccaggagtactccccaccattccaatgtttgagagtaaaaaaaattcccaaaacattttttatttcatttgggagccaagtgccaaaataacccatggggtggcatggcccctcttaagactcatggatctaattttacatttttatgttaaaaaacatgtagatatcatgtcccctcaaaatatgcccaagaatcacagaccaagtattggcaaagtaagaggtagttagagttgagatggatgagcactttccatacgccaggcattttcttaagctccttatggacgtcactcatctaatcttcacatcaacactaggagagagactttattgtcccattggacagctgagactgaaacacagacatggcttacccaagaccacagagcagtaagtggcagagctctaactcagaccatcctcatcaggatgactgtgcaacacagtgcacgcgccggcagtcctttaggactggagagaagagcaaggagagtggaaccatggaacccttccgtgttatgagcacacgggtagaccagttctaccagttcaggacattaacctccaaccatccccgcaagtcaaggtttgtttctcactcggtctcatcttctgctttcttgtgtttttcctgcagacattcatgcccaggagaaggctgcactgggtccctctgggcctttcctaaaagggagatccctgttcactagatgagttccagaaccatccactaaggctttgtagcccccttccatcagctgaccttcactgcatcccctatcgctcaagatgagtggcttcttcacctcgctggacccccggcgggtgcagtggggagctgcctggtatgcaatgcactccaggatcctacgcaccaaaccagtggagtccatgctagagggaactgggaccaccacggcacatggaactaagctagcccaggtactcaccacagtggacctcatctctcttggcgttggcagctgtgtgggcactggcatgtatgtggtctctggcctggtggccaaggaaatggcaggacctggtgtcattgtgt

SEQ ID NO: 30981 - DNA, 2300 bp, Homo sapien
ttcaagctgctgatgaatgtctagagtttgttcctagaatccaaattttttttctttgaaatcgaagccattttgaattaccaacccaagtcaattttacctagcaaaggcagaaaagtctaaaccctgctgtcttgaaatataggcacaaacttttctcagatagtaaatattcataactattgtgattgtggctggtgttccagaaataaaaggccagggaaatatggagatttaaatcagaaatttatccagaaaaaggtgaaacaaagaatgcagttctccaataatcacatcccctgagctacaggcatacatgcagacttagagcaacacaccaacattttagtagctgcatattccatgacaaatcccatcttcccatcttatcaccctcataattcatttggactagaatagactcagggttttcttcagcccatagtattcatactctttaccttttacagtgacttctcatgtgctatcccatctaaacatcacaaccatcttatatagaaggcaggtagacattcctttcccattctgaagatgagagtctgacaatttaagtgatttgtgaaaaatcatatgataagtagctggcagaacctgcactgagattccaaatttctgattttttaactttgcacttttcctacaatgtctcacagcttcttggtgatcccaggaggtctaacatatcctgcagaactactcaaagcttaaaatatggggatattgtcaggcttagatgctcatcgaaggcagtaacaagcttgaggtaggtggactaaccaagactgtcctggcaatgatcaagcaactttctgggaagagcccagggcagacccacaaagtagagctagatttgaactgctccaccctagaggagtatcagtcagccagtattctccccaaacacaagcccagtgaattcatttccaaggataggagagttacattttgttgcctcccatgtgttttgagggcttgggccaaagtgcaagaatttatgtagataactttcatccaaatcagtctactcaatgcttgttaaataattcattcggtgatgtggccaagcatgcctgggttggtcccatctagtcccaatccttttgggacataacctggctctaggacactcatcttaaaggagctaatacaaaacagaaaccttatctcactcttgtctccgtttagactggtacttgtctagcctgacctcacagatgcctccttccatgtttaaaagatgctttcactgtattagcacacatcacatccttcttgccttgtgaaatttattttaacaaaggtgggggaaaaagaactctcctttattgagctccaaatacctgtccaactctaggctaggcaattctaagaacatgatgatttctcaatctcatgacaatactgcaaggtggttatttcacagacgagagaagaaaagctagaaagttaaatgctccaaggtcatacagattggaatcctaatggctcttcaaatctcaagtccatgatctttgcacccataagatgttgtgaacccaacgataaacttaagctttgaagacagaggtgggtcttgtcttctttaggaggagaggagaaatcaacctctctcattttttctttcctgtagggctcagggatgtggaagtttaagagcaacgaaggctccgcagaggatgagggaagcttccagagggcaggaaggaggtctggacagcccagtctagcaggggcagagctgcggcagatgccttcccaacgcacagacattgcagagtcctgctggtccctgctttcccagggcaaagaactgcccccatccacggccccctcaacctccctgcagcctgacataagacactggaggtcacaactggaggctcagaaggccagcgaggagttgtgagcggcagacagaggggaaggcaggggggccaggtgggaggtggtctggtgccaggcttgggcccagtatgtaaggggttgggcaggccatgtgactccaaggaggcggagacaggcgagctggagggaggacgagcaggcacggggaggggttcggggggtgggggcccaatctgaataattgaggagctgttcagcagcagcggctgcctcctgccttcctttgccgccaccaccacttcccatcccagctagagagacagctccgcgcagtaagtgcggactgccagccaccagccttggcagccagctcgtcgcctccagccccgaccccggtaagtgaacggcccccttcgctgccgtttgtccccctc

SEQ ID NO: 30982 - DNA, 2300 bp, Homo sapien
agatgttcagaggcgcatatgtaacctctgtgagcccggagctcctgcttaccctgccagatgaagccttgccacctctttccatggctagcctggaatctcctgccttgactcttctgtggtgacctcagattgcctcctaggacctcctgagtgggccagcatcatctgctcctcttccaccccaggaatggggaaggggatggaggctgagaacaattggcgacctgtctgaggccaggcagaaatttgtcaccactgatggaacacaagctggcaggccctgggtggcctctttaaaatgttctgcagtgcaagcattgcacactcctggcaattttgtaagggcagtgtccaggacaatagcaaagaaattcttaccttgcttactgtgagtcacatgctgttcttagtgctttactttactgacaaaatcctcgccgcagcccactgaggctgctggtcttattaaccccattttacagatgaggaaattgagatctggagaagtaaatggcctgcgtaatgtcacacagatgtaagaggcaaagaggagtcaaacccagagtctgagtgcctcgttgtgccacagtgaacccttcagacttgggttgggccaccagcctttgcttctcagtgagaaatgtaggttccaggaagatagggtttctgtgattttgttccctgctccgtcctcaccacctagaacctattggttgactggctgccacctccttgctgctggtggtgtccaatcttagctctagaccacaactcaggccgatggttgttccactgggcgcttgtcatcctgcatatgatctgactttgacttcatgccttgcctactgcttgcacttgatttttggcctctatgtaagtgaccagagacctgccccaaggccagagaggcgttcagttgcttgaggcaactcaggctcaaagcagatctgatcttggcataagcacattgagtcttatttccctaccctctgaatgatgaggctggatcaggtgaggctggagtatcagtgtttccaccccttcgctcctggaaggttgggattggggggtggaagagtggggatatggtacaggctgatggtacaaggatttctgtgtgcaagaaaatgtgctccatgccagtctttatgggtggttacagggaggagtgcctggcaccagctacccatccgaagacatttacagtctagcctggatgtagcaggttcccagttgccctcctcctcccacctctggctctagcccaggccagcctgactccaggttccacactgtttccacactggctgttggtgcaggtccacctgaggagaaatcaccttggctccctttctactcccctaatatcttgttttctgcatctgaagacctcctgatctttcttcatctgaataaccacaaagggccccttgaatggtggagagtgtcaaaaggtgcagcctcaggagggccctggagagcacaggggcccgtgttgtctgagaacctgcagtctggctgttccacttctccccctgtgcaggctcaggcttccatctcaggatgtgcacaggccccaagtctggggccctcactctctgtatactgccttcagtgggaataagggatcccaggagaggaggtctggaactttgtcgggggaagctggagagctgggttgggtgggacacagggccagctaaacccaagtccatgggcgggtttcttccctgaacctgttatcctttgattctcatatgaggatgttcccatgataccacagggcactgaccaattctttctcttatgcacatacatgtgtgcatgtgcccagatatacatgcatacgtgtgtgtgtgtcttcaaaaagggcatgagggcaaacctctcacaggatttaatgtcatgcttccaaatgtgctcaagcaaagtcatctatctggaaactctatttctcccagaggctgttattctttaactccctcaaaataggggtcagtgactctaaatgcagagtgacagttaaccaactgtgtaacaccagccttaaggttcaaaggccttaatggaaaagccagcttttaccccaagcattagcagaccagatgtggtttgcagaactttctggagctttaaacagttggaggctatctgtcccttccgggggcaccctgctcagtcaggatacagacttcagacagggagcctccctcaccacagcctgatggctcatcttccaaagggcttccgtgctttcattctttgctaacaaacacaactgaaatcaggagatctgg

SEQ ID NO: 30983 - DNA, 2300 bp, Homo sapien
attgtgtcatacgttttagaattagctgtcaacacaagccataaagaacaaaatcacatactttgcagcaacatggctgcagctggaggccattatcctaggcgaattaatgcaggaacagaaaatcaaatactgtacttctcacttgtaagtgggaactaaacattggatactcatgggcatgaagatggcaaaaatagacactgggaatactagaagtggggaagggttgaaaatctaattattgggtactattttcactacctgggtgaagggatcaatcgcaccccaaccccaccatcattatatatattcatgtaacaaaactgtacatgtaccctctgaatctaaaataaatgttaaaatttttttaattagctgtcaaatttttaaaaaataactatagggtattgactagcattgtgttactatatacgtgtgcacacgcacagtttgggaagaactgaattatttacaacttttagtcttcccatctgcacatttctcgctaatattcttgtttttttttctaattgacaaacatttttcccccattacagtttctaactagttatttggtgattactagttcttgtgaaacaggtatgtttccatatcctccttgtacaaatggcttaatagtgcttaaggagtttattgtcaagacatggaagactgctaaagacaagcaaaatagaatcatttctgcccctcagcttaggcagcccttgaggaggaaatgccaattgctccctttaatgtttggaaagagaaatgtgattattgtagctcttaaggcagacaactaaaaaatcttgttgaaatggatttcttctaggaattcagggcctctcttcagactctacaagtcatatgctctattaaagcatagtttccacgataactacttgctggcataaaggccacgaacagttcttactttctggggtcattcttcaaattaacaacaaagtccaccccatcccttacccctacccctaggtatgataatttcatctccacgaaaacatattactgctaaacccaagcggttcagcatgccacttttcggatctgatgtcaatttacaatccttcaaagctcaaaagctactttttccttttgtcagcaagacacttccaccctcgtgtgtcttgtacatactgataggtcacagcaaacattcattgaattttaactgggagcattttggatggaaatcaagagacctgggattaactgtaaaacccatgataaattataccaaacgaatgaacaagaagcaagcactacgtgtttttccctttgagacagtctcactgttacccaggctggagtgcagtggctcgatctcgactcactgcaacttccgcctctcaaggtaaagcgatgctcctgcctcagcctcccgagtggctgggagtacagacgcgcaccaccacgcgggccattttttttaaaattgtttgtagagacgggttctccctatgcctacgctgccaagggtggtctcgaactcctgggctcaagagattctccggcctcggcctcccaaagtgctgggattacaggcgtgggcgtgtaagcatatatatacatgatttttttttcccgaggacctggtccccgaagcaccaatttccctcaacagtcatttagaaaacgaggctcacagacaaaacacaaacaaataactttttcgctggaggattataactgcaataaaaggagatcccaaagcaacctgagacactgccttgccctgattggaaaggggattccggtgattagtgaaagatgactcctgcatccctcgcgtgcgtccgtatccgggagcagccactaggtaactgtagaggccactgcaattaatcggcttgaacagccaggagcggaaacccgagagtcagttcaaccacagccacccgcgtgtgcccgcggaaagccgatggcctactctcgtccggcagcgcactggtttcctgggttaccggcctcagcgctcctcccgctttcttttccgggaggcgacaatctgacgctctcagcgcgtgacgcagcacgctttgatataaatgcagaccgcgcggccgtagcttcctctctgctctcgcggccgactcgcaagatggcgccggtgagtgagcgatgtcttggtgggagtgttgtgtggcaatttaatgatttccgctgtaacgatttttgcatctgtcgagtggagacgtctcagtcaagataaagggaggggagtagtgaagtctgggtcagaaacacaaccaagacgcgaggatcctgaactg

SEQ ID NO: 30984 - DNA, 2300 bp, Homo sapien
cagtgttcttactgacttcaggagaactgactgtatttattgaatgagtaatgctcagtcatttgattccaaacccaaatcttttgtgaatgcagtatatggtggtaggtagagcagtgactctggaaccaaactgcctaggttccaaccttggttttccaacttactagctttgtaatctggggcaaattgcttttctcctttttccgtaactaaaaatgcaggttaaaaaagtactgttaatatttgccaggggctgggtgtagagggaggaaactgagaacaaaaagccactagaaaacttttggaatgagggaaatattccatatcttgatcatagcagatgatcaagatatgtttttcaaaactcataaaaagaaaagggacaaatttttctttatatgaataacttaacaaggttaaaaatagaaagcagcagtgacaaacaaaggaataatgcacatcaaaaatttagtacactacctgcctatataaatactaaatactattagcgatcattgtaaaaacaatagggaaaagttaggaggtataaggaaaagcagaaagagctaatgaaccaagattctaatctggctctttctttttggggtgttgggggtggggggggtggtctcactctgtcagccaggttggagtacagtggccggatctcggctcactgcagtctccacctcccaggctcaagtgatcctcccacctcaacctccctagtagctgggaccacaggtgcacagcaccatgcccagctaagttttcgtatttttggtagagacggggtttcacgatgctgcccaggctgatctcgaactcctgagctcagggaacccacctgcctcagcctcccaacgtgctgggattacaggcatgagccactgctgtaatggctcctttgtatattagctagaggctgaattcagtacatgagagggcagtaacttattgcgaaagttaaattggacctgtttgaaagatatgtgtaaactgtagagtcatacaggaatgtgagatatgggattattcatgagacagcaataggaaatcaaagttaccacataaatgcgggtgtgggatgggaaataatttcctagatcacctccccaagataggatactgcggtaggttgcgaaatgaaactgtgaagggggagcacatctcttttaagaacctttctatggcagtctacaagctctaggtcaattttgaagaccatccaagcgttctaatgtgccagggttaaaccccaaactctaaggaatgccaatgccaggaggaaagaatggatgagtcggcagaacacctctctggacccacaatgccgtaggagtcagacacccttcgcctccacaacttcccaacagcctttggtgtgagaagtgggttaattcatttcactgctggcttgttagctggcggacgcttcgggagttcccaccccagggagcagtgctgactctacaggggcatccggcggcagtcgctgccaaaaatctcaccaaggggtgaatggggggtcctcaggacctgcggtgccgagctgggtaataaaatactgcacctgaattcttctttaaggaccaggaggaggttcgaaccccaagaaaggctgcaagctgaaccagaagctcgaacccaaagttcgcttcacagccagccacactggcactcgctgaatctgcgcgcctcgcgagttctgacgatcgtcatgtgataactgccacgcacctgatggcaggggccattgggtgctttgcttggttcccattaaagtcgactgcgacccgaacgcaacaaacctaagagttggaaggcgcaagttcctctgccagcgagctcaccctcggcaaccagactgctgaaagtgcgctccacgccggaagtgcactaatccgcagcacgtggggttgccagggcgctcttcacgtgactgggcggagcctcgggaatctggtagccaatggtagcccgagagggcggtgcctgtgacgctccggggcctatcccggaaatagggctgagtgggggcgggtaagggcggggaggctggggtgtggaaagtgtggcggccccgccccgtctcttggaactgccgcggccgccaccgccgctgccggcgccgctgctgtaggggaccagcgcgggtgcgcagacgaaaggcgctctttgccagctgaaaggtgaagacctggggaaaagctggtggggaaaagctggtggggatggggccagagtgaggcagggccggggaaggcgcccagaactgagcgctgaccgagagaaag

SEQ ID NO: 30985 - DNA, 2300 bp, Homo sapien
ctctcccctcctcatttatggaagaagaaaaaaaaactaattttactgaaggaaaggatgacaatgaaaaaaggggagagggagggcggactcttttcagtcctgtcaccacctagaacttctggcatccaccaagattacattaatcagcgaagtaatccgaatgtgacctagagggcttaaaagtatgaagcctaaagaacaaccacacagaactggtttcgccctgcccagtggaaatctccgggtgattgcaggcactggtgcacgttattgaatagcgcccactccaatggcaaagtgcgaaaagactgacttcaccacagccaggagtgcaacgacctgcagctcctcggtgggcgccaagacacgctctcctgaaaggctggaatcgcttatcagttctccgcgggcaaaagcaatcagagcatcaatgtaaatgaatcgcaccccctccccgcacggagataaagttttagcatatcccagatggtgcagagattactcattcatttctgagaaagagcagaaccacagaggccttggctgaacctgaggaaactgatcagggtgccccgaaggcccgctagtgaatggcgggtcgcgctcccaatgggagaagagaatggtttcctgccgccgtgctccgcgccggcaggccggggctgagcacaagaagttaaaggctcactggccgcccgcgcactcaaggcaaattccgtttctgaaaaggcaggttcaaaagacaaaggttggtaaaccacaccggtatcatttacgacgcggcacagagacgctttcctgcagaatgtcatgtcactggcaaatgccatggaaccgctcctgactgtggaccgctctggcaatggggcgtgctcatcaccagccaaaactgatgcggaaagtcagcgtggctaactgggcgctttaaagtctgacttcaaagctgctccccaaagcttggcactatgacacagagcacctcatgttatgactaaacgagttaatccatgtcaagtgctgagagcagcacctggcacccggcaagacctcagtaaagattaaccatcattactattaatatttgctcacgcttttccactatgaaattattgtattgtgtctgcattacatatgtctcatcttatatgttataaacacctagaaagaggaggctgtgacttatttatctcagtcatctcggagcatggaactgtgctggactcagtaaaagtttgtagtttgattgaattaccttctcaaaccaaacatttcaggtgtgtcaccttgcagaggtgacagaaatgaaaacagggtggcaaaataaaaaggtgaaatctgaatctcctctaatccttcattttctcaccctgtttcttcataacacccctcattgtgttgctgcttgttacatttttgttccgctgggaactggttccatttgagcctcagtgcaatctgtggccccagttgccacacacacttaaagctcaataaatttgatatctcctgaacccccacagggtttggatatcataagggatacttaggcccaagatcaagccatatgagcaggtttatttgagaactctacgttaaagcctccagcaagtgcttcttgacatatatgaagcaataataataacaaccgctatttgctaagtacttattatatgttgagatatgccaaacactttcacatattatctcatttaatccactcaacaaaacaaaatgtgtgttatttctattttatcaggcaaaaataaaaaactaatcagagaaaagtcacagtgagccacttgcttaaggttatactccccagtaaaatgttgagattcaaacccaagtccctaacaatccaaagctcatccaggtaaccattcaagtcaacaatggtctccggccacacagctcagctctaaacagaaacaccacagcactaattatctgtggagcagagtgcagtgtgcctcccatgctccacagcacagcacggcagctcagcatatctcatcttctacaaaagactccaaagatttctcttttcaccagctcccaattactgccacataacacatgccttgaaatgtgattgcctctggtttgtaacttatgcctaagggacctgctcccattttctttcctagtggaacaaaggtattgaagccacaggttgctgaggcaaagcacttattgattagattcccatcaatattcagctgccgctgagaagattagacttggactctcaggtctgggtagcccaactcctccctctccttgctcctcctcctgca

SEQ ID NO: 30986 - DNA, 2300 bp, Homo sapien
taagtgtatggtacattgtgttgagttctaggtgtgtgcttcccaccacaaagatcaggctgatttaaaggagtcttgctttctaatcttcttcaagtaattaatcatcaaagtcagcttaggacagtttttcaactgataaactgcaattttaaaaagtagatcttttttgcctatatacaagagtggggatggtgtatttaatttgggactttctagactctgcaagtagtgtctataagcctgtttttctaatgaataaaagattcctttgatgaatgacttagactttattctactaaaacaaaaaaaaagtgtaaaataaggagagtttcagagtttccttgcctttactataattcaaaccaaacaaggagaaatcatagtgttttgaagccccatctccataagttatcttttaagatgtcactgacttctctgattctttttctcaaagctctgtttactagcgaacttcttaggcaagaacaggccaaactcaatgaagcaagaaagatttcggtggtaaatgtaaacccaaccaacattcggcctcatagcgacacaccagaaatcagaaaatacaagaaacgattcaactcagaaatactttgtgcagctctgtggggtatgttggtgctttttttttttttttttttaaataaccactcattaatgaactgaccctcaaacattaaaagcctgtggatcttgtcatcaaaagaacactggttgaatcctgggtattagagacctaacttgggactatcttgacctcaggagaaaccaaaaggagttttatatgtagaaatagctgatacgctactagccaggaagacgagattagattcagagcaaccttgtcacacaatagtgataggctaaagccaacaagagaactagctaccactgaatacattgagtgggcaaagcaaagcctataatgtgatcaatcagaggcgatttgtgtctggcactttgtgatataccccacgttcattctccatgatccataccacatcctgcaaggggaatatgagcataaataatggcataaacctttatttcaagctgaaaaatcagcccagagtatttttgtgaattactaaaggtcataaccctagcaataacaagataaaacttgaaaagaacaacaaataatttaatgaactttcccttttagtttaaaacatcaatctgcattttctcgtgaaaaagatctgcaggttttagctgacctcaaactcaggagaggcatgatgagattctatcaaagtcttggtctgtgttactataaacatctcatacagattaaggaaggacatgtcccctgtgtacccactgaaaatactaggcttggattggggaaccataattttaaaaggctgaaagcatttgagatgttagcggggaagagtgtgaagcctaggaaccatttcatgatagaggctctgtcctctggagaagagacagaagagaacaagatagccacatttaatactgaaaggattaatatatggacaaaaaagcagacatttgtgttgatcagaagatagaagtacaagacgtaagagaagttagagagttacatgttcatgaataaagtacactgcacaatgagcctctcaatgtgtgtgtgtgttgaggggtggatgatacatttccctagccataaatttttaggattacaactacccagacaaagccacttatgtgcctgtgcttctgtaatagggattactgcatgggtgttgggctgcactagatttagagacctgagaagtcccttaaagtgagtatgtctgtgactctccagctattaacacttctcttgaatgggtttatcatttccctaaaaaagagcaaaaacttgagggtatggggcataagatagttacattttgattcaagaaggaggaagggcctttcttccattggagtatggaaatggaaattccactgtatattgaaggtgggtaggctagagaccactgcataggggtgggggtgaatcttggggaagaagagaagtgatttatagggagagccaagaaagaagtggtttttccaggcagggaataaaggcaaattatgctagcttcacatctgtgcctaaggctcctattgacaaggactctctgcattaggtagtaaataactagatgtatgaatgctgctaactttataaaagaaaactgtaatttcattaccagaagtacaatgatttaattattatgtcagagcttctacattcattagtttatatttacctacttgcccattagtgtatatttacaagt

SEQ ID NO: 30987 - DNA, 2300 bp, Homo sapien
tacaaaataaatttatctaatttttcattatttcactggtttggaggatgataatatccttttctttcatagccttaacaaatatctagactttattttcccatggtactcaagaatagcatacccttcactttcttcttcatttgataaagataagcattgacaattgccaggaggaaataagaagtaaaagttgaaattcagatattagcttttcctattttggctaattgccaaagaaaccagaaatttgcataacattatacctatgttatggttttcctcttctttttataatatgcattacatttaaacagagttggccttctaaatacaattctattttcactttcacagatggagcaaatacattcaccgagattgaggcatgtgcaaatgtgcaaatgtgcatgtgtgcaaaagccctagccaagtgtgtttctgtatgtaatgcaaaggttgaatttttagcagcttccatattctaagggtttcaaatcaggtgtcatcaagacaaatttaaaagccattttgctttccctttgatttctatgaaattagaaagaaatgacccttcagttaacactatgaattgcctaaatttctagaccacgtaaaacacctaaagtgtttcctttcctagtgtgaaccaaaatagtaatgcctgacatacaggtggcagtagagaaacaatgttttgttgtattctcaaaataaaattataatttaactatacacatttatcacagcttttcttttaaccgattaggatggattacccaatgtcatcacccaggttgctctaatcctacatcaggtgaattggatgcatacatttctggattgaaataaagagagaatatggccatagaaaactgtgggatttagtatttttcaatgagtttctttctccctaatcccctgtctctcactgaatgctctgattcccacatgggtcactaatatagggagaaatggtaagactgatgtcaaattgctttttccccatttgcatgctgtgtgccatgggcagtttaacccatgcaaattagagcggccatgcttttgcagaactgcttccctctgcattactctgaaagcatgtaaaataaaaggtagtcggatattcagcacactgcctgcagtatgcctggtgattaaataccacatcatcacatccataaggctaaaggtttcatcatactcatggaaaactcaaaattatctcttccttttggtatttgcacattcattttagtgttcttcaccaggatttctgccagatgactggaatttaaaacaaaagaaaatgaaacacctatcattttggaagagaactcttgttgttgttgttcctcttgattaattcagttctgtggctgtaaatttcagtggcactagactttaggatgggccatgatttgatgtggtacctccattctccagggaatgatgacacaccaaatgagtcactgtagtagctggaaccttgggagttgctctgttctatggctgactgatggtaaatttcagtacagcagcaatcataagaggggaaaagccatcactgtggcttgggcaggagtcccagaatactggggcacaatttctaatcccacatattttcccattaactctgggggtgaccagcttcacctttccaaaacaaaatgagaacccaatgtttgtatatatgtgtacatacacatatgtacacatatatattcaggactgaacagtctcagtctagctattggttttgaaaaagtttaaattgatttcatctttcttttctagcttctacacgctacaaacatcattttcttagttccatgcagtaactatgtttgtcacagttctatatagagcttttttttttcttgttgcttaagctggagcactgacttgctgagagatgtagctttggtcgtatctaccactcatatgctgaacaaatttttctttcataggatctgacggcattagccaaagaactaagagaactccggattgaagaaacaaaccgcccaatgaagaaggtgactgattactcctcctccagtgaggagtcagaaagtagcgaggaagaggaggaagatggagagagcgagacccatgatgggacagtggctgtcagcgacatacccagactgatgtaagagaactacttttaaagtgtagaccgggaggggactaggtttccaaaataaaaggacaaaaaaatatgagttaaatgtaagattgtatatgggtctgtggcaagataaattgactttcgggacttgggtttttgttggagc

SEQ ID NO: 30988 - DNA, 2300 bp, Homo sapien
gactacaggtattactttggaattattcattatttttaccttttcatagggattctggtatatgtctcgcctccaaactgttaattgaaaatttcctttaagtttaattgttatttctaatgtttcagggcagagagctttttagtaacacagaagcaaaaaattctaattaaaagcaaaattattaagcagttcagaactttaaagtgtttctaaatacaatgtttagaaaaatgtatgtcattttaacaagtgaaagtttttttaaatcagtagcctgtggactaaatatttctaaaataattttgattttttagaatttcttttgtctcgttttgaaatgtcagagaaaaggaaaataaacctctggggaaaatgtatcattaattaaaccatagccaagagtattatattttactcagaattattaacaatagagataaactcttttaaaccatattctctctttaaattatataaaatgtaattcttaataacaagtaacattttaaatgctagctgtattctttgatgagacttaacacagtcctaatatatagatgtcagaatacaaaataaatttatctaatttttcattatttcactggtttggaggatgataatatccttttctttcatagccttaacaaatatctagactttattttcccatggtactcaagaatagcatacccttcactttcttcttcatttgataaagataagcattgacaattgccaggaggaaataagaagtaaaagttgaaattcagatattagcttttcctattttggctaattgccaaagaaaccagaaatttgcataacattatacctatgttatggttttcctcttctttttataatatgcattacatttaaacagagttggccttctaaatacaattctattttcactttcacagatggagcaaatacattcaccgagattgaggcatgtgcaaatgtgcaaatgtgcatgtgtgcaaaagccctagccaagtgtgtttctgtatgtaatgcaaaggttgaatttttagcagcttccatattctaagggtttcaaatcaggtgtcatcaagacaaatttaaaagccattttgctttccctttgatttctatgaaattagaaagaaatgacccttcagttaacactatgaattgcctaaatttctagaccacgtaaaacacctaaagtgtttcctttcctagtgtgaaccaaaatagtaatgcctgacatacaggtggcagtagagaaacaatgttttgttgtattctcaaaataaaattataatttaactatacacatttatcacagcttttcttttaaccgattaggatggattacccaatgtcatcacccaggttgctctaatcctacatcaggtgaattggatgcatacatttctggattgaaataaagagagaatatggccatagaaaactgtgggatttagtatttttcaatgagtttctttctccctaatcccctgtctctcactgaatgctctgattcccacatgggtcactaatatagggagaaatggtaagactgatgtcaaattgctttttccccatttgcatgctgtgtgccatgggcagtttaacccatgcaaattagagcggccatgcttttgcagaactgcttccctctgcattactctgaaagcatgtaaaataaaaggtagtcggatattcagcacactgcctgcagtatgcctggtgattaaataccacatcatcacatccataaggctaaaggtttcatcatactcatggaaaactcaaaattatctcttccttttggtatttgcacattcattttagtgttcttcaccaggatttctgccagatgactggaatttaaaacaaaagaaaatgaaacacctatcattttggaagagaactcttgttgttgttgttcctcttgattaattcagttctgtggctgtaaatttcagtggcactagactttaggatgggccatgatttgatgtggtacctccattctccagggaatgatgacacaccaaatgagtcactgtagtagctggaaccttgggagttgctctgttctatggctgactgatggtaaatttcagtacagcagcaatcataagaggggaaaagccatcactgtggcttgggcaggagtcccagaatactggggcacaatttctaatcccacatattttcccattaactctgggggtgaccagcttcacctttccaaaacaaaatgagaacccaatgtttgtatatatgtgtacatacacatatgtacacatatatattcagga

SEQ ID NO: 30989 - DNA, 2300 bp, Homo sapien
gttcctccttctcaccttcctttaccagttggaggtccctttgatactgcaatctctccttttatggtatttcctgcagcccacacccctgccttcccctggctgtctcatcaacttctcaggctcttaggaagccctcctccatttagcacctggcatcatactgcatctataactttctcatctaaaactaaactaaatctgaatgccaacttggcaccctcgtggcccaaacagctcactaatgtcaaaaaagttgatctgtttgtgatgtttcaaatataatcatgagtataaaacgaaggctttccatggaaaaaatatttaactcatatttccttatgtttgcagttttaaaaaaatagttgtttatagatcttaatacttgatcttaaattatcttctttcaaccctgagacaatacattaacctgttgtctagatgaacggtaaaaaaacaggaacacagaagagaaaaaaacaaagacaatgatgggaaataatctgttttttttttttcatttcgacgtggtggcttactgcacgttacttactatgtcgaaccagatgattttagtaaaaaatgagtttagtaatttagtataacacgttcaaatgtttacatacaacgtttacaggcaaaagctaccaaactgttgtggccattgagatgttggaacaattttcaagtttcatggtgcatgatccacaatgcatatgaatacatacaatatcagtaacaaaaacagtacaatgtacaccaaaggttgtttcaaagtcctctaatgtctgcagtcatgatgaactaactgcactggctttcattcattcattcataagacttattttgaagctgatcttcatactgcatgattaagaaaccatcagtgcagtggtcagaattacattctgctgttaacagaggagcaaagaatgctttcaaagctactgctgtatttggaaaaaagttcagttttagtgttttctttctaggtattttgcatggctaaggcgggagaagaagggctgcgcggggattgggggaagcgacttcccactcttgattacagaaggagaatcatgtataccactgtaaaacatccaacctttaaatgagaaagtgagtgaagtgaaatcgctctcacgtacacatcttccgcgttacttcttatccgccagccaaactttctccatcaatctgggtaggtctgccacgaaaacgcagcctgaaagaaatgctgagtcctgaggcggcgtgtgttgcctcacccagtgttggctttggagttacctgaagccttctagctactgcacccagagagcaagcttctcgtttcaactcggttgtttccgtggggaattgcggcacgagcaagtcctgggtgtggcgatgccaagagagcgctcagatctcccatctttcccgcttctggcaaaccttcccagccccgaatcggcgagtgaccagcacccgggatcagccgtccggcattccggggaccgcgggtggacccgaccccgccgcagctgcaaactgccgaagcgcccagctgggtgcactgtgcgtgtgcgcttcttccctactctttccgcgcctggaggcggatccccttccttgcacacaagtccttatatgcaccggttgcaccagcccgcgttactccggccccacaaataattaatgggggagggagggtgtcgcttttttttcctccggctttttctcagcgcgagagcatttgaaccgaggagaaaccccaagacgcgactgaagggccattttgctgcagtgcacgaattggccacacaaaaatagagcttgggtccctatgataacaagtcaaggttcaggaacagccccttcgggttcggcccgaggagcccgcaaaagcctgggcggaaagggtgcgcgcccctcccccctccacgctggtgcagagggaccgggtcaggaagcgcggcctctccccagtccaagaccacgcctcctccgcctccccactcccccttcactcctcccaggaagcggtgatagacagttctgcgtggttctccacccccaccctccccctgctgagtggaggagttgatgtgtctcattataacagccaatgcagccgccatccacgcacaagcaaagaagcatgtcccatttaaatacacccacgcagccccagcgcccttagccgatcggggcgctcagcccacacgcaccgctgctcggggcttggagatccgcgcaggctgggctcccggacccggcggaccgacgcgcggaggatcgggatccggcgctgtggg

SEQ ID NO: 30990 - DNA, 2300 bp, Homo sapien
attatgaaatcatttgggagccagatagcagcctaacgagacccccttggatcagcattgttgatgccataagtcctctcgaccacactcatgtaattctgagctactgttttcacaggaactagtatttggctctattgccttaatagttcatttgtactgaggaggaaccctaatttatgtggaatagtttttaggccatggctaaaaacaaaaacaaatttgaattatgagcaggttgaattcaattagtaccaagataatttcctgagactaagaatttcctttattttccttatcataactggttgttaggtgaaagataatttttaaatgagtgtatatgtgtttatgtaaagccttagcttagagttttgcagttgatgaaagcaaattgtatatgtgtattttatatttgaaatttgaaatattgtttatctcatttttcatcccttttgtttcttttctcaccctcttttcttcttttaacaaagtgctatgtaaacaataaagagcctatagatgagcaaacagacctacccgtactttggcctttcagtctcataaagcaggaaaataaatcactgggagaagtcaatagaagtctatttttaacatgatttcattttgctaatctatggcattttaaatcatttttcttctgtagaaaactttaatagcctttgaaaggttaatgattcagtttgagatagaatattagcattgtgtgtggtgattacataaaaacatttgttctgcaaatatttattgattgcctgggtgcttggagctactggcagtgagaagatttggttcccactcccaaagagtttatagactggtgaggcattgatgcgggcaggggagcatcctgatacaattgcgtcacagagtcagaggtgttggggcagttgttagtgggatgacagcagtgctagtgactgcctcttccttatggggagatggcaggtgatagctaatgtggctcttgaaggatgattaggatatcaggccaagagggagaaaggagcatttcaggtagaagtaataatgtgccaactgcatggagacatggcagtccacacctgttataatacagtgaaacacgtgatttgcatggggcctggggttgggtggggaaaaacaaggactagaaagatagattggcaccagtttgggaagagtcttctatgcacactaagcccttaggacttgagcttcctataggcagtatgtgaaccttccagggttttaagcaaagagtgcattttacaaagacagttctgggacagtgtgttggtggcaggaccagtgtagtcctctcactggctactgcaagcagtaccatttattcattcaacacatatttttgcattcagtgtctatttgttaaatgcctcttttgtgccaagtgctgcgtttgtgatttgtaattctgcatctttttacttcattgtctttgtatttagccgtaagtcaatggtctcggcacagttatttgtgaaatgctatagtagattgctgcttttgcacctatatcataagctttcatctgttgttaccatattttttataaatgccatctatgatttgaagtatataaatgttaaagcgcaacagattttagctgttatctaggccaaattcttcattttacgcataatggatttatgatctaaaaaactgaagctcagtgtcacttagctaattaattccagggctggaacatgggctatctgtaaatttgaggttcttgctttaatgcaaaagaattatgcatcaggtgtgcaccatgttggttgaggaaaaagaagtggcatggtgtctttattgcccctgcgtctcaggtttctccacctctcccctccccgcccttcccactctgcccctgaaagccccccaccagctttactgctctcatagtgccaccttgtgagttctttattcacagttaattctgtgatagttcttccagtgatctggtaggtggtggaaataagttactcaactgcctgagaaggtcaaatttcattgtttaatgatgaatcttgttgtagccctaactgcccactaaaagtaaacttgtaaggactgtaaaaccttgttagcccacagcctgtaatagaatggacagatgccaccctagttgtgtcttaagaaattaagaagcttttaggtgtttaataaatgagagttgagcctccctttctgggactcacctgaaccacagtctctgagggggtcttgctgcattcacagataccgggtccatccgtagtttacagacaggtgtgggagag

SEQ ID NO: 30991 - DNA, 2300 bp, Homo sapien
ataggaaaagggttaaagtaattaaattataagggaggctgaatacttttatggcatctcttatctacagttagggttttcgtgttaaaagaactctagagatgaaatggctcaacctcctcaatttatagagaggaaacaaagaccctgggaatttaaatggcttcatcctgtggtaaccgagttgcaggagattatttccaattcttcctgttagggtttgctcttacatggacttgccccagggtacttatttatattaactgttccatctattccaaagcacttacatatctacaaagaatagagagcaagataaaggtcgtggttgagaatatcaacttttgggttagagaaacctgaattccagtcccttcttcaccacttaccagctgtgtgaccttgacagattgtttaaaatattggtcaagttacttagtctttctttgcctcagtttccttatctataaagaggggatggcaaactcctgtcatgctcaaaatagaaaaaacaagccctcacagatttattattaatgacaaatgagacaatgtatgtaaacaattatcaccagcgaggtgcattctaaacattagtaactattaactattatgatataaattagaagtgggagggaaagttgaagggaagagatagtcctatacttggctatatagtaggccacaaatttggctccaagctttcttacaggcaacatagagaaagaaacatgattgattacatagttccagggaacttagatatatgaattttatatgtctggccaaaccagaacctccctccttcgctcccatttttgaatttccaaacacagtctctttctcccagacataaaagtataggttttcgagactcattgagttataataagggctgtgtaagtttgcctgagactttcttagcatttcccatatagccacttagctttttgatagcacctgcaggagagacccagctaagtgtcttcccctgggcaaatttcattctcaagaagcctaagaccttggaggaggccaggggtgaactttgggttagatgcctcattttcctcacccatatcaggtgctccttaatcacaggggcctgccttattcaccttcacgttttcattcatctcatctcacatgtggtggatgctcagtgtttgtgatttgcagtaagaaaggaacatgtgccaaagagttactggtatgagcgtccttccattctagggcctggttttaacagattatttctacatcaggcaaaacagatgtttcatccaactctgatgacagtgtgcaaagcttgaatctcaatattttacatgaaaaataatatccatgtgaactcttctgccctgggtactgatgtgcaacgacttgtgttattaaatgtcagaatgaaatagaactggttttctttaaagaaaaagaaaggagggaagtataattctagcacctcagatgtctttcggaataggtatattaatcaatttcctttcaagacacatacgtcattatacctcacgtaaagtcatggccaaaatctcctttcttgaagaggtaatatacactttgcttgggatatcacctacagagaaaatgtagaaatattatgctatcataaaaatatttctaaatctatatatttcaatatgtgaaatactctaaattttctttaggaaatatttagagttgcttatttttcatgatattctttcttcagctgtatttattacagcaaataatctatttctttctctgaataagctttcccaaaccaatctcccttgaattacttatccaagttaataaagttggatgagagaaatgttggcattcaatgtggtgttgcttttttttttcttttttttttctcttgttttcaattaagcactctgttttaatttacaagttaggaatcctttaaatgttaaacaggaacgtaaactaaaaggttgttttggataactgaggctcacacagagcaggctgaattgtttccatatgctgtatctaagtctggattcaaattgtggaatagcattttatgttatcaaaatgctaagtctttgtaaccgttttcttctttcctagcccctttgcttttactctgtccaaagttaacatgtcactgaaaaacgagccacgggtaaatacctctgcactgcagaaaattgctgctgacatgagtaatatcatagaaaatctggacacgcgggaactccactttgagggagaggaggtagactacgacgtgtctcccagcgatcccaagatacaagaaggtaaagacg

SEQ ID NO: 30992 - DNA, 2300 bp, Homo sapien
gttgggattacaggtgtgagccactgcgcttggccttgataattttatttctaattagatttagtagaaagacctattgttggaggcaagtgccaaatgttttcatagtgacacttaagaatttgggatgcaattttatagactgctgcttctcaaccaaaagcattataatttctaaagacaagcttgtaagaatgcagttacgtgtgtgcacaagacttatcagaccatctgtgactaataaagcttgagaaagaggggaggagagagggtattctgccttccagtaacatgcttgtctgaaacttactaaactcctcttaggcaatactctgctcagagagtcatgtgtttaattgtaaaaatctgtcagtatcataggattcaaaagacatcaatcatttatgtcaacaaggaaagagtgagggctgtgtgactcttctatcattaggaaaagatgtgctcaagagacaaaaatgtggtctaaggagggctgagcaactgtaggttacaggaaaactgagttccagactataatttggcccccctcccctaatttggactggtatattatatttttcatttcatgcaatgccatgtgtgcagtaagacattatgtaacttggtcagtcgcagttgtgtaatatccactaaatgctttaaagtggctgacgttattagcagtttggtgcatggggaggccattgcttcccctggctttggcgggatgcaatatcgtgtaatgaggttggaactggcctatattcaaaattacattcccaaagggctgctattcaagccacatgacaactggttctctttttcttaagactttattctaagtggactgaaaacagcaaaattgccgtgtttgaacggttccataggtggaatgggtcttttccctgttttgctcccaatttattattttatgctaagatttctgaattataaccagttttagagacatcgggacacaaattcccgtccccctccatctaagctgtgtgacctcgggctggttctgagccttcatttccttacctgtaaattggcgataacacttccctaaggaggtgcaagaaggcttataaagactccagcaaagctccagtctcttaattatgtcacctcaggcaagttatttagccgtttgatttgctgattccttacttataagttggaccagttgtggctactatccgcagtagtcgaagaatagatatcataggcaaagctccgggaaaggtggctggtccttggcggctcgagaggacctgataatggtcctaatagcgagcattccctagggtgatgcggtcgagttatgaaactttgggaaaagagaacaaggaacgcgggcgatcagaggcccagtcgcgagacctgccccgctggggcctccagccggcaccgcgacgccccgggacctggcaccgcctcgctccacccctgcgaatccggggcgaatccgggcggagagttcctgccggccgcgcagcgcagagccccctccggcccgccctctctccctccctcccgctgagctccagctgtgccagaggcacccgagccctgagagtccgccgccaacgcgcaggtgctagcggccccttcgccctgcaggtaggagccgcgccgagacccggatcaccgggcgcccgtgggagccgggtttccactgccctcgccctccgtccctcctccgcccaacctgggcagctggccgctccccgcccaacttggacgggatttcagcgagtgagtcggcggcggactccctagcgatccccaagggcctccctcgcacgccttcgggtggaattcctgcagggtgaaagctgacaactctggcacgcacttttgccgcgcgggcggctgcctggagcgcagagccgcgcaggctcaggctgaagcccaggcgtcctctgcaggatgcaccgcctcgccgccacagggcttcgggtgcagtgtgtgtggtgtccccaggtcatccgggcgcccttggttcgggtgcgcggtggcatgactgggctggtgggggcgatgggaccggcatcccgtaccaaccaggaagtgccgcgtcccaaggcttcgagcccagcccgcagagcacggtcctgggggtgtgatcacagctgctgaccgcggctcccgccgtgtgatgtgaccactcggaggtggggcgagggggccgggggccagcagcagggagtgtgtaaaaggtcttcttcctcacaatacgattgaaggtgtttgggacgtagggctcagatccaggagtgccgtcctccaagcct

SEQ ID NO: 30993 - DNA, 2300 bp, Homo sapien
tatagcatgattacttagtcactgtttcttgacatctttgaagatatgaaagagttggaaagaaaaatcacaaaatctctcaggaaaataaaataattacatacaaaatcatactacttctaaaattcatgtttgggagtccataagcttcagttcatctctaaacaacatatggcatttcctattttattcctctatcccagggaggcagaaattcagttattgtaagggcacttagataattttctttctttctttctttcttttttttttttgagacagagtcttgctgtgtcaccaggctggaatgcagtggtgcaatctcaactcacagcaacctcctcctcccaggttcaaataatcctcctgcctcagcctcccgaatagcttcgattacaggaacctgcctccacctccggctaatttttgtatttttagtagagccggggtttcgccatgtggcccagactggtcttgagctcctgacctcaggtaatcaacgcgcttcggcctcccaaagtgttgggattacaggtgtgagccactgcgcttggccttgataattttatttctaattagatttagtagaaagacctattgttggaggcaagtgccaaatgttttcatagtgacacttaagaatttgggatgcaattttatagactgctgcttctcaaccaaaagcattataatttctaaagacaagcttgtaagaatgcagttacgtgtgtgcacaagacttatcagaccatctgtgactaataaagcttgagaaagaggggaggagagagggtattctgccttccagtaacatgcttgtctgaaacttactaaactcctcttaggcaatactctgctcagagagtcatgtgtttaattgtaaaaatctgtcagtatcataggattcaaaagacatcaatcatttatgtcaacaaggaaagagtgagggctgtgtgactcttctatcattaggaaaagatgtgctcaagagacaaaaatgtggtctaaggagggctgagcaactgtaggttacaggaaaactgagttccagactataatttggcccccctcccctaatttggactggtatattatatttttcatttcatgcaatgccatgtgtgcagtaagacattatgtaacttggtcagtcgcagttgtgtaatatccactaaatgctttaaagtggctgacgttattagcagtttggtgcatggggaggccattgcttcccctggctttggcgggatgcaatatcgtgtaatgaggttggaactggcctatattcaaaattacattcccaaagggctgctattcaagccacatgacaactggttctctttttcttaagactttattctaagtggactgaaaacagcaaaattgccgtgtttgaacggttccataggtggaatgggtcttttccctgttttgctcccaatttattattttatgctaagatttctgaattataaccagttttagagacatcgggacacaaattcccgtccccctccatctaagctgtgtgacctcgggctggttctgagccttcatttccttacctgtaaattggcgataacacttccctaaggaggtgcaagaaggcttataaagactccagcaaagctccagtctcttaattatgtcacctcaggcaagttatttagccgtttgatttgctgattccttacttataagttggaccagttgtggctactatccgcagtagtcgaagaatagatatcataggcaaagctccgggaaaggtggctggtccttggcggctcgagaggacctgataatggtcctaatagcgagcattccctagggtgatgcggtcgagttatgaaactttgggaaaagagaacaaggaacgcgggcgatcagaggcccagtcgcgagacctgccccgctggggcctccagccggcaccgcgacgccccgggacctggcaccgcctcgctccacccctgcgaatccggggcgaatccgggcggagagttcctgccggccgcgcagcgcagagccccctccggcccgccctctctccctccctcccgctgagctccagctgtgccagaggcacccgagccctgagagtccgccgccaacgcgcaggtgctagcggccccttcgccctgcaggtaggagccgcgccgagacccggatcaccgggcgcccgtgggagccgggtttccactgccctcgccctccgtccctcctccgcccaacctgggcagctggccgctccccgcccaacttggacgggatttcagcgagtgagtcggcggcggact

SEQ ID NO: 30994 - DNA, 2300 bp, Homo sapien
ctatcctaaggatgtagagatcttgacaaagatgatgcaacgtagtgttcattctagcatgatttgtaaactgcaataaagtctgaaaatatcctaaaacatttgataaatgattgtaatattcttcaaccacagaaatgatatcttaaagaaagtttaataacagtaaaaaatagtcaatttataaatacttagtgagataaggaagattctaaactctgtaaagcatggtgttaattttataacaaacctctgggcatagaaaaaataaggaaatatactaaatgctaatagagagtgtgtgtgtgggagttataggtgattttaattaaaaatgtttttctgtggtctctaaaacatagatgtaaaattttttttctaaaatatagatgttaaaattataaaaatgaacatatatgtttttattctcagaagaaaatagaacaattaaaaggatttcaaataccactttgacaaaaatgtcaagtgcatattgagatgaatgtatagcatgattacttagtcactgtttcttgacatctttgaagatatgaaagagttggaaagaaaaatcacaaaatctctcaggaaaataaaataattacatacaaaatcatactacttctaaaattcatgtttgggagtccataagcttcagttcatctctaaacaacatatggcatttcctattttattcctctatcccagggaggcagaaattcagttattgtaagggcacttagataattttctttctttctttctttcttttttttttttgagacagagtcttgctgtgtcaccaggctggaatgcagtggtgcaatctcaactcacagcaacctcctcctcccaggttcaaataatcctcctgcctcagcctcccgaatagcttcgattacaggaacctgcctccacctccggctaatttttgtatttttagtagagccggggtttcgccatgtggcccagactggtcttgagctcctgacctcaggtaatcaacgcgcttcggcctcccaaagtgttgggattacaggtgtgagccactgcgcttggccttgataattttatttctaattagatttagtagaaagacctattgttggaggcaagtgccaaatgttttcatagtgacacttaagaatttgggatgcaattttatagactgctgcttctcaaccaaaagcattataatttctaaagacaagcttgtaagaatgcagttacgtgtgtgcacaagacttatcagaccatctgtgactaataaagcttgagaaagaggggaggagagagggtattctgccttccagtaacatgcttgtctgaaacttactaaactcctcttaggcaatactctgctcagagagtcatgtgtttaattgtaaaaatctgtcagtatcataggattcaaaagacatcaatcatttatgtcaacaaggaaagagtgagggctgtgtgactcttctatcattaggaaaagatgtgctcaagagacaaaaatgtggtctaaggagggctgagcaactgtaggttacaggaaaactgagttccagactataatttggcccccctcccctaatttggactggtatattatatttttcatttcatgcaatgccatgtgtgcagtaagacattatgtaacttggtcagtcgcagttgtgtaatatccactaaatgctttaaagtggctgacgttattagcagtttggtgcatggggaggccattgcttcccctggctttggcgggatgcaatatcgtgtaatgaggttggaactggcctatattcaaaattacattcccaaagggctgctattcaagccacatgacaactggttctctttttcttaagactttattctaagtggactgaaaacagcaaaattgccgtgtttgaacggttccataggtggaatgggtcttttccctgttttgctcccaatttattattttatgctaagatttctgaattataaccagttttagagacatcgggacacaaattcccgtccccctccatctaagctgtgtgacctcgggctggttctgagccttcatttccttacctgtaaattggcgataacacttccctaaggaggtgcaagaaggcttataaagactccagcaaagctccagtctcttaattatgtcacctcaggcaagttatttagccgtttgatttgctgattccttacttataagttggaccagttgtggctactatccgcagtagtcgaagaatagatatcataggcaaagctccgggaaaggtggctggtccttggcggctcgagag

SEQ ID NO: 30995 - DNA, 2300 bp, Homo sapien
atctttgtactgtttaacatgagtatttcaacagtctttattttccaaacatgcaaacaggagagagtgatctgacccacagcatattgacataccatctagctataaccttgagataaaaagtaaaggaaaaagtcaaaacagctcaaaccaaatactaatacaaacaagtctttcttcactctcgaccccttccccccccatatcagtggaacaaactagcatcaacactcattgacggtggtggattcacatggctctatacttgtgcagcttcagggggacaggagagcccaaatacaaaggggaaagtttaatgtattaatcaactaattcaacaaatacttattactatatgtatctgctctgatgcagacaaggttgtagacgctgggaatatctcatacatttaagggatgtataagacttgcaaggtctctgcccttgtgaaatttatctagtggtgttagaaaaaaaaaatcagagaatatagcccacagtgttgagaggagataagaaatagcagctgtaccagaaagcatgagttggtttcctggattctgtatatccaggaatgcaactgcttcaaaatctgggtcaaactgtggaatggctattaaagacagaaaggcagaaagaaaaaaagcagagaatcagagagaagcttctctttccaccacatatgggagggtcctttgggagtttttaccaaattgttcaggaagagttaaacatgatgtttttaaggtgatgaatttaaaaaaaaaccacaataagtgcacctttgtcccacgatggaaggaccccaaaggtggaacatcccaatttaacaagagtaactttctgaacatcttcgttatgctaaactctgggctaggcatttatggttttagctcatttaatcctctcaaccaaatccattaaagataaacactaacttttattcccatttcgcatacgaataaatagacctagagaagttaagtaacttgcccttactcaaggacacaaacctggtagagagtggaaccagaatcggatcacagctccatctgactcaaaatcgatgtcctaaaccacttcatttgcattcataaaattatttttcatccttttatttcagtaaaaaggaataatgtattaatgttaaataggaaaattattcagatggcttcagaaactgacctgtgtttttaagatatttttttgaacagacatccacatatatccaatcagtcaaaatcaaataacaccattttctcaaatgcatgaaaaagtaagagatgacttgtaactgcctaaatgtacctaagttcaatatctcaaattagaattatgattcaagaatgaatggggatcagcattttattcaactgatgaattgctcctcaaagtttattttattttataactgcatacatttccatcatcacactttaattgaaaattaaattaatagtaaaataaggtgaaactggtttagtgaaaacaatgcaaaactccataataaagttcatgcccatttgggaatgaatccatatcaaaaatctttatcaaaaataattgtagtggaattaaactttgaaaggaggtgaaggtcttgctttgggttgaaatcatttaaattaaatataatgaaaagtgaccagggtgcttatttttactttgttttgtgggaaattgtgctgggaatgtggatctattgtacacaaaggatgttggctttatgctggaaccactaggcaggttgagttgagaaacaattagctcagtcagcaagcctttgaatctgattaagccaggaagtggtcactccccaggacagggcagaatgaagggaatcaaggcagcaatccaaagcaagggataatttttttctctctttctcttaaataaattgttattagaatttattgtgtcaaatttatgccaaggactatttgagtacatttcatctttggtaaaacaaatagaatcttgtttccaagtagatcaacagttcgtatgtgtcgtggctactgtctctaagaaacttctatttactgaggcctgtcatacgctcatgttttggtaacaaaacatctttgagaccaaggcctcaagccaccaaggaaaatgaagggcctctaccaggctgctggccggattcttgttactctggggatcctcagtgtatgctctggagttattgctttctttcctgtcttttcttacaagccttggttcacaggatggagtgttcgaattgcttgtcctatctggaatggagctttggtatgaaaatagtttattaaatatat

SEQ ID NO: 30996 - DNA, 2300 bp, Homo sapien
tcacttacctagtcattcagattcttccacatactttacaattaattcattcaccaaacacaaaggggtcttatattcaaagcagaattctaggttgatactagggatacaaacatgaacaaaactcagtcaagtggaagagataaagtataactaacttcaggctgggcacagtggctcatgcctataaccccagcactttgggagctggggcaggaggattgcttgagctcaggagtctgagaccagcctgggcaacaaaaatgaaaaaaaaaaaagaaacattaaaaaaaaattagccaggcgtgatggcacacactagtagtcccagctacttgggaggctgaggtgggagactcgcttgagcctaggagcttgaagacgcagtgagctacgatcatgctactgcactctagcctcagaaaaaaaaaaaaaaaaaaaagactaacttcagagcaatgtgagaactgacaaggattataagattgtggggaaaagaggtatgagactgtagggaggaaaggagggagtggttttagccggagatcaaggatgagtaaatgatcttaaatagggaagaagaagtatgtttcagagggaaggcacgtacaaagggacacaggtaccttctggagccatgagtgatcagctgggctgaaggcatggcacctgaggaagccaaagagtctggagccagagaaggcatttggactcaaatgggatctattggattgtaccctattggcactaaggaactactgcctaccccccgccccggcttctcatgcaggactatgacctagaattggagttatgttatagaaagatggcttcaagttcccctttgaggagctccacagtaaataagccatttaggagagaggtccccatttctctggactcaccattgcctccaaaaaaaaaaaaaaaaggctaaaatctccccaaaagaatggcaaatgaacaagggaaggaaggagctatttcttagtgttctttagactttaacagagtattatgtactgctattattattttttaggttaacaaaagtaatacattgtctctagtgactccctgaatgctcctttgtagcttaatagttgaggctgaatgtagctattcagaatacctggacagctatggatggaaggggcttctctaggctaacttttgctctcttgtctcctgaataatctgaggggtggcatgggatgcagtctgttaacctcttagagcctgtacaacagaaatacattacatttgacttaatatgaactcaacagttatttaatgagtcctattgtggtccttgcactgtgctatattttacggatataaagataaaagtaagaaacagtctttgtccctgagaaacgcattgtgaaataaggctgggtgagttggctcacgcctgtaatctcaacactttgggaggccaaggcgggagaatcacttgagcgacagagttccagaccagcctgggcaacctattgagaccccctctcttccaaaaaaggaaaaaaaaaaaaaaaaaaaaagggtgcggtggctcatgcctgccccgtgcctgcagtccccaaaacaaacaacaacaacaacaaaaaacaaaaaacaaaaagaaagaggaaagagagattttaacttaagtataataaaaattgctcatactatgttagttgtatgaataaaatgctgtgggaaatgtgggagtaatatagctcacaaggttgctgtgggggttaacaacaacaaaaagcgaaatatatgtgtaaatgaaaaaaagtcagttttaggcttaattatcactgagtaaacattgcctttatattactttggcgatctgcagaacgcgcagccctcgccattcaggagttgttagttccctaagcctcaggtttctttagtctggctgaaccaaaaggagtttctgcttagctaggcagggccgggggacaacagcttctgcgagtctgcgattgtggcggccggtatattcggcggtttacggtaatgggcgggccccaaatccccatgtggtcccgacatcattgacatggcggaatcccccatcaaaccctcctggtagttatttgagcggcggcggcggcggctggaggaggagagcggcggcggcgggagcagcgaagggggcggcagggatcctccaggctgccggctgggaaggcgtgggcgacccggtgtgtggcgcgcccagagccccgcgtttcagccctagggaaggtaaggcgtgcaagagccggggactagaggagaccgggaccccgagcgcgatcgcc

SEQ ID NO: 30997 - DNA, 2300 bp, Homo sapien
gctaaaatctccccaaaagaatggcaaatgaacaagggaaggaaggagctatttcttagtgttctttagactttaacagagtattatgtactgctattattattttttaggttaacaaaagtaatacattgtctctagtgactccctgaatgctcctttgtagcttaatagttgaggctgaatgtagctattcagaatacctggacagctatggatggaaggggcttctctaggctaacttttgctctcttgtctcctgaataatctgaggggtggcatgggatgcagtctgttaacctcttagagcctgtacaacagaaatacattacatttgacttaatatgaactcaacagttatttaatgagtcctattgtggtccttgcactgtgctatattttacggatataaagataaaagtaagaaacagtctttgtccctgagaaacgcattgtgaaataaggctgggtgagttggctcacgcctgtaatctcaacactttgggaggccaaggcgggagaatcacttgagcgacagagttccagaccagcctgggcaacctattgagaccccctctcttccaaaaaaggaaaaaaaaaaaaaaaaaaaaagggtgcggtggctcatgcctgccccgtgcctgcagtccccaaaacaaacaacaacaacaacaaaaaacaaaaaacaaaaagaaagaggaaagagagattttaacttaagtataataaaaattgctcatactatgttagttgtatgaataaaatgctgtgggaaatgtgggagtaatatagctcacaaggttgctgtgggggttaacaacaacaaaaagcgaaatatatgtgtaaatgaaaaaaagtcagttttaggcttaattatcactgagtaaacattgcctttatattactttggcgatctgcagaacgcgcagccctcgccattcaggagttgttagttccctaagcctcaggtttctttagtctggctgaaccaaaaggagtttctgcttagctaggcagggccgggggacaacagcttctgcgagtctgcgattgtggcggccggtatattcggcggtttacggtaatgggcgggccccaaatccccatgtggtcccgacatcattgacatggcggaatcccccatcaaaccctcctggtagttatttgagcggcggcggcggcggctggaggaggagagcggcggcggcgggagcagcgaagggggcggcagggatcctccaggctgccggctgggaaggcgtgggcgacccggtgtgtggcgcgcccagagccccgcgtttcagccctagggaaggtaaggcgtgcaagagccggggactagaggagaccgggaccccgagcgcgatcgccgggtcccggtgcactggaaagccccggcctgacgccgagtccgccaaagtgcgtccctgtcccgggagcgccctgggcttcccggcaaaaacttggcgccggagtgctggggcgccccgtgctcgcctgggcaccccgggaacacgggacccgggagggggcggcccccgccttgctgggctggggtcccccgcctgtgccccctgcctcagggtttggaggagtgaaagaaacgggtagattcctcttaaaaaaaattgggcagtggctcgcggcctccccccacccccagccttcccagcagattttgtccgaggaatccgctccccctcccggaatctccgcggcaggaacgctgcccaggagggggagggcgggcggcgaggccgaggaatcttcgacgtgtcactttctgaggctgtagatttccatatggtggagggaagagggcgggagtgcgaagtggggctggaagttggggccgcctctccgcgccggcgggggcggtcgggggcctcgaacccggggatgctcgcggggagggtcccgagcccgcgccggcctggcccccccgtccccggctgggcctctccgggacactccccgccccgctgctggccacctccgagcacgccacgtcctcctccccgtcctgccccccgggctccccccgggctgggggcggtaaccggcggccgcggccggacttggcgagccggcggctggaagctcgggcgggggagcggggcgcggcgggaaggagcgggcgacccggtgtgtgggccagcggagctccggtcagtcggtcaccccgaggggcgcctcggccggggatagggcgggcgggcggaatctgcgccccgaggcggccaggaggggccgcgcggaccgtctggtgcccgcggctgggctggggccggcaggcgtgggaa

SEQ ID NO: 30998 - DNA, 2300 bp, Homo sapien
aatctcaacactttgggaggccaaggcgggagaatcacttgagcgacagagttccagaccagcctgggcaacctattgagaccccctctcttccaaaaaaggaaaaaaaaaaaaaaaaaaaaagggtgcggtggctcatgcctgccccgtgcctgcagtccccaaaacaaacaacaacaacaacaaaaaacaaaaaacaaaaagaaagaggaaagagagattttaacttaagtataataaaaattgctcatactatgttagttgtatgaataaaatgctgtgggaaatgtgggagtaatatagctcacaaggttgctgtgggggttaacaacaacaaaaagcgaaatatatgtgtaaatgaaaaaaagtcagttttaggcttaattatcactgagtaaacattgcctttatattactttggcgatctgcagaacgcgcagccctcgccattcaggagttgttagttccctaagcctcaggtttctttagtctggctgaaccaaaaggagtttctgcttagctaggcagggccgggggacaacagcttctgcgagtctgcgattgtggcggccggtatattcggcggtttacggtaatgggcgggccccaaatccccatgtggtcccgacatcattgacatggcggaatcccccatcaaaccctcctggtagttatttgagcggcggcggcggcggctggaggaggagagcggcggcggcgggagcagcgaagggggcggcagggatcctccaggctgccggctgggaaggcgtgggcgacccggtgtgtggcgcgcccagagccccgcgtttcagccctagggaaggtaaggcgtgcaagagccggggactagaggagaccgggaccccgagcgcgatcgccgggtcccggtgcactggaaagccccggcctgacgccgagtccgccaaagtgcgtccctgtcccgggagcgccctgggcttcccggcaaaaacttggcgccggagtgctggggcgccccgtgctcgcctgggcaccccgggaacacgggacccgggagggggcggcccccgccttgctgggctggggtcccccgcctgtgccccctgcctcagggtttggaggagtgaaagaaacgggtagattcctcttaaaaaaaattgggcagtggctcgcggcctccccccacccccagccttcccagcagattttgtccgaggaatccgctccccctcccggaatctccgcggcaggaacgctgcccaggagggggagggcgggcggcgaggccgaggaatcttcgacgtgtcactttctgaggctgtagatttccatatggtggagggaagagggcgggagtgcgaagtggggctggaagttggggccgcctctccgcgccggcgggggcggtcgggggcctcgaacccggggatgctcgcggggagggtcccgagcccgcgccggcctggcccccccgtccccggctgggcctctccgggacactccccgccccgctgctggccacctccgagcacgccacgtcctcctccccgtcctgccccccgggctccccccgggctgggggcggtaaccggcggccgcggccggacttggcgagccggcggctggaagctcgggcgggggagcggggcgcggcgggaaggagcgggcgacccggtgtgtgggccagcggagctccggtcagtcggtcaccccgaggggcgcctcggccggggatagggcgggcgggcggaatctgcgccccgaggcggccaggaggggccgcgcggaccgtctggtgcccgcggctgggctggggccggcaggcgtgggaagggcctgtcactctcggcagaaagtggggcctcgggctgtgcccgcgaactttcccagaggtccgggtcccggcgtcccgtgggaaccggaggacccgggcccgccgtctcgggagactgggctgcgccgcccggcggcgcctttggcggggaggcttccaggagtgcgcggtcggagttggagcttttggaatctcagctcccaccctgccatcccagacgaagggaagcaatggcattttatccagacagtgccgtttgcagacttccttaaaagttataactttttgttttcttttctcctcaacccagcattttatttaaacaaaatttagaatttggccgcaatgggccaacgctggggccaaaaatccacaggtttctctctccatccctgctggtttctagtcccccctccccctcttccctcccaggcttaatcatattttggaacgggtgaggtcttttgttgggtgggcaccccct

SEQ ID NO: 30999 - DNA, 2300 bp, Homo sapien
atacaaatgagaaatgtactataatcttaaggcataaagatgtttaaatgatggacaaaaattgagggccacatctgagcatcagtttgaaatcagaatatctcctctgtcaaggagtgactttactttctagctgggtccttgataagcttttgaatctctctgagtctgggtttcctcattttaatataaggaggaaagatctaactcgtaccttttcaaatggtgtcacaagggattaatgagtcagtgtattgagaagtgtttggcaaagccttatacaaactccatagttcattatattccagagtttaaaactgagctggtgctatggtatttctctgcacattttcagagacctccaaattgtgcttggacagtttgaaaaatgatttatttttctctttgtgatcagtaaacaaggtccaagctttagatgttgtattttattttaccccactcctaatggaataggtgatttgtgacctctgcaaagttgtactatacataagttgtcccatatctgtgtttttgggaagctggtctgtagctgggctagtgttgctgaagtgggcaggccaggcttgattcagggctgtttttgaggtggcgggaaaaagtgcagtctcttagaggaacgttcagtactgaatgataaaggaataaggttttaggccttgtatgttaccttagcctattacttgagctttcagcaattacagctgagaatggaaaagaatcgtattttcagtgtaggggagtctttgcaacctacctgcctttccactttagaaatcacaattgccttttcttcttgttaacgaggttaatccattaagtgggatatttatatggtaagacattattttcaagtaaattaattctcactcttaaggctgttgagaattcacttaggtggttgaggagaagctttgtactttagtttactgagtgtctctctctctctctctctctctctctctatatatatatatacactttgccttaaaatatatattatggttatggcattatgtgttgtaaagagggagagaatgcttgaattattgtggctagataggggcaggtagacaagcacaggcccaactggaaggatgacttgatggtagttgagcactttgcaaggtacctccagtgagatgccagaccctagtaacaagctcacctggaggggagtttgtttgtggtgcaggtttaatgtcaaggaccagttcttggaaacagaaggtatgtggggtgccagttgaagatcaggggacagaaatgtttttaaaaccaccaagtataaatcacataagatcgatagacagtcgtgatcagccatctacatacagatgaggatgtttgtcagtttgaaaatggatcgattgttgaatttttctttgtttctccccagttaagatatgcaagtttagcattctgtaagtgttggatcagaatttctgatgcccttggcactcactactcagtgtcagtttagacattggctcctaattttttttctttttcttttttaagatacagtgtttcactgctgctggagtgcagtggctctatcatagcttactatggcttcgaactcctgggctcaagtgatccttgagtagggctatagctaggactataggttcacgccaccatgcctggctaatgtttttttttttatttttatagagacagggtttcactttgtggctcaggctggtctctaacttctggcttgaagcaatccccccgcttcagcctcccaaaatgttgggattataggttatgagccaccttgcccggccctgttttgtttttataatatcattaaaatacctcatcagtttcaaataaccattttgcagggtggtaggggatttttctgagatggtgttgagtcacagtgttatttgaggttctagtaagtatcaaagtgtgtcttgtgttaaatgattctatttgagcttaaaatgtaatttcatttcagttacttgtttattgactcagaatgcatttgttgagatctagaccaggttctttgttaatggaatgttctactctgttctgatgtttttggaatcttgtatagagaacagtgtctaccaccaaactcctaaggctggatggtggtaagttcaactctttgctaccttctgaaatttgagaaatagtaaaattggagcaccttcaggctgtgttagactttaaggcttctaaattatattagaatgtaaggatacatctttgttttgaccctggaaagagtagtaaagattttcataaaggccaactag

SEQ ID NO: 31000 - DNA, 2300 bp, Homo sapien
gggataatccaggtcagtgattccccaccttttcagagttttaacacccaactggcatcattgtttaattccttagagtatacacatccatttaaaaaatgtgctctatatttacacatacatatgtaaatatatctttgtaaggaaagaattaaaatccattttgtttggaaaatataagaactcatctttagatgacctgagggatcccggggtcttataaacctaaagttgggaatcactgatgcatactctgcttaaaacctggatgaatttcaggtctcaggcagaccagcaacttcaagaaagaattttcttattaggaggaaaacgtttcacattttctttctccctttcctcaattgtaaatcagaaacatactcttgttccattcagtcatgtacaaacttgaaagttctggatttagttcagttttcatttaaatgtccttagaacagattccctgatcaaagtgctccaggtgggggcacaaggacaggggaacattctctggctgccagtctgtccttgaatccacaaagacgctgaaagcactaaagatctgacatctttttgttcgtcagcaacagttattacttacacaggagataaggcaaaacaaaaacctaagtcagtgtacccaccctcaaggaattaagggactagtagtggggtaggatatcatcaaagaaactaccaaagaacagtttttttttgagttctcatcttagagatgggttctcatcttagagaactttgattttgtcagttgtttataactttaagtgcatcactatcctctcctccagattgagcctgcaagagcctaaaataacagtttaggacttagagcactcacctgagatccgagttttgggactcagagattgtgtgactctaaagagagaaggaagggaaggagagggagaagaatttcattattaatttaactaccatttactgggcccctgaggttttattactaaccataatagagcaataacaactgtttactgagtgcttcctataaaactgggtagtttagtaggtgatttacatattctcccaattatttatcatacctatctattcttggaacatgaaattagttgttgatattgatattaaacagctagcaccagaccacatgcgacaaacagccaaggtaggattcagatacatctcaggggaagctgagctgccttttgccaggggtaaggcactgtgctgtttgttaggctcttgctctttcctagggaagagtcggccctggcatgtttttgaagtgggagacacgatccgactcctcttcctggttgcttcccccaacttgtagttccactgtctctctagatctgtctaccctaatgctccaagagaccccactgcggcatcacctgtagctcttggaatcctgaaaagcattcttttctccagagttctttacttcccttcccattgttaaaaacccactttctcagtgaagcagatctcagcatgctttttaagaggaaagcaaatgatgaaacttccctctgctaacgtatgaaggatgaatagcctctagtcatctatccagaggatcacattttttccccattttttaaaaagaggaaccttaatgtcgctgatggctttctaatcttaagtacttttaaaaaattaaaaagctgtatgtgggatgttataaaaagaaaggcttgactgtgctccaccagacctccagcagtgcctgtgtttctcagctgccttgttctcactctacgcttgaattcaaagtccctcttcaaagtcctatccccagaggaagtagcgtaccatgagggtgtaaaaagggagaggtggtggtggtggtaggtaggtttggctatttgtggagtatgatttattcatagtggggactctctctactgttgaggtatgtcaaagttagtgtatgatgatgattgaccaaggaacgcaggaaccatcagctttatccccctgaggggagagcacaggactatcatagacactgtatgtgagccaggtgggtaactcataagttttgtctgtgaacaactttctctaatctcatgttactattttttttaggcaccaattgacaacggttcaaaaatcaccaactaccttttagagtgggatgaggtaagcttattttcatattcacccatctaaaacaccatttcaaaaacaaaattaactgaacaaatgccatcttattcttttataagacatgctaaacacagaaaaaaggaatgctagtagagaaatttaaatcaatagttattgactatgga

SEQ ID NO: 31001 - DNA, 2300 bp, Homo sapien
ttcagaaatagaggaggaaagaaggtagatcatgccacagcctgaaatggatacgacacataccagggctcccatagagtgtgatcggatgctgggtgtaattattcaagtgtatgcatttgaataaatcatcttcctcaacctcaacactcaaggttgaagtaagcatagtgtgtgacatgccagccacatagtgagttcactcaaggagcaactgagaaatgtcaggctttacttgctgcacacccccaactcggccaccaagttgcatctgaatgcaccttgaacccttgataaaatgaactttcaatcttaaagactgttagaactctcactcccttccattgggaaaggtgcttcctggctctaggaggtgggtggggaaggggttcctttgaggaggatgaatgtggtgtgatttttttggggggcggggcggggcaggaggacggaatctcactctgtcgcccacactggagtgcagtggcgcgatctcggctcactgcgagctccgtctcccaggttcacgccattctccctcctcagccccctgagtagctgggactaccagcacccgccaccaagcctggctaattttgtttttgtatttttagtacagatgtggtttcactgtgttagccaggatggtctggatctcctgacctcgtgatctgcccgcctcaacctcccaaagtgctgggattacaggcgtgagccaccgcgcccggccagtgtggttgtttttaatgtgctcaccgtagcaacagtcaggctagtggtgtgttcattttatttttaattaaaaccacctggaatgtgttttagtggtatttggagacctgctgaaaggaaggagatgcttaaatttgtttacgtaaaaaatgtgcttgctttgttttttgtgaaataaattgagaacttcagacacattgctcaaggccctgggcctgtccagttagaatgctaagatccactcaatgttagcttatggttttcttttgcatgaacatggataagatagtaagataatgtggatatgggtaggaaatattctaacaaactactgataagagtattacatgcctgtgagtgtggcatagggcggttagactttttccttacttgttgaacctaatacgagaccccactagagtgttttatttttactttaacgaatttgaagtatcacataaggctaggaaggcattcaaaatacatttctagcctgacaagaaacttagagtgactgtaatatacatagattaattcaaccaatgttccaagtgcttatcattcacttccaccctgcaagcattgattgagctcccagtttgtccaaagcactgttatgagcaaagcagacgtggacaaaatgattcaaaggtttgtgaccagtagcagcaatcagtgaagaaacaccatcactagaatgtacttgtgaaggtattggaggccactgcatggcaagaaagatacagctggagagggccttgtatggcacactcagctgcagagacgggtctgtaggtgctcaggagttactgggaaaggctgtgtattttcagagccagtgacccctctgtggatgcagtagactcttggttgatcaggctgggcagtttgggccaatctaagtaaggaggaggatcttagaaattgtgatcgttaactggagcatcgtcttgtgcctgaaaggacctttttttattttattaaccaaaaaaaccacaggtacagtaaattacctgtctcaattacagaattttctgtagtgcctttatgttagagatgagatttcattgtagaatgctttatttgcaacatggacacttccctgtaagtttctattgtttttgttcattcaaactaggaaattaagcagttattcaagatgttcaagatgctccttcatttatttagggttatctgttgtttttttttttttaagtatatgcattgtttcattgtttacttttagggaaaaagaaatagtggtttcagacagtgcttcttcgggagccagaagcactgcaagttgacaaagctttgtccggcaatggggtacacattcaggctggccgctcgaaacgacattggtaccaggtatgacgtttccttgtcctcttgcccttcagcctttggatggtgatcctgagccttcttttacatagctggaaggcatgaggaagcctgctgcctccacactaaatcaactggaggttttccaagagggaatcctaatcagaggagagaaggcctcctttaagctggtgaatgtcactatggcctctgcagtcttg

SEQ ID NO: 31002 - DNA, 2300 bp, Homo sapien
caagaaagatacagctggagagggccttgtatggcacactcagctgcagagacgggtctgtaggtgctcaggagttactgggaaaggctgtgtattttcagagccagtgacccctctgtggatgcagtagactcttggttgatcaggctgggcagtttgggccaatctaagtaaggaggaggatcttagaaattgtgatcgttaactggagcatcgtcttgtgcctgaaaggacctttttttattttattaaccaaaaaaaccacaggtacagtaaattacctgtctcaattacagaattttctgtagtgcctttatgttagagatgagatttcattgtagaatgctttatttgcaacatggacacttccctgtaagtttctattgtttttgttcattcaaactaggaaattaagcagttattcaagatgttcaagatgctccttcatttatttagggttatctgttgtttttttttttttaagtatatgcattgtttcattgtttacttttagggaaaaagaaatagtggtttcagacagtgcttcttcgggagccagaagcactgcaagttgacaaagctttgtccggcaatggggtacacattcaggctggccgctcgaaacgacattggtaccaggtatgacgtttccttgtcctcttgcccttcagcctttggatggtgatcctgagccttcttttacatagctggaaggcatgaggaagcctgctgcctccacactaaatcaactggaggttttccaagagggaatcctaatcagaggagagaaggcctcctttaagctggtgaatgtcactatggcctctgcagtcttgcaagctgtattgcgaaggccccactaggggtctctaagaaccaaggtgaaggtagcagtacagatcttgaaaggaattcctcttggagctttaattttttagatcacatgcctttttcttttatcactttagcaagctcttcattcacttgccttttttcaattatgtgagtgtttcctggtacaaagaaagagatgctgggccagccattgttgtcaagcccagggcagatacggaattggagaaaacctggactgtcttagaggcctctgcaggcctctaggctgtatgagaaaggcgagaacgggtgtactgtaaggtatcaattgattaaagaggctttgaaaaggccatgtttcagttgcacttggggggtaactcttcattaagggaaaaatctttttctttcatcactgcttgttgaaatcttcttaaaggttttgcacatcggtggtccccaaccctctttccaacctaaagaacctctttttaacatcacaaagttttacagacctgcctccaccaccatggtagccattacagcttcagagttcactggttgaaaaaataccgacacaaagccctttatggctcaagaatttttaaatgaattggaagcatccacaaacttttgaaaaacagcactgtatatattgtaaaacattatttcatcaacaaatatttgttgctcacattgatttgaaggctccttgacccgtaacttgataaacattgccttgtgctataccttctttccagtgcttttgaggggggaaaatgaattcttaagtacaattgtcctttggtttccacaggggattggtttcaggacttcccccacctccctgccatgaataccaaaatctatggatgccccagtcactgatataaaatggcatagtctttgcatataacctacacacatccttctctccttaaatcttctctaacttgcttataatatccaatataatgcccacacgtcacttcattcacgtggactcaagatgcagaacccaaggatacagaaggccaactgtatattgtcctgtgacttggtgtgtgtgtctagtagaagatcatggggtggggggatggggaagctgaaggtggttatagggaatatcacacacagcatccttacctggctttgcttactctacctgctaggctgagttgggtagtgtgcaggctgagccttcctcttttaaaatgccaagcctcttcacatgcttctaactgtgtgcctcactttctttctctacagtggttatagccaagaggtggtgtgctacacattaggaaatatccctcagatgccttctgcaccaaggctggttcgagctggcatcacatgggtcacgttgcagtggagtaagccagaaggctgttcacccgaggaagtgatcacctacaccttggaaattcaggaggatgaaaatgtgagttttacagattttatac

SEQ ID NO: 31003 - DNA, 2300 bp, Homo sapien
acaggtgtgagccaccgcgcccggcccaccattaaatttttttttaaatggcacatgctaatgccaaaaacagagagcattgataaaacttttacaagcaagcagtgctgatgtgtggctggctttttattctgtaccatgagaaccacctggaatttttttaagtctgttggttcctattttaagctgaaaacatgagaattcttttgagatgagcacagctgttctaaacataaaatcatattttgtggttaaaaacctggtttagaactgctgggcatggtggctcacacctgtaatcccagcactttaggaggcgagatgggtggatcacgaggtcaggagttcgagaccagcctggccaacatggtgaaacccgtctctgctagaaaaaatacaaaaattagctgggtgtggtggcatgtgcctgtaattccagctacttgagaggcagaggcaggagagtcgttggaacccaggagtcggaggtcgcagtgagccgagatcgcaccactgcacttaagcctgggcgacagagtaagactctgtctcggaagaaaaaacaaaaaacaaacaaacaaacaaaaaacctggtttagcttttcttcattagaaaaacccaactaggttagaagtcatgtatatgccagtggctcgttgtgaatatttaagtatgttttgaattctcatggctccctttagctactgatgacaaatcaaaagtaggggcccttctggacttccagttaacaactttgtgactgcatggctgagtgagtgattgaatcttttcagtaatccttgctcccagtcaccttttcagtacaggtttttttgacctgtaatatcaggataattgcctttgctattgcctttcttcatatggccttagtgcatgcgactctgttgtgaatctaaactaataagccgctgggggaatttgtggaagttactctagttaaaataccagggaatagaaaaagcatttcccctaaaacaacttcatgtagtaaaaggcttttgtaaagtggtcaactggaaacacagcgtgagtgggaataaaacagaggagtgaagagcctcccagtggcctggaattgtgagtcaggcaggcggctgaggcagccctgggtgcccttgcttctgacggcatcagccttggggggcacccagactcctggtgaccgtttctctcttcagttccacaaagcggtcagatcacttgggtcatgccacatttggtctttaatttgtcacccccgtaggcatttttgtctttttttttttttttttttgagagagtttcactctgtcgcccaggctggtgtgcaacggcgcaatctcggctcactgcaacctctgcctcctgggttcaagtgattctcttgcctcagcctcccaagtagctgtgattacaggtgcccaccaccatgcccagctaatttttgtatttttagtagagacaaggtttcgccaggttggccagactggtctcaaactcctgacctcaggtgatccacccacctcggcctcctaaagtgctgggattacaggcgtgagccaccgcctgtaatttttgtcttttaagtggagctccatgaaggcagtcaaaagacccagtttttaaaagaggatttcacttcctttgacctctaggcagataagaacagggagaaattcttgcgtaccaccccagacttgccagaagcctcgtggccaagaagtagccccgtgcctggctgcccctgaggcctcctcacaccaggagcatttgatagcttgcccacccctgttctgtgtctcctaccactccctccatgccagcggcacgtttcattatggtttcccacatccaaacctcatagcaaatgtaattgtggtgataataggtagtctagccagcaacactaagtattaaaaatgactcaatgttattttggtatttaactttgtaaaagaaaaaggaagagctttctggctatttaaaaagaaaaagaagatgttggttttcatgaaaacatagagctttttcttgtcagcaatggctgatatgctacatttttacaagaggcataaagtcatgcataagtcttgttttacagcgaatcagtgggaagtggcctacagtgggtcggctaccgaatacaccttcacccacttgaaaccaggcactttgtacaaactccgagcatgctgcatcagtaccggcggacacagccaggttggttttgtttccatatgaaagtaaacctcattgatcaaattcggacaaactgtctataacatcagaagcaaattgc

SEQ ID NO: 31004 - DNA, 2300 bp, Homo sapien
ttgcttgaacctggacttatgcgctcagaagtccaaacgggtgggagatccaatactgggaggcggaggttgcagtgagcagagatcgcgccactgcactccagcctgggcgacagagggagactccgtctcaaaacaaaacaaaacaaaaccagcaaaacaaaacaaaacaaagcaaaacgaaacaaaactcagtttggtccaatgtctaacacaccagcggcaaccaaaccactatgttaaatttcctgtatcaaacttctctcatgtagtaatttactgcatggagtctttcacgcatttgtgcacacattcagtcttaggtctttgtggacttttaagtattaacaatttaggtagtagaggtggtacaaactgtctgtgaaaggcaagtacaaacgcattcaactgagggggatactctctcatacacagtacgtggtatctcatcgggtgagcgccgatgtgtatggtcaaggcagtgactaacgccggcctgtgcttcgtgggagtctgccctgctcctccgtggggtaggactgaggcgttagaagcgcaagttaaaaacggtgggagtgacagggaagccattcctccagcggcgctttgcggtaggatggatgtggcgctggccacagtgctgaatatgttcctggggcggtcccgaggtcggtgggccgggaggggccggtcggatttgtgaattcgctggcaactggcagtctcatgccttcgggtgctgatttctggctctgagcaggagacgcacagaccgcgtccagagggtcaccttgctagtgtaggggtggcctttgacctgttcccaccggcacagcttctacttctcaacagcaacgcgtcttctatttattgagtgcctccggtggtccctgacacttgatatcacccccagtggtccgcacaaatcattgcaattcaaagaaaaagacgtaatgctcaggaggttgaagaccttgcccaagggaatacggctactaaatggctgatctctctcagttatgcctcaaaaaatgtttcctgcacactctcgacgcgccagcctcacagcctcttcttcacttgccgcctccacacacctccaaccctgcctttttcctttctcctgttccctccctgaccaacctcggcaccccgccaccaggtttgcatcaagcaaaagtaatataccctacagcagactctctaccactaccgagtgatacaaaggactgggattctggacagggtttactcacatatcttgcccctgtgcgctcagaagtcccaaccgggtgggagatccgacactggtccccgagtccccagctcgctgtgtgaccttggacaagtagtcacatcgctgaacctgggtcctataactgcgtgagactattctttggtgctcaccggtatgaatacaaacacaaggtccttcttttctctctctatcccccttcccaagtcgagttggtcaagctcgctttttctttccaccagggccatagccagctgcagccttgtggaggaagaaatcaggtcccagctgctaaaggtgtcctccccaccgccaccgtcgtcttcacccccacccccgggtgtgacctgtccttccggggcacactagtccagcgtcgcccagggcttcggagagagcgcctcacgctcccgcttcgcggcgcctggtccctgcggtccccactcgctgcgacgctttgggaagtgcgagatggaactggatcgagaacgcaaatgcgaggcagggctggtgacaggtatgcgtgtgggcgccggccggaggatgtgttgggagaaactttgggggagttggtgggggaaaggggaggtgtcagagaaagcagtgggtcactctctcacccactgaccaccagtctctctccctcttccttgtccccatctcaccttcttcctcggcttctgcctctcacctccctctctttcttctccaagcatcctccctacgcgtctgcacccgctcctccctcgcaccctcccgcgcctaagcggacctcctcgggagccagctcggtccagcctcccagcgcagtcacgtcccagagcctgttcagctgagccggcagcatgtggaacgcgacgcccagcgaagagccggggttcaacctcacactggccgacctggactgggatgcttcccccggcaacgactcgctgggcgacgagctgctgcagctcttccccgcgccgctgctggcgggcgtcacagccacctgcgtggcactcttcgtggtgggcatcgctggcaacctgctcaccatgctggt

SEQ ID NO: 31005 - DNA, 2300 bp, Homo sapien
gttagccaggatggtctcgatctcttgacctcatgatccgcccgcctcggcctcctaaagtgctgagattacaggcgtgagccaccgcgcccagccgactcttgtaactcctcaaatcaccccatctcttgacctgaccccgagataagcctccttatttccacactctagactttcttacgtgcttataagatagagatgttgacttcctgcacgtttcccattccttcgtttcatgcctttcacgtacatcatagccgtaatgtttctatttctggattataacaaaggtgttaagttggttttctttggtcttctcccctgtgtttctctgccatctctcgtttcttgtttctgccctgcccggctgtgtgtcttgtgcattacggttatcctactcatctttcacctgatttaaaaaactcattcagtctaggacttagagtgtaagtgtgttcaaatagtgttaggttcacataatgtctaaaacttttagtaggaaaaatgctaccttgccaatttgtctgtgtctgaaaggaatttgcatttaaaaatttggcaatttgacagaggcaaatttaaaatttgaaaatattttcttaaatatagactcatttacagatagaaggcaagggcaggaagtgatggtgaccagcggtgcctgaatgaactcaggaatgtaactgtagatctagggtcccaaactttaggtttcaaaggatctcttggagtacttgctgaaaaatgtaggttcctaagtccactgccagaaactctgactcagtgggtcaagaatggaataactaaacaatggccccatgcagtggttcatgcctgtaatcccagcacgttgggaggttgaagcaagaggatcacttgaggtcaggagttcgagaccagcctggcctacatggtaaaaccccatctctactaaaaatacaaaaaaattagctgggcatggtggcatgcacctgtaatcccagctacttgggaggctgaggcaggagaattgcttgaatctgggaggtggaggttgtagtgggccgagattgtgccattgcaccactgcactccagcctgggcgataaagtgagattctgtcaaaaaaataaataaatacatgaaagagagaaagaaagaaagaaagaaagaaagaaagaaagaaagaaagaaagaaagaaagaaggaaagaaggaaagaatagaaaagaaaagaaagaaagaaagaaaggaagaaaaggaaagaaagaaatgctgaataagatatagagacaacatacagctgggccagcttatgacatctgatagtggggagatttggggctgggtcctgaatctgagggtaattaactccctgtaacttcttttcctaatctgtaaaaggatagtgacagcgagacattgtgatggggttaatattttggaaaacatccacatgtttttttcctttgcctttctgagtgtgtcaactacttcctacctgtccagcctaacacacaggcatgttgtcttggtagggatggagatctgagaaggagattagaatttgtgtctgaaggtttgcaaagaggaagaagtcgtcaatatttagattctgacattcaagatggaattatgtagcaagaccattgctatgagacagtatttctattttcctttatccactcccaccctgccctcttcccaccctcacagtagcatgagaaaaaccacatatggaagtttcaggtcataaaaattatcttataatttagaaaacaggccttgtgcctatgacagccaggccatgaggcttagagctctgtggtagaatgaggatatgttagggaaaagcaaagaaaatccctcccctctttggctgaggacattatcaaaaggagagcaagaaagagaagagagaaatgggcttgaggtgagtgcagataaggggtgcatggatcctgagggcaaggagaggagcttctttcagtttccctcctttccaacgactactttgagacaagagctgtccctgggcagtaggaaaggggagggacagttgcaggttcaatagatgtgggtggggccaaggccacagaacccagaaaaacaactcattcgctttcatttcctcactgactataaaagaatagagaaggaagggcttcagtgaccggctgcctggctgacttacagcagtcagactctgacaggatcatggctatgatggaggtccaggggggacccagcctgggacagacctgcgtgctgatcgtgatcttcacagtgctcctgcagtctctctgtgtggctgtaacttac

SEQ ID NO: 31006 - DNA, 2300 bp, Homo sapien
ctcaaaaacagcagtgttgtgcctgaaacttaacacttttagactgtggtgccgagttctgttctctgtacctctctggtttttggcatgaaaataaagcagggaaagttagcaaagaaattcattaacaaagttaccatttaaataacctctccatcaaatacatggtcttcatactgcaacatttccaggtgaataactttggtgtttctcttctgacagtggcgttcacaatacatacaagagggagcttggagatcacacatttccttaccttggaggctgaagaagatcctggtttatgaactctctgttagtaagaaaaccagcaaaaaggcctttcagattctccgtcccatatagtgtgctattcaggagagccgatagagggcggttactgaacacagatcgtgtgaaaattaacagcttccgaactgatttctttgcattggctttgtcagttttactttctatttcttgggaaatatttctatttctagttctattagatttctatttctattcgtttctatttcttgggagtatgtcaggggaaggccaagatcatagcagcaacgcagacaggatttatgaagtctgcttaccatttctcatagaactctagattctccaagcctacaagattctccaagcctacaagatttattctaataacccctgaagttaatcagattcatcttatccctgactcctcacccctcttctctcaccaatacacatgtcctcttgctcctggtaataacacaaaaacaacatggttaaattttggactgaacaattactaggcaagagaaagcacaaaatcctttggtcttgcacagctaatggtaagcagcaactggaaataaaaacaaatacacattatgagttcagctatatctcaagttagtttttttgcttttgcttttgttttcttttccctgctctattaatgagttaatcaattaagattttctttccttgcatggaaagatttttggctttgtttttagattaagaaagcttttctcagtttcttagttaattatgaacatgcactatcacatcatcttggactcaattcaaaaacttatctaaaacatgtaattactgggaaattccagattaatttcctgcaagttttagttagttaacgattgtgttaaacacttaagagagcagctcctagatgactaaacctgctcagctgaaatcaaatgctctcatgcttccctgaatggacacacacagagtctcttcacctgaggaataaagtgtaaggtgaggacccggttcttacctaagagaacaaaatagcaaagacacctctatagctttgagaatacggacatgttgggccgggtgcggtggctcatgcctgtaatcccagcacactgggaggccgaggcgggtggatcacctgaggtcagaagttcaagaccagcctggtcaacatggtgaaaccccatttctactaaatatacacaaattagccagacgtggtggtgggcgcctgtaatcccagctactcaggaggctgaggcaggagaattgcttgaatgcaggaggtggaggttacagtaagctgagattgcgccattgcgctccagcctgggcaacaagagtgaaacttcatctcaaaagagaaaaaaaaaagggatacaggcatgtcttcttgagttctgggtgagaaagaaaaaaaagaatacagatatgaaagctagtatatactcatgtatatatgaatgtatatacattatataaaggtatttatcttgagagcttattgttttaataataattcttttcctatggagaactcaaaataatatattgagtccctgtctgcattgccttggcggggagggaaggtcggaaagagagagaacaggagaaacgaaagttcacttcaggtcctaggtcacgtggtgaatttggcagagcttgaccgggaacgcctgcttttgttagactttgagacttgtaggaaaacactccaaacaaaggccttaagacaaatctaccagttgaggtaggaaatccactgagatatttagtagacagaacttgataatttctttcctttcatattttcattttagatcttcagaacttttattcaggggagaaaggcccaggtagctgctgctgttcagcttaaggctaatctgaccttctataacaggagttcaagtcccagaaatccctagtcctccatcagaggtaagtaaggatggcagctgaacccaagaaaaggagcatgaatgattaactcttccttcatttcacctcagaaaatg

SEQ ID NO: 31007 - DNA, 2300 bp, Homo sapien
taaacactgctaagaacgttcatctcccagagattctaagtaagtttggtatgtggtgtaacctgggcatcaagtgttttgttttggtttggtttgttttaaacagttcttaggtgattctgacatagcatctgtgtttgagaggagtcagagagatcctaagtagctgcttcttaaggaatatggggaaccccaaggaaaaaaagcacaatgaacataatctcaatagtctgactcactgcacaagataaaggacataaaaaatgctaaagcataaagtatttgccaatgacaacagaataaactaacattcacatttcttaatggtaggcagctgatgctgtcttaggaaataggctgagcttaatctctcaaacagcttaaattgcttttgtagttgagccaatcaactcaaactaaaattatctgagtaacgaggttgacaccatgcaatttatttatttatatatttttttgagacagagtttcactcttgttgcccaggctggagtgcagtggcacaatctcgactcaacgcaacctccgcctcccaggttcaagcgattctcctgcctcagcctcccaagtagctgggactacaggcacctgccaccagccctggctaattttttgtatttttagtagaaagaggtttcactatgttggccaggctgctggtctcgaactcctgacctcgtgatccacccgcctcggcctcccaaagtgctgggattacagcgtgagccaccgccccaggccatgacaccaggtaatttagtagtagcactccaggtttcaatcacataaattacttccagtttacatttattttattgcttcaaaaaaggtaagcattcttatagatgttcccacaatccacaatggacccttggggacaactagaagactcactacaagtaccaggcacttaaatacattactaaaccttatagcaaacctacaaggtagttttttgccctattttacagggaaaactcaggaagatttgaggtgacactggaaaattgctttattgggtagaatatgtttccatctgatcataatgatctttctgatatttcacaatttagaggagaagtgataagagccatttttctgcaaatccactcctgagccacagtgtcaggtgagaacactggttacctcatctattgctgacttcaggttacacccactatcattcccaagcaccacctgagggtatactctgtggaggaccttacacagccttgtccttaatgggctggcaagcctagctgggaaagaaaagcttttctccaaacctagcttgtccgagattaacttatgatggagaagacttctttggtgacctgaaaactaagaataatctctgcagccaacacagcagtttgatctttttcctgttttcctctgtttaagttattgtagtagaccattaacccacccaggtaaacatcactgttcctcaatctttgaagggtattactttcaaattacataatttcatgggggaggagagggaatgcaaggcttcctacaacaagactgactttcttgacaccagtgctaaagaaggggatgatcattttcaccatgtcaacattataggaagcaagaggaaaagaaggggggcaggggtctatagcttcatagacctttcctaagagacaaaaggggctttggaggtgagaatgtggctgaattcaggaaaagcaaatccacgctaggaatgtgctgcaatatcctagtaaggggacttttcataggataaagccccacagattatgtaatcctacacataatgagtggacagggaacaggaacataaaccctctgggaaaatcatgacttttttaaaatcagctttctcaggttgaaatgattttttttctctttctctagttgtcatttctgaaagaaagagtttataaaaatattctgagattaaagcccaaggttgtggggagggaggaggcttggttttggagaaggttagagtttagatagagcaggctgctcagaaatactgtccaatcagagggctcagccttggctgcagactgtagtttagattttagattctctgacactaaaaataatgcctcttaccatggaataaaccagagacagttatattttcctgtgtatggaaggaatgaacacacgcccatgatacagtggagagaaatgttaccctcccaggttaaggcaggtaacctcgctcaggaaaaggttatctgacagccaaggacataaaataaatgctgcagggcaagcagaaaacatgcatcatgcaa

SEQ ID NO: 31008 - DNA, 2300 bp, Homo sapien
agtcaaaatctaagagaaaagtattgtcgacaaggtaaaacttggatttattttgcagatttcctgaaagcaagtaatgtaactaaatccagtagtcagcttggtttatatctccaggattattcctaatcacccataaagattagcttctggctgggcgtggtagttcacacctgtaatcccagcacttttggaggctgaggcaggtggatcacctgaagtcaggagttcaagaccagcctggccaacacggtgaaaccctgtctctactaaaaatacaaaattagctgggcttagtggcaggcatctgaaatcccagctactcgggaggctgaggcagaatggcttgaacccgggaggcagaggttgcagtgagccaagattgcaccattgcactccagcctgggtgacaagagcgatgctctatctcaaaaaaaaaaagaatagcttctaattttctacacatatactcacacacaaacataaacataaacattcctatctgtttagagttatgagtttaaccagtaacttaaaagacagagagagagagagagagagagagagagagagagagagagagagagagaggccaggtgccgtggatcatgcctgtaatcccagcactttgggagactgaggtgggcagatcacaaggtcaggagtttgagaccagcctggccagcatggtgaaaccccatctctactaaaaatacaaaaatcagccaggtgtggtggtgggcacctgtaatcccacctactgaggaggctgaggcaagagaattgcttgaacccaggaggtggaggttgcagtgagctgagatcgtgccattgcactctagcctgggcgaaaagagcaagactccgtctcaaaaaaaacaaaaaacaaacaccaaaaacaaacaaaacaaaaaaaaaagagagagagaacttgcttgaaataccatgaaagtgtgcccttcttatcagttttccttcaatgttgaagaagaagccaactgtttcctaaaaatctcattatcagaaccaaatttatggttatttcacttctattaatttgattaaattaaaattaccatcttaagatgcataattatatatactaggtgttttaagaccttcatcaataagtttggagttgtcatcctaccactttcttgaaacaggtcttctaactgttttccttctggatttctggttgaaattttgctagtgaagttttctctctcccattcagtactcacccacccctcctcacccccaatcattaacaagaaatctgggtttaagtgtatttctgctaccattgactcactgaaagaatttttcaggtgatatccacacgtttctccaataaaaagttattattttttccctttgtagtaatttgtggagagatcttctgatgaaggaccaaaattctgtgtcaaatttttaccctctagttttagcattcatttatgattttctatggatactagctggcattctattttaagaaaagcctttcttctttcctcatttatttatattaatatagattgttgagttttattttaatcaatgggttatccattatgatgatttatattgatggtaaaattatcccagcttcagccactgggagacccttcaagctggcagctgtggacctttgaccagttcctatcattttttgagcacttccgcatctctggcacaacaggttcatcttgtactttacagccccagccctggtatcagccttttctccagaggttgtgtcaaaaagccgtggttcctcttattggagcataggatttagaaaccaagacttgggtgctagatgtactactggcctttcattgcttgagccagaagaatttaatatcttcttttgccatatatcagctagaacttacaaaccactccaagtctggctccagaaaacagaatttttatatcctttctcagtactctgagtcagaatgacccacttgctttgtccagagactcgtcacactgaaactattttccgtttgagaccttccaggaggaaagccatcctcacacgcatgcagtacaaaccagtgtcctccagagtccgctgtgcctacggccagagcagcgacagagccttcctcaaacctgtagtgactgccacactttgcaaggacaccgtagagggggcatgtccgcgctccaacttcctcccgacgcagcctctgattggctcctgggcttataagaaacgcgtgaatgagcagctgccgcgggcagaaagttgccggaggtctccgggtggtatcgccctttcctct

SEQ ID NO: 31009 - DNA, 2300 bp, Homo sapien
aatatttatttggtacctacatgtgaagattcctgtgtttattagagagcaatgtgtaacatttgcctttgcagtactagctttttgaaaatacctgaagatgagggatcatgttttactttaccagacaccagccctctgctaggtgcaattaagtggcatatgatcacctatgcacacgattatctgaaatactcctctccacattgctttctttgagcctgcagacagatctatactagactttatttacactcatctattatttctgggttctaatgcgggctaaaatatttattaggagacactgggtaagttacttaaacctttcctacagtttcatggtatcatgggactatgatacctacttgtgggttgttttaaggattaaataaggtataaagtgcatagtaaagtatcagtatgttcattctctttcttctctcccttatactgtaattatctgtttatctgctaatttccctcaccagattgtgtggtccagacaggcagttttctatgccttattcatctttataaccccaacaagcacaatggctgtcttaaaattagtaaatatttgctgagtaaatgaagacctaagagagtgaaaaaggttgtattacccgtttatttgttaatctaactgccacacatcccttaaaagaaatcaagtacagcttttgttagggaagcttaaaattcatggcaatgataccatacacagttaatcattagctttggaaagtctgttgagcagaaagcggtgcacaaaggaagtagggctgcttcccacaatagcttaatatgttttcagtgatgaacgtttttggaatgctgggcacacccgacttccaaatacgcaagcacattccaaatggaaatttcaattactgtttttctttttttctgccgtaacagttatcacagcattttaatgaaggtcagacttaaatactgacaagcagggaaaccaataattaccagattgcttcattcattttgtggacagcattataaacttttcaggcattctaagattgcctgacaaaattagaaaaaattgttaagtccccacaacctgcttgagatgctcacaagtgttccatcccaaagtacacgtttgcctcttcttattggtatttaggttctggcatctgattcccctttcttcttctatttatattagccttcaggtgggaactatggaaaacccacctggtgggggtgtatttttcttaagagattgtgttatatggtatcatatttagaaaataaagaaattattttcataatagcaacgctaatcacaggaaaaacttgatacattcttgactagactttaggggaaagtacaagttcttagtgggcggaggggggcaaagacgaagcaatttggctccaaaaattctagaatctcgtggcatatttttatcaaattcaagcttatctttaaaaaaatccgagaatttttctaatttctaagaattgattctaacccgcgatactccctagatgggagcgcagtgctttaaataatagcatttaaataagcggctgctgatttgaagtccacctggggagtccgagttctaggaccggtccttggccctgccacacgccaatacaaccatcaaagtcaaaatcccttaactcaaatttaaatacattcctaaagcagaaagcatcccgataggaaaatcctacagctcacagcaagcagcagggaaacatttatctctggcggcactgatttaagcttaaaagatttggtatcgtttaaaaaaaaaaaaaagctgggtggggccgaggagaatccacccaaactttcctcaggaagtaggatgtttactgagtaaatatgcggtagtcacagaaacacctgctactcctttaagacctcaggagccaccaccgccacctcctggccacatccgggcacttctctgcaaactcctggcgtcccgacgcccgagtcgttgggcttatttgaaacacacgcacaaccaatcaagcggcgcctgccgggacttggagagcgtcgaccaatcaccgcccctctggagactcctgcctatgggaaagaggttgacatcacgcgccaatcggcatggctcttagagagagcagcttagtttttgaatcggttgtggcggccgccggcgaggaatggcggtatttgtgagaggagtcggcgtttgaagaggtggaactcctagggcttttttgagagtggtaaggactctgtgtgagtgagagaggtgcaagtgggcgagcggctccagagccaagggctcttt

SEQ ID NO: 31010 - DNA, 2300 bp, Homo sapien
gtgagccaccgcgtccggcctttcaaatggtatttttgattttcctcttccagtccttaaagcaggttagctcatctcctgacttttttttttttttaaacattcttttaaggggactttgaatgaaagccactttaatgccttttcattggaaatggttgagtgtagaagacttaaaataatagggctggatagaatttatcattgattctaaattaaggctgttacaactattggaccgctcctttggagagccttagaataatgattgacatggatgtatggtaaagccataagaaatatccatattgtgaatattacatgagaatagttgtttgttgttcactttaagacatctattcagttttcatcttaactagatttgagttgtagtactatgtgtgttccaccaatgtggaaactgaggtttaactgactatgtgcagggctgagacaggaagctgagttgcctgattttgaagtgtcacataacagcatacagtttaaactgttactttgctaagactctggaggaaggtatttgtatattttattaatctgaagaagtaggaaaggggaaagtctgacatgtagctctcgttaaaggtgggtcctctgtatatttgcctaatatttagaaatttactctcagtaaagttgacttattgaaaattgataaaaaaatctctaaaaaaatttttttagagagacagggtcttgctctgtcacctagactgactggagtgcagtggtgggatcacagctcactacaacctcaaactcctggattcaagtgattcgcccacctcagcctcttgagtagctactataggcacctgccacccacacctggctaatttttaaattttttgtagagatggggtcttgctatgttgcccagtctggtgttgaagtcctgccctcaagtgatcctcctgccttggcctcccaaagtgctgggatttcagatgtgagcccccaacccaccctgatgaaaacttgttaaaccttttattccctgtctagcttttaaactcttcttaagtcctggaaaacttaaaaaaggattttctttcatagtccagagttatattggcactcacccatgcataattgttttgtcaaaccttttaggggagaggtgtttttaaagaattatgaaaatactgacaagggaccagcccaattataccggagaggtttagagacatccacagaggatgagtcaagagtgttggattgggggttggaagacaagataggtggagagtcgagcactaaatgcaaatagatgtgatgtaaattatgatttgtgcctgaaaaatagctgagaaattcattgttgctgttgcatagattgtatagggactggggtagttacagatggtgagggtgaatagttaggcggggaccaaattgtgaacttggtggtgaatttggacttggacatataaggagtactcatggaagttgttaagcagggaagtgatatggtcacatttgtatttaggtgcatattcctgaaaaccatgtggagagtgatttctaaggaaactgatggtaaagttgtgtggagctggtttattagaccaagtgaccattgtgtcattgaacgtatagagaaggggggccagattccagagatacttgaggtgggattgataggaattttggggagggaaatgtgggagaggaaaaaattaggatagatctcagatttttggctaggatttttgtgggaggtgtgttatggtggtgttataattgaatataggaagagaaattggttgagggcaaaggtgtggagaagggaggtagaataatatttatgactacagttgagtgtttgttgtatgtctagtaatgttctatgtgcttttgatacattgttatttttattatattcctgtgagtcaggtattagtatgtttattttacagaaaaagaaactgaggctcagagaaggtcagtgactttctttggttcattaaaaaaatgggtaataatactttttataaattctaggtaaaaagagcctctaatacttacttttgcccaatgaccatgtttatgtatttttattcaaattttattttttcagctgatttagaagaatacaaatcatggctgaaaatagtgtattaacatccactactgggaggactagcttggcagactcttccatttttgattctaaagttactgagatttccaaggaaaacttacttattggatctacttcatatgtagaaggtaaacctgttacctgctttaaaacaatcaatttctattttaattct

SEQ ID NO: 31011 - DNA, 2300 bp, Homo sapien
ttttttaaactgaagtttttgtgagcatttcaggaccaaatattaaatagtttcaatagatagattatgccaagaccttgaaaattactgtaggtttgtaaattgatatacctaacacttgaatttaagttaaactggttttggaagagtgtattttgtttttagggatttctatgcagcagttgatgactttagaaatgaatttaaagttcctccatttcaagattgtattttaagtttcctgggattttcagatgaagagaaaaccaatatggaagaaatgactgaaatgcaaggtaaaatttagcataatgtaaaagttatatctattttagtccctaggcctgcttaatcacttcctggtcaatatacctcttaaaaaatttgagtttggaaataagtagcttggcttatttatgcttatgtgcattcctttttaggaggtaaatatttaccgcttggagatgaaagatgcactcaccttgtagttgaagagaatatagtaaaagatcttccctttgaaccttcaaagaaactttatgttgtcaagcaagaggcaagtaattctagaatgaggttggtttttaaaaacactattaatagcttctctgataaaataaatgtaaactgtttattaaaatgttttttctctcacctagtggttctggggaagcattcaaatggatgcccgagctggagaaactatgtatttatatgaaaaggtatgcttttaaccccttacttatttgttctgtgagcttgattgtttgaaaataacacttttctgtccagaaggtttagaagcatgtttaggaatttcagaatgattaaaacaattgggatatcaagttatcttagtctatgtagatttaagtggaactattcaatgtaatgtgtattattttaacctaatatatgttgttctgtgcgaattcttggtgataacattacgaacaagaacatctctatcttcagaaacttagacttttaatggaaagatagatttgtacgtagttaacgatggggaatgatgtgtgccacaactgagtaatgtattttaggtagcctcgctctgagagactcaggagggaataaaaaggtgaaataaatgttgacccaacttactaggccaactaggtaaggacattcgttagaaccccaattgggagagggtatgaaagctttgagagtacattaaaataacaagtagtttagtatggctttacagtgtgggaaggaaggccaacagataaaacttaatggatagatagaatcaagaagtttttaatacattaatgagcttggatattatcctataactattgggagccattgaagaagagtaaggggagagacgtcattaaaaagatgagtttgatagtagaatatcgttaaggaaaatctagtgtttatggtgaatcttggtgaagagtagtatcactcaccaaaatgacaaagttatggaagtagtctttaagggaagatttacttcagtttaggatttaataactttgtgtggaatattgaagatgagttgtttctgtaaaatctatatagtaccatattgtgttctcttcagagtctttgaaatgtgaagttcttaaagtttaaaaagtgtgctttagatttagggagagaactcttaaaaatcaagtgttactcagcacatattggaaagcattgtgtccaggcactgtgctagggatacagcgaacagactgtgaatggcccctgccttcttggagttgatgagctaatgaaggagcaggtagtaaacaagtttacagatgaaaatataatagtgatagtggctatgaagaaaaatgaggtgcttgaggttagacaattacagtcgtctcttgactattatgttttatgaaacttttgaattgcctggtagagtgtagggttataaaattattgtgcaaaatccagattctgtcagacttgtaaatatatttttctcttgttcctgtctcagtaaagaaccatggaagtaaattgagcttgtgtgcttttgattacaggcaaatactcctgagctcaagaaatcagtgtcaatgctttctctaaatacccctaacagcaatcgcaaacgacgtcgtttaaaagaaacacttgctcagctttcaagagagacagacgtgtcaccatttccaccccgtaagcgcccatcagctgagcattccctttccatagggtcactcctagatatctccaacacaccagagtctagcattaactatggaggtaattcacattcttaaaaacttgtctttaaagtttagtggaatggaata

SEQ ID NO: 31012 - DNA, 2300 bp, Homo sapien
gagattacagtttttaatgactgatgttaaataaattaaaaaaacctcatttttagagtttcttagatttcagcagcaggattgaaagtagttttctataattaataacaccaatcagctttatagttaataaaaaatattgagttatcacatcatattggaaagttaggcttatcgactttacattttatattttaaaaatgtttttcaaaggatgttttctttgtagtaaaagttaattccttgttgaagagaaagaatgggatgttcattattttacacatcaaattaagacactttgtaaagtgcttctttccaatgagtatctcagaaataataaaagttgtataaggagctgtcaggtttaattttaaatatttcaattcgtgctatttcaggatgatcttgaagaccttatagttaattgggatgagagcaaaagcattggtgacatttttctgaaatatgtaagtattgtatttcttttttaagttttcagattaaaatatgatctcatcaaggactggcaaggagtgtaatttgcctatttaaatgtgagaggttttaaaactttgatatgattgtgtttataaaatacattggaaatgttctttgtcttctgaaacatgccttctgtatgcaatttaacactttagtagcccaagattattggaagaatgccaattatcatgctgtggtataattgttttagtatgtatcaagttatttgcctttcataaatggccacagattgtatttttattttatatattatttaattttcattttaagttcaggagtacatgtacgggtttattatataggtaaaattgtgtcataggggttaattgtacagattgtttcgtcacccaggcgttaagcctggtacctattagttatttttcctgttcctctccttcctcctaccctccaccttccagtaggccccaggtatgtgttgttcccctctatgtgtctatgtcttcttatcattttgctcccacttataagtgagaacatgtgatgtttggttttctgttcctgtgttagtttgttaaggatgatgccctccagttccatctatgttcctgcaaagggcatgatctcgcattttttttttaatggctgcatagcattccatagtgtatatgtaccacattttctttatcaagtctatcattgatgggcgcttaggttgactccatgtcttgctattgtgaatattgctgaattctaccagatgtacaaagtttttatttttctcccttcttagttgataacactttttgctgtcatgtctgtttctatttaaaggcttctaatgaactgcctcttactaggataagaaccacacaacttaagttttataaattcattttggcaaggttctgtgaatagaatttagaagtttctttgaatctctttaaataggatttgtaagtttcagtgccttgagtactggcatttatacttttattttttgaggtttctaacttctttccttacaaaataatctcttaggtgttttttcagtttggttgagaattaaaaatttacaaattattttctcatttttttgataaccttttaattttctcagtcagccaacattgttttccttttcttgtttgcatttttgggtaatttaactgatcttttaatggcggtttggatttttgaataaataccatgcttttggaatctacatagatcagctgtaattgatattttttaaagtcatagacattttctttgtcatgtttgtatcaatacaatcagctttaacatatcttttgttttttttctgagtcttcctgttttagactatgtataccaattgatgtattttgtttagcaattaactctttactgagaaatttataaaataagtttgttctcaaacatagaaatttactttaaacttttgcatccactatgtcagattgtgactactaattatttgactttaagttacattgtctctaagggtgacaaatgcataataaataatgtttttttcccttttcttcctagtcaaaagatttggtaaaaacctaccctccctttgtaaacttctttgaaatgagcaaggaaacaattattaaatgtgaaaaacagaaaccaagatttcatgcttttctcaaggtaatgtgtgtttctttcaaataaaaatttgagaattatttctgaagtaattcaccacaattatgacaaaaatgaagtaaattttaactttagtaaaatgtatccattaatatctgttaattttagttgtacttatgggtgaccatgatatttag

SEQ ID NO: 31013 - DNA, 2300 bp, Homo sapien
tttccttttgtactttcctacttctgccaaagtgttgccgccttatatatcacatacattattatttatggtatgattacaagaaaatcttgaagaacagttcatgtgcagaacagttacagatacaatcaaatctcaccaaaaattcacttgtgttaaatgcagaattttgttgttatgaggctaacaaaaaatgataacttttatttggtcagtaaataagatctttcaaaaatatctttcatgtttttgcttaaaatgttcaatctttcttgcagtttttagaatttatgacgtgaatataataactttaaattgtttactaattcacttatctctgtttcaattttttttttctcattagtcttattttcctgtcattgcatgcctggtattattttattgaattctagacattgtcagttttacttttttgagagctagatatttttgtattcttaaaaatgtttttgagtttttcctggcatgcagttaagtagcttgcaaacagtttgatattttcatgtcttactcttaaactttgttaggcagaatcagaacagtatttagtctaaggttaattttccccactgttgaggaaagatcttagtactctaccctgatgtcacattaatcttgaagttttccactctgattgatatcactgttccatgccatatgagcactgagcactgttaactctgattttttaacgtgtcttccctaacctcggatagttttcttacacgcatacagtgatcaggttgagaactgtgtacataaggaagccttctgaaaacaggagttctctctgtacagctgttttccagtaatttgccctgcggactaggcatctgatcacactggactcccacatttgcttcttctcttagggatatagctaggcactatctgtgctttctttgcagggaagaaactttctttaggctataagccaggacagttgtagggcttagcttgtttctgtttcacagaaatggatgttaagtgtcttgagaacccttgtttctttgtattttgaccaatttttttagttgtttcagtcagaaaagtaaattcattccctgttattcagtcttgtctgaagcagtagccttagtttttgtttcagtgaaatgattagcctatgacttggtaagacttacataaaaccttatttgaacttatattgagaacttcaaaattttattagtcttaattttgtacaggtttagtgtattttagaaagtgcatagggagtatagtaaagaatatagaaaggaataatagtaaaacatacttttctgaaggagtctatggatgttttgtttttgtttttgtttttgtttttgttttttttgagatggagtttcactcttgttgcctagactggagtggaatggtgtgatcttgactcactgcaacctcctcctcctgggttcaagtgattctcctgcctcagccgccgagtagctgggattacaggtgcctgccaccatacccagctaatttttgtatttttagtagaaacagagtttcaccatgttggtcaggctggtctcgaactcctgacttcagtgatccacccaccttggcctcccaaagtgctgggattacaggcgcaagtcaccgcacctggccggaagttgcttgtttgttttcctcatcctgggctccataggcatggaaacctttttaatgtaatgggatacttttaaggaatattttaactgattcacttatcaaaataagacattcacatcaaacacaacttgtgacatgagttgtgtttgttgtagttttcatgttctattttaaaagttttaaaaataactatttttcaggcatattaatgaggataagagaaaaacagaagctcaaaagcaaatttttgatgttgtttatgaagtagatggatgcccagtaagtattcttctttaacaattattaatttattttcttcttgttaatgaggtttctgtggttttaatataaataatatcttggcactactttcttttaaattacaacttcttaaaaattacttgataccaagtgatctcttttgttatattttcaacctatacaggctaatcttttatcttctcaccgaagcttagtacagcgggttgaaacaatttctctaggtgagcacccctgtgacagaggagaacaagtaactctcttcctcttcaatgattgcctagaggtaaagatgtacttcacatagtataataacactactgatttttgtaagttccctgaatatttaaaaccaagctttaattgaagagtaatgt

SEQ ID NO: 31014 - DNA, 2300 bp, Homo sapien
tgtcactggaaactttctgttaccttcatcaaaatgattaaggagtttccttttcttttcttttctttttcttttctttctctttctctgtttctgtttctgtttcttttcgtttttcttttttttttcgacagggtcttactctcattgcccagcttggagtgcagtggcaagatcacagctcactgcagccttgacttcctgggctctggtgattttcttatcccaacatcgcaagtagctgagactatagacactcgccaccacaccagtctaattatttttagtagagactggttttgcatgttgcgcaggctggtctcaaactcctggactcaaacaatttacccacctcagcctcccaaagtgttgagattaccattgggattacaggcgtgagccactgcacctgcctcctttttctttaaagtcttatatgctttccttttgtcctttcctacttctatcaaagtattgccttcttatatatcatatacattattatttatagtatagaatacaagggaatcttaaagagcggttcatgtgcagaacagttacaggtataataaaatctcaccagaaattcacttgtgttaaatgcagagttttgttgttatgaggctaaatgaaaaatacttttttttggtcaatcatgttgcaaaaagcacaaaagtaaagacagtcaaactactgtacacaattgactgtctcctgaagtgagaaagtcaaaaaatcatgagacagataattctcaactacctgtttccctcataaaaaggactttagcctgccctgattgagaacagatgctaggcagagtcaattttcaattatattttatctggattcgcatcatcatggggttttactgtatatagtttctctgtactttatttgtttgtttccattaaagcttttataggtttttcctgttggagtccctaggtcagcttgctccattcatctaataggttagattatctttatttctttgctaatccattctggtttttatcccttattcctgagagctatggcttactttaaatttttgatcttatatcccctccagattcctcgcagtcttctgtaattggttcattgacttgccattcactttaatttctggtattggtctcctgtagctcccaagtccctggcttctcattttccctaccttcttgaatctattgattttttttttgttctatcccttttagcctccctgtcttagaatcacttcaacaaaaactgctttatttataacattaaatttggacttcagaattcataataaatataaaataaaaacttataatcttaaataaacttattctttagcttgtttgtttaggaaaaataaacaaaactcttagtaaattggcaatggaaattatggtacattcttaacctgataaaaacctatagccatcatcctatttaataataaatggtagaaacattcaaaatgggtaaaatctatgttttcttaatgacagattatgttatactgaaactaatttgggatttaaggatatatttaacttttaaatgttttatctgtattttaagggttttttttaaactctgtactagcatttgtcatcaaattaacacttgttattgtttttcctttctaaaaattaagcttaaaatcatttaattgttttgcttagccaactgttcctcttctcctgaattctaggagtttcatttaagattctgtcattccttgatcctgtcgcttctcatcatgcttctagttctttcatacctctgggaccttttgcaaaatatcccttggccttttttcctgacttttgaactcttcttatataaacatgaacatttctgctatacaattacatgtttgacttttgttacatagtaactctgcttataacaactttgtaacgaataataactaaataagttatatatagatttatgtgattagtgctattttattttttaagtatttggtcctttttcttcattttattgactgatacttttttattttctataatcagatagcaagaaaacggcacaaggttattggcacttttaggagtcctcatggccaaacccgacccccagcttctcttaagcatattcacctaatgcctctttctcagattaagaaggtattggacataagagagacagaaggtatgccggtcggatacattcttggttatataaaaatagtttatattcattgtaggtttaatttactccattttggcttttttaaattggtaaattatctttaaatatagttggtcagactgcta

SEQ ID NO: 31015 - DNA, 2300 bp, Homo sapien
tgagcaaaagattgggccaggcacttcaacaaagaagatataaatggcaaataagcacatgaaaatatactcaatgtcatttgctattagggaatgaaaattaaaaccacaaggagacacccaaaggaaatattatttttaaaatgaaaagaaaatctgacaaaaccaagtgctggtgaggatgtgagagtaactggaaatctcatgtattgctgatgggaaagcaaaatggtacagaaattttggaaaataatttggctgtttcttatgaagttaaaccccatatggcccagcaatctgatcagtaggtatttaagtaaagtaaaacttaaatttacacaaacatacgtatacaaatatttataggagctttattcatgaccacccccaaatattcctcaactagtgaatagataaactgtggtatatgcacacaaatagaacattactcagcaataaacaggactgaactcctgataaacaccacagcaatgtgaatctcatatgtaatatgctgaatgaaagaagtctgattcaaaagactacatgctatataattccatttatttgacctttggaaaagataacactaaagggacaaaaaacacatcagtagatgccagggtgtggaaatgatccgctgagttgactacagagacatagtgttatttttatgggtgaaagtaatgttttaaatcttgaattgtgtggcacttacaatcaaaacttgcagaactgtttactaggttaaaaaaattttttaaggaagcagagctttgaaggcaggatggagatacatcagtgagaggtagtagggagattatgactactgcagagggattgaaaagcctgttatcacacagcagaggcttcatgcacctcatctcaatcaatccttacaccttaccttgaagcgtagtttccccgttttttgcagagaggtaggagagagtgggggtgggaaagtgtgaataagacaaactttttacccaagaagtgaaatttagtcatcatatttagtgtactttgtaaaagatagattatactactgtaatcaatggcagcatagagtagtaaaaccataactggactatttttattatgttcaaaaacagacaaaactaaactgtggtgttagaaaccacaacagtcactacctacggtgaatgaaaaggaatggaaattagaaggggtttctggggtgctaagaatttaattttttattgaggtggtggttattctgatgggttcacgttgtgataatttattcaacacactgcagttcattcatttttctggatatatgtcatatttcaataaaaagtgatgcatgtatgatttgttaagctataaaggaaagcaagggatgtttgtcatacaagtcacaacagtggctaggaggaagacgcagtccttaggggtacatagatttcttcaaatgtatcagtaatgtgctgcctaaaatgcatagaaggtaaagtgcgtttatgtttaaatatacataattacatatataacataacatgttatataatattatcatataacatgttagtataatacatgatacatttgatatataatatacatttatatattctatataatatacatattttactctaaaacatacataggtaggagcttatgagatctcataaatggttttagagtaaaatgtttaaaataattttctttaaaagagaacaaatacaaaactttataaaatgtatgtataaagtctatattgtatctgtgtagttttgtgtgaaagagacagaatggtatgatttttttttaatctattcatagtaaagagactgcaaagatatacatgaaaatgttttcagtgcttctctttagaatacagataatttttattttatgtacatctttctgtatcttccagattattttattgatcatattgcttttagaatctgaacggaaaaatataaataaccttgtttttattattggaaacatcaagtgcaactcaagaggaaagactagggaggtgccagtgacccgcgccacttgtgggcgcgatgggcctcgtggcacgggacgtttcaagtcctggcgtccccgcgagcaagcagcctgatcaggcctcgcagtgggacgttgggaagccggtgttggcagatgctgtggctgggaggagtccagagcttcgccctgtccccgcggggctgagccacaactgcttaggtaggaggagaatcattcaggtctgcccagttaaagcttttctcgttcagtggctgggtgggaaggaagggagatgaccctcaggt

SEQ ID NO: 31016 - DNA, 2300 bp, Homo sapien
ttgctcttcgctgtcccctcccgtttacagaagcatctgtggtgcttttcattttggatttacatgcaggaaacgtatatatgtttatataccgaccgcataatatataaatacatatacgcgtgcccaagggcctggttttcgtctctcctccccacgaaacggaatgttttggagccgatggataacaagaacactattaacattcttttgagcctgttttttaaaagggggagggagcgtgaagaattgtttaacatttggccatcgtttggctgcacactaagcaccacgaagtatttatggttgcagatcaggtgcaaacggggcttagagagaaaggtaagggagcttcctgcgtccgccgagctccggcgtttaccttaatcccggggattgccgagaacttcctattccctgcctctccttcgccttccccaccttccacccacccttctctgctctctctcttctgtaaactcaacccttttccaatcccattggggtgggggtggggggtgctggaggtataatcgtctatttgagtttaaatgcgtctctctttcccaggctagtagctgagttttccaatagcctttctggcggttttaggaaatcgtgtcctttataaaaaataatgctacctaaataagtgttttaaacatctgaagatgccagtccctcaccctatcctctgatgaaaataaaagcaataaaaaataatgaactttaataaactgggtggttttttttaagcgttggggttcatggaagctcccaaacgctttttttcatttaaaaagaaagataaccagcaaacaaaccaatctcaggaggagtccacagtggaggagattcgccttccgtttctgcataaaaccaatacattttacttggagggtaatttgccagagttgagcgagacgaagccgtgtctaaataagtacatgacactaaatttccttttaaatccaccttttacaccatggccagtcgcttgtttaactcccgttcaagggacacggttttcaaacgtgaccttttggggagatgtgggaacttcccctcatttcttcttctgtgccgctaacctctttcctcctccgcgcggcatctccagccccggcagtttgtaaattgcccgttttgcccaccctcctggtgggcgttctctcccccactccactcctgccccctctgtcctttcttcattggcgtcttcggagcagatgcatcttctttcttcttggcctcactctcccgttcccccgtcagtccccccacccgcggctccccacttgccccagctctcctcgccgctcctccccgcctccccgcggagggttgacccttcaattcggagtcccggcctgtgggcgggcgggggagcgccgcggctgtaagccgaggatcaggcggcggcgcggagagcgcgcccgggcggccagcgccgagcgcgcggagctggcgtggggagacacggcaggaaaggcgagtcggagtgggtgatgagaggccgggagagcccgtccgagccggagagaccggagagaagggagcgagcgactgtgcggcgctcacgctgccagagcccgggcggagtgcagtcgcctccaaagccttagagcggcgccccagtcactgcagctcttcaccctagagctgtgccctgggaccacagagaccaagagcatggaaatcggctgagaggtacaaaagaaataaggaacagattacgagaaagcggggagggtttcctggcgaaatacggaggctgagcagatggaggaacaatgccgcctccagaagaaaacccttgcctgaaccctcggcggagcgcagaggagctgctttcagccttctgctctccccaggccctccggctagttctggggttggttccgccggttagtttgacagggataagaaagttgctcttcttccccacaacgtttcctgagaggtggttttcagatctgtgtgtttccagtcaagatgtcactccctagatcccccgcgttgagcaactaatatattatgcattattgggcaataaactctcctgggaagagaaggtattccaaacatttaaaccgttctccaccgactcctgcccgcctcaacacaatgccttgtgagtagaaatgaaaaaccacctgaatttaaaattatttaggttgagattttgcattgggaataatttcttccagaggaggttgttagtgtgttatagagatgagggatattacatgtccaatatttgattcatttgtgataattctaaatcatgaacagttggc

SEQ ID NO: 31017 - DNA, 2300 bp, Homo sapien
gagaatctttttctgtcaatcaactattcatttccttaacccattctttcctattatattttttatcttttataagcccctttatgtactttggatagtaatccttctttgattatatgcattgcaaatatcttttatgagtgtacattttgatttatataattgctttattttaatatatcaaatttaatattatttctttatggactttggcttttttatgttgtttagtaaacctttctgttctcatctacccaaaatcataaagctatttccctctaaatgttgtaaaattttgctcagcatctttaggtctttaacccaccttaacatacatacatgtgaagttgcaatcttgtattatcattatttcatatggctaattcagtgtctgaatatgtcatcttccctcagtgctttctgatgtcaccagttatttatcaggtttccacaaatccatgaatatttttctggactttctattctgttccattggactagtttctagccctgaaccacatctgcattgcctcagttactgttattttatgttaagccttaatagttcatattggaacttcctgaacctttttcttcagattattcagattatattgataatttcttaccctttgcccttgcaaacacattttagaattaacttttaggcttccacaaaaaaattgtagtagattttattaataattacattacttctatagattaatttaccatattgattctcccatccaggaacatgtatatttattgatttatatgggtttaccccttagtgttaatagataaattagccgtgggccaaaaagtgatggcccaaagtcacatagccaattaatagcaacaccagtggtagaagaaaggtcttttgactccttaacaccttgtacactaaaaaggcttaattatttagtcagttaaaaaagagtgtcttggactgcttgcagctacagaacccctcacaatgaaagagaattcaacttctctagtttactaggcccaatttgtgtttcaagccctcaaagtgtgattagagcgcttgggaaaacaaagtcctgaaattccttgcattgactctttctctggagcctgtcggaaatgctaggggtaatcttgaggtcattgaatttaaaagcattcaggtaagcaacattgaggcctatgtaatgactcttaggtcttgttctgtgaccacaggcttacaggagctatcacttgctttgctgaatgaacactaaaagtcccaaatgagtaagagattatctaagaatacacacacacacaatcatattcctttaaaggaaataaaattttaaatgtttttctaaaagcagcatatctcaggaagagtgaggcttcttttaggtcgatagttattaaagaaacaaatacaattgctttgaaatcaccgaattgcctcaaattggcattttagctactaactgccattggggaaatttttgtagacaaaaaaaaaaaaatagaatccagaggagacagaaacacagaagattcagtctttaaacgtaaaacaaagaaacatcagatgctgtattcaagtagtcatatactattcatgttaattgcagttcagccttctttaactactgcagtagccagttatctaaaggggcagaaagaaaaaaaaaaaaaaaggtgaggagaggggatgggaaaaaaaagtgagatccctgcaatatcgcctggagccactaggggtatctttgtaccatttttcatcctgcaccgatttggagtagaaacctatattagggtaaaaccagggtcctcggcatttttttttttttttttttttttttttttttttgcgaggagtgcacccagaatccaaaaaagattttttaaaaaagaaagaaagaaagaaaccagagttttttttcagtcacccgaacagggttatgaaattgttcttctggacatcagcaccgggaattcatttttgaggtcaatttccaatcgagataaatctattggattagtaggattatctgattgcagccgaaagaagtaacgttgtttgatcatttgtatttcttgcctgatggtcggatttacatggaggtggctttgggtccccaggattctggatcgtggttgcatctggagagaaaaaaggatcaatcgacacgttttagaagtgtccgtgggtgaataaaaaaggaggggggggtgcaaaactggggttgcggatgcttaaagcaaaaaaagagaaaaggaagcgtcttgaatcctggaacaagaattaccgggtgctcgagatt

SEQ ID NO: 31018 - DNA, 2300 bp, Homo sapien
aattaaacagattagattgttctaatctcagtatttttactaatgccactatgtagctaaagcaacactaagccacctctataggtttctcagggtcgcttgctcaaaaattgacgtgaaagccacctttagctagtatcaaacgggcattggtttaagagatgagtcagttagttcatcagctaacactgccagtcatcaactgatggcatggtaaacagtaggaaatggttatgcaaacagttgaaaatacaacattttattatacacttcagggaaatctgtctatccctggaaaaagacatcaacttaggtttggcctaaacctgtctccaaactaagctgcctgattttaccaggagatgctgaaaaaaatctcttgaaatcatcaagctgattctgcctccaatggagctataaactttaaaggcaataaatcccacaatgctcaggcctggatataccatgagtcaaccccatcttgcatccacataagaggcaatttcactaatatgataaaacaaacatacatttttcccatattttaggaatctaggtggcatattttaggacatattggacatgatgtgcctttccttctcaatctttttcggtatatttagttaatgttgagtccctgagatgggaaataatattatagaaatcaccaggtgcattttagttacacaatttttatttattaaaatattttcctgagcaaatgttgataaacagctacataattttaaaaattatctgtatttgtatcatttgctctagcatactttgttctagtaaactaaaaaatacttataaagatgtcagaaaaccaaaacaaatgtatattaatactgttagatttttttaatatcttcagaattatataggaacatgttacagacatgttgaatatataggcatattaggttaagaaaaatctaaaactttccttctaattcagacagtgcttcaacacctttgtgaaaagagtttttatctcattaatacatatgaataattaagcatgtttttaaataactgaagcacaaagctgtatttggaaattgataaaattgataataaatttaaatatgtaaaagaaaataaactatatttttaaaacaggaattttatccgaaaaataccttaatgagaagataaagtgtgtttgtaaatttgaatgacatgcagcacttaactgcatatggaaccatcatttacaattcttaaatgcaattaaaaagcagtggaccatgtgcttttcatcttttatgataaaaacagtagtgtacattcaacagcggcaaaagttaaatcaccccacactaaatctttctgctgatggttttttctttaacctagtgaaaacacttcaaaggttatgtcttcttctgaaagatgaatattcagaatactatgtctgacatgaagatctggaaagagtatgtctaaagtgatattctgttttgtgtgaattcagggccaaccccagggtataaacaaacagccagccccagtcattgtatgagccttcaagaattctttttcaaataacatctgtttaaaacaaatatagagaaccattttgaaggaagatggacacagccaaactggaggaaatattccaaacagacaatgtagagtctgttggagagttaaataggagaagattggccccatctggttaatgttgatgataatatacgtatttacacactcattgaagaacatatttgggactttttaccactacatcgtctccttttcttcttgcctactacctctttgaggcttcttgatccctaaagcaggtgccactcaaagcacaagacttagatccacctctctaatccattataccctgcggttggctttgtgtacttcccttaagaaaaatatctctaactccctgtttcttgagctgtatctgggtttttatatacatgtctaaaatatcagatgttattgttttaccacaacattacccaaagatcatctaaaattctttgttgattttcccataggactttttcaacgagcaatagctcaaagtggaacagccctttccagctgggctgttagttttcaacctgcaaaatatgctagaatgttggccacaaaagttggttgcaatgtttcagatacagtagagttagtggaatgcctacagaagaagccttacaaagaacttgttgaccaagatattcaaccagctcgataccacatagcctttggacctgtgattgatggtgatgtaataccagacgacccccagatattgatggagcaaggagagtttc

SEQ ID NO: 31019 - DNA, 2300 bp, Homo sapien
caattcattataaagttatatccctctttacatcacttatctttctcactgaggttcattcactggaatttactcacgcaatctcagtagagtacaacgtagatacagaacctaggagagtcaacatctggaggattttagtctttcttacacatatgtgtgattttaaacgaatattctcagaccacaggaaactcttcatccccctgttgtttaccagtaacagtatatcacagacctttccaaatgtttgtatatgtaatcagatgtacatttatattgaaaaacaaatgagatggacttaaagagcacatcctgataaatactttctctctcacctgtactatatttctattagactaaagttatgtgattttttttttacattttttcagatgactagcaattttgatagtttataagataatgcaaagaactttctctgacaaactaactgcagtaacagaaacctttcttttcagttactctttttcaagaatgaaagattattatacaaaaaattgtatactacttgatggaaccaactttgtacatcttggccatgtcactggtcattgtgtgaaataaagataatctggataatgactattagtccaatgctaagaaacatgatctttgctcattaaagagctaaaatgtttattgctgttttgtctttcttttttctaaaaaaagaaaaaaaagaaaaaaaggaaaagaagaacaaagaaacatgactgtctcaaagagtaatttttctagattagaccagtcaggtttttgaagacatataggtaacttccacagaaaacacaaacatgtatttaaaggcaagtctcatctaagatgaaactcataaaaattatttaatgtttgttatgaatttaaaagctccagaaatccatgaaaaaaagaaagattagctttgtgttgttaaatatctcttaggtacagatgttgtagaaataaagtgccaattgttttcagttagttagaaaaacaagttccaattctagtcatcaaggaaaaggtctattgaaaagaaatttgcaatatttcatggaatacaaataactaggttcataaaatgggggtgattaaactaccataaagtaatgaatagaaagttgccatgctaagagaatgtaaaagtgctgagcaagatattaaactgacactaaaagataaaaatctatttcaaggaatttatgtgattataatcccccctcccaattattatctatcaaagaaatgtaggtattcctccataattaaaaaaaagtctctgttagaagcaaaagtcttcaaaatccagagtgatctacatacagcttttgactgaggtggttatgcttttcaactgtgaactgccagtgtacacaaatacaaataattgtttagcatctgaagtattgttcaattggaacactgtattttactgtattaattaaacaaaacacaagaacagaatagaaatgacaacaaaataagatatgaatgaatactttcatatgcattgcttcatttggcaaaaccaaacattctattaaatagtatgttttaacgatggccatatttatatcatctacctaccaatctattgctctgcatttatcaatctgcctatatatagcataactgtcaccctctttatattaatttaggaaaatgattgaggaaaacaaagcatagccctattaattattttctctaaattagggtagaataactttatggaagataaagcagcctaggtttaattgttgttcaccagtcacgtgataaagtcattgtgaatgagtgttagttgctagttttataattgcagtctctagtttctgaatgaaaaaggatgccccacattatacagaacattaagaactgtttttaaagctgaaacataatctttatatgcaagaaaaataaatactgttactcaattttagcaaatatgtttaaaatgtatttatttagataattttctttgaaaaacaatgtaagtaacaaaattaaaataatatttttggcattatttgttaattcagattttcctgcctccgattaaaaattaggcaaagctgcttataatttatacaaagattacactaaaatgaactttatttcattgttttgctgttatataaaatttttaccaaatgtttaccaagagattaatgttttagagtatgaggatagaaaaataaaagtgacagatttcatagttttaaatctctactgaacatgttgactatgaacaaaatctaattggctaccacagatatataacaaagtttattact

SEQ ID NO: 31020 - DNA, 2300 bp, Homo sapien
tagagcaaggtgaccatagctgggtgaaggaatagccatgtactctgtgttctcagaaagagactgtaaaaatgtcacagagcctttctttttgcagtcaagccaaactagttcctgttattggaaccgagatagactgcagctggaaattttcaaactgaccacaaacagatcacctgaggccagccaataaagagacacttgtgaggtcttgcttaaactttatccagtccaaaccccacaaccccacacctgatttccaccccaccctcatcctgcagtttttgcctttataatctcctactctctgacctctcctcgagggacactttcattctacaccagagactacatcttcccaatctacagattgcttttagaaaataaatttctccttttgcttccacagatctcattggtcttttgttaatagaaggatgaatggataatcaatatgggtggcacatggggagctaattgtttactgggtacagagtttcagttttatcagatgaaaagagttctaaagatagatgctggtgatgtatgcacaataattatgaatatttaataccactgaactatatacttaaaaattgttgatgataaattttgtcatattttaccaaaaaaaaaaatggaaaaaaggacttgcaaaaataatttttaactaagaatgtctagttgtttccaaaaactaaaaacatagggtgaccactcttaaacctacctcaaatatctaaaaagtttagagtgctatggatttgaatagtttcaagtagaccacttctaaaatatgtacatcagttttcataaacacatatatatggttgacaggaaaaaacaagaatctgcatcttttgtttgttttttgtttttggtgagtcctatcttccctattactatttttattttttagttttttaattttaaacattttaaaaatttcaatagttttatggatacaagtggtttttgattacatggatgaattgcatagtgctgaagtttaggattttagtgcacctgtcactcaaggagtgtacattgtacccaacagataatttttcatggctcaccctccttcttctctcccctctctgagtgtccaatatccattatatcactcggtatgcctttgcttatccatagcttaggtccaacttataagtgagaacataggatatctggttttcaattcccgagttacttcacttagaataatggcctccagttccattcaagttgctgcaaaagacaatgtttcactcttttttacagctgagtagtatcccatggagtgtgtgtgtgtctgtgtgtgtatacatacatatatacacacatgtatatgtatatatgtgtgtttgtgtatacatcatatatatatatatatatatatatatatatatatatatataacttatcacatttctctatccattcattggttggcagttaggttgaagagtctgcatcttttaagaccgtcccctcttaataagctgggttattaagtaatcttgcaacacactgttgtcagctaaagctcaaatttggcttggcaaccacacttcagttttgacacagtctttcgaggaattcctgaaattagtttccaaaactgtaaatttgctgaggctatttggctgtttaactattgcttctttttatgcagtgatttagcaacaggtaatgtaacaatgcggcaggaaatcctcactaccctgaggttttatattagagagaaaaatatcttttgaaatccaaacaatcttttccaatataatcgtctatgaaatgttaaatggaaatcaaattagcacactaaggctaaattcaattgtatatataaattcacttgtaatatcatcaaattcacatatttatagcttatattctatctataaaacacctggaaaagccaatcactatttaataaaatattaacttaaattattaacataatgagtgatggatttaagtgatttaaaagcaaacacttactactcacaatccacctctggataaattcacatgatcaaaacctgagtcaaggttcagtttaaagaatgccaagtccatcaaaaaattgcacccaagggattcaggtgatggaggtgttttatgagcacacacaaaacaagtgatacacgtttttgtctccacttaagatgaaaggaattttcttctttgaccacagtgtttcacacaaggtaagctttttatctgatctgaggagatcttcttagttcccagctttagtttatattgcctatttgtttaaggcaagtcacagacat

SEQ ID NO: 31021 - DNA, 2300 bp, Homo sapien
catttaagattttatctttttttggtttcacattaataaaggtttaatgataatctgtttgcctcagcctgaaggcttagcaaaattgaaacaaaggaaaagggattcttatcttactaatagttttttgcttgagcaaaaattatcccttcagaaattttgcttctacaaaagtatttcgtcagaagttgccgaaagaagcactttcacgtcttttaccctgaagaagttctcctaagaaaaagcaaatcattacaagaatctaatagaggtttttaatttttattttttccttttttgaaggtctggctggtggagggaggcccccatttttctttatagaataggaaaaactttcctccagtctttggttcttacggtaattaaggaatagaactgtttctgatttctagtccattccctttcactcgagtcgtattattttcttgtctgaaaaaacttctgatttcacatctgccaactactcttattctcattaaaacttcagctaaaaaacctttctttcacaaagctttaccctcttagagaggcctagctgaaattccttccattctttcgtattaattaaaagcacctttcccgtaggcggttccactgtaaaaaatcatattataaaaatggataaaaagcaatacggtgaaagtagaaacaaaggggagggaaaatgaaagtgggagaaacggttgcttgttttggaatctgtaactgtaagctcctggtgggtggatactcgtacattaagtaactagtttggcttttaagttcacttctcaaatctttattcacactcttttcttctaaaattgacagaagtacagaagggaacatcacacagtaaaactaaccagaatgcgtccatctggcatgcctttcaggaatccagcccactaatatttgctgtgggtttcatgactcaacccttcaagatgccgcacaaggaagaatttcctcattttgcagaactgccaaatctcattcactggagcaaaggctcctcatttggggctcatttttagacagttgtttctctgtttatacattgtaaaaatctccctcagcggatggagtttgtcatgcatttctaaatagtgagtaaacatattcctccactccctcccggcaggacacacttcagcattttggccactgagcctagttgaatttctctctccttccttcctcccctcttcccacgcagcctagctttattcttgcttccttggttttatttcttcctctcttcctccctttttcttccttccctaccttcagccacatctttcagcctcgtttgttccttggaggcttttattcacccctcttcctctcttctttcctccttcccccttcttccttccctcgcttcagctacttctcttagccccgtttgttccttccaggctccactttcttctcttccattggtaatttgtctaatttactccacttgaaaaaagaaaaatcttgatttatattcgtatcttcttccattcaaaactgttatctaagttcctctttattatctcctccctcctattttaaaataacaattaacatttagcgagtgctaagtgcaggcaggatgccaagctctctcgcagtctctcttgagggaggtacctttattatcctgtttcatggatgaaaaacaaaagcacagaattcaagtaacttgcgtaagtcacgaagctataaccaggaatttggctctgcaagcaatgggctttaaaaattcttttaaaagttttattagattcaaagactatgtataaaatatatgcaaattataaacgaaacatatcttttgatgggcaccatgggggcaagtttccagttttgcccattaaaaaaaaaatccttcccaatttttgaggcttgtgccattgaacactgctgcccgcggctcttcttcccacttggctcgacaaacgcgtcttttattatgactcagcccagcccgttccttgccaagcggctgacgctcgcggcggaggcgccggggccgccgctcgggggcgagggttcgcgccgcggctcgcgcccgcttctcccgctttacggctgctgaaaatccggcctggcccggcagccgtaccgcagacgagcccgcgcccgcgccgctcaggtaatcggagtccttttcttttcaaagttttgccaaaacaagctccgcgctctgaggcggcgcggcctcggccgagcggtccgtgtctccttgctcctccgtcctacccaagctggcgcgactgagctgtgggccgcacccctgcgcggggccc

SEQ ID NO: 31022 - DNA, 2300 bp, Homo sapien
taggcatgtgcaaaactcaccaggtatgttaaaaaacgtcctggaagaaattttccaggcatgcacaaagacccagaaggagaaagaaaatatgtgtgcacatggcactttattagtattgcaactgattcttttctactcaatcagtatttatgttactttctgtgaacttacgaacttaagacctttctggtgtttatatttgtatggattttttgttatcgtttaagaataggacttctctattccactttcatcgtaatttaccacatgctataattcagctcatagataatgggtgctttataactgttattgactaatttcagtgcctggggcaggtctgtaaatatatttccaagtttgtcataatgagtgaggattgatatgtgtgttggtccttttaaagtgaagtaagaatgtgatgattacagtgttttattggcaaacattcaatttcaagttactgttggtaaagtatgtagcatggtgtgtatatatatatattacagtatgcaattgctataggcaaagggttattctattctggagcaaaccacaacccagattttaaatcagaggctcctggcattataaagagagaatgggttttcaatggtccagctccctcatagaagaaactgagacctagagaggtaataaatgaaagagacaactcccaattgcaatcagaaatttttaatgtcatgtttgcctttatttctaatacttttgagaaaaactgttgtttgacatttctgtactttacacaacttatatagtcaatttttacattagtaagctagcacacataatatatagattttttcaaattaaaaagcaatggattataaagaaaggagcttgagcttcatatacatatatatgtgtgtaactacagcctatatatatatattagctgcagactaataaaaatgtttttatatattatatatttgaatataataatatgtaattattacaatattaaatatataatatataatttgtaaaatattaatatatatgaatatgaatatatatttatattcatttatttactagtctaactacagccaaagttaaggatttctagagggaagaaagtggagattgttttttattctaggtgccttatgggggacaaagcttaaataaattgccttaattctgtgatatctttgctttctcacatacaaatgaatatttaaagatacgtctccaatttgttgctcttgtttgctgggaattatttttgttgagtcacaacagttaatctaagttaatattcaccatgcttctattcaaaaggcaatgcaaatatcatgactctccttttacaaatgaggaccttgaggcaactcaggattaggttgaacagtttttttcaggtctctcagttaataagttgcataactgatgtcagtacatgatctgggacatcaatgctgcagttcagcattcattccactcatcagaagaacaagagggagagaaggaagaagaaggaaaaggaagaggaaaattagaaattgttttttgtttattgtccattattcacagtgtttagcacagccatacattagtgttttcaatcttcgtactaatcatacatacttcatacatactagatattattctattttatagtttaggaaactgagtctcaaagaagttatattctttgcttacagtcacacagcaagtattagagataatccaaaacttgtcttcacactgctgcacaaaactgactctgagctgttccttatttccctatggtttaaaaaataaatgtcgtgtaatacactttaaatttgatttctgtaggaaaagtagattagaaacactcaaaaacaaagaaaccaaactctgtgaagcttggtgtactggtaatatcaatgctcttttaggggaaaatataaatatgtttctggactaaagtgaaagtagagaattaaaagtttatatcaaaactgaaacaaagcaatgttttgtgaagtacactttaatagccatacagtggatcaaaagatatgatctcacttcatagtaaaacaggtcctgcaagcccaggtaactcaggaagcagaatggtaattattcacagaagaaagcaggtagtatactgttacaatactacagtagaaagtcagaaggtcacaaagcttgcagggtaagtgacacaacttgaaactgcttggccctctttaaaaagaaataataaaatgggagagaatgaagcaagtttacctaacacgtctttgcaaggtaagtaccaacagcctatgaacttttca

SEQ ID NO: 31023 - DNA, 2300 bp, Homo sapien
ctagttacaatttgaaaggctagccatagatattatcaatgattattcatcacagtgctttttctgtacatctctgacccaattatactctcagggggttagttgcatgtgccctggttagtggagcccatatgccattaacatttagtgtttctggtagtattgagaacccattttttttttttcctgaataaaagtgaagttattccaaggttatcttgagctgtgtgaacagattttaattagcttttcaaacataaaaaggaatctcctcttttagtcccaatgacaaggtaaccccagcggagaattgtgtaaagctatcatacatgaaggttcataatgtcctcaggattcataaaataaattatctaggtaaggagagaatgctagaatttttttctaaacgttgcaaatatgaataaaattgtacaaataatatggcataaggaataggggtaagtgctttctaagcattgttatttgtgaagggaaggatcatttttcttgcataatgcctgcaaactcacctgcaccactgagtggcactctatcactccatcagtctgtaacaggagtagagggagggacatggctgggagatgggagggtgacagctcccttcctggaagggaactacctggaatatgccttaggctaaagtttcttcagaggccatccttgaacgtataagggcttcttacctcttctctgcctcgaaggatgtccatttcctacttctcccaggattcttattaacagagtaggtcctagtcagaattggaaaatggggaaagaatctatcagcatccagctatgtgcttcacctgctgagctcctgctacctcaggaatccagtttccatgagcttttaacatgttctttctctccttttcatctttagtcgaaatatattcaagggcaccttcctctttgtaaataatatgatatactaattggcccttgagataattgaataaaaagtatttctgagtttaatgctgggacaatcttgtgagaggaggaatctttaagttacgcctccctgggctgtttaatacacttggcactcgtgctgcctaccagctgcctggatgttttgagcgtttctaataatagctctccttctacttcagttcttcttagttctctagctctaggaaatccctactctgaaggctacaaaacagtagaactctgggggaagatgttccaagtacagaggagttggctggatcctgaggaatgcagagctagctctagatagcaaccagcaggagataactcttcaacccactgaaggagaattttgccatcacagttaggaaaaaataatcttcagaaaattaacattttcaagctagaagatagtctcaagtccaatgtttttactttgtagagtaacagagatcctatgaagctaggaaaattgtttttggtttcacagaagccattgccagaggccacgtctctaacctgctgctcaaaactgcgtttgctgcagttttacggaagaatttggtgcattattttctagagtaatttactttcctatttctaatggagaaagcagtcttagtaatgttttccatattgacgtcttttagtttctatatttatggtcttgaaagcattgtcgagtattcagtgagcttattatggaacctgtccatccaggcttgggttttctctttactaaacaaaagttacattagcttgtaagacatttagttaattttcattacagctaggagaagttggcttgtaagttcataggcacatgtatggaatgtttcttcataatagagtcattgtttagaaatggcactaattctatttaaaataagtaaaagaaaaaaaaaacaactctaggcaggaggagccttagtgtctatgcttccaagttgcagcctgagggtagtagtactttgtactccaacctgttatactggtttggtgtgcatgcttactttctgtggtgggaaaaatatctctgtattcatcatcagaaaccatgactgtgagtgccttgaaatctttgtgatgccacaaagaggactaaccagtatgtgactcttccttcccagcctacagaactttaatagcattttcaattaacagaagtgcaaggagctcctgttggacctgtgttccatgaggaaggctttcactagcccttcatgataggttcaaacacttgaagacctgaggaatttcagagttgacatttagatattgaggtaacaggacatcttggagttgaaatttccagaatctttgctggaaagtctcataatctc

SEQ ID NO: 31024 - DNA, 2300 bp, Homo sapien
tattgtatgaatatccagtgcaatcccccaatttcacgtgactgtgaaccaagcattggttttggccttgaacttgtttttcttttaaatgctcctgaaaggtgcattgagatgtaaaatattaagtatattcatgtttatgaataggtgtaatgagacattaaatattggaagccaaacaaagttgactaagggacttcaagaagataacttattggcatatcattaggcaagaaagggagctatgagcagcactacctgagaattcttagaatttatcatctagtattaaattaggttataaattgggggtttcctgtttaatgggtcttgcttatatctggggtttgcttgaagcagctttctctttattatctcctcccattctctcttcccctctggcctcactgcactcacatttgcattttccagttagaggaacaatttatatgaacattgtctcaatctgttttgtgcagccataacagaatgccacaggctgagtgatttataaacaatagaaatttatttatcatggttctcaaggctgagaagtccaagatcaaggaggtggcatcttgtaaggaccttcttgcttcattattttatatcagaaggtggacaggcaagagaatgtcagcaagagaaaggcaaaaagggagccaaactcatctttttataaggaacccattcctatgataatgaacccattttcatgataatgacattaatccatttatgagggcaaagccctgtggcctaatcacctcttaaaattcctacctattaatacagttacaatggcaattaaagttcaacatgagttttggaggggacattcaagccatagcagacatcttttaaaaattacctttaaaatttttaaaataggaaggacaaaatcacttggaaaagtccttaaaccaagagaagacattagaatatggagatttttgttgattataaagtgctcagacttttgaactaagcaatgactaatgcagttcaggacatgtacggatggtggtactaatagatggtagggcaatggtcccaagtcatgatttctgtcatgaaacctttttaacttccgagtacttggcatagtgcctatccacactagtgcttgggtgctatgccctaataaaaatttgacattgttcttgatatactcattgtcacatattaattacagaaaactatccaaattcttaattatggcttcaggtcatgacctggctcctctatttcggactttctctttctactgtgcctccagctgggttacctgcagttgtctagatgcaccctaccgtttactttccatgtgttcttagcttaaactgctgcctctgccttacatcccctcttctgtatctctagtgaatacatattaatctttcaagagtcaacttacgtatttcctccactgtgaaacattatcaaagcccttaccaatcttctataaaacacaattgaccatgttaaattttgtgctctgacagtatattagcattaagcacttaagcattcttgattatcagttttgttttcttcaaccatatcatgtttcttaagaacaaagctatatgttattcaatttttgtgttttttctttttgtctaaaaatgtaatatttgtacttgcaaagggatagtttttttcctcttaaggaaagagaaaagaacatcagggtagccatctaagatactttccaaatcagattgcagacctctgtgttgtttttgcccatctcttgtgtttgtgtctatgtggttaagtggattatctaacttggttccacttcatttaaatatttgacttcttctgtttgtaggggtctctgccgcttttcgtgagaatactgaagctatttgggcatgatcaaattctacaatctaacatataattaggcgaagtaataatagcagttttaagtttcaagtaacggaaaattcagttaacattggcttagacaaataaaacaagatgtttggagttaggtggtcactgttgttggttcagttgatcattgatgatgtcacaaacccatgcacattgtgacattgccagtttcaacatcttggttttcatccttacactttttacctcagggtcattagaaagccaccacagatctaggcatctaagcaggaataggagaggaaaggcaactgtagccacattaatcacttttatcaggaagataaatgcttttcccgaatctttcaacaggctttcattttacattgggcatatttttgtcatatagccttccctagctgcaagggaggcttttc

SEQ ID NO: 31025 - DNA, 2300 bp, Homo sapien
tttaagtgtattatgttgatgttgatagaaggatcagaactaatagaagatttagttagcattaatatcactcttctctgcaatgccatagtgctgtattagtgggtttttttgttttgttttgttttatttgtttgtttttctttggagagagtctcactctgttgacaaagctggtatgcaatagttccatcctagctcactgcagcctccgactcccaggctcaagtgatcatcccacctcagtgtcccaagtaggtgggaccacagatgcataccaggacatcaggctaatttattttttaatgttttgtagacagaggttgtcgctatgttgccctggctagtcctgtgcttaagcgatcctccctccttagcatcctaaagttctgggatcacaggcatgagctaccacaagggccgtcagttcttaatttaagaaactaattcattccactttgttttgtgtttatgtttcatgtgatagggtcctgtctcattcatctttcaatattccacaacatctattaatattgttcatatattgagcagtcatatctcaaaagaataaagtattctcctttttaaaaaagttttcttttcaaatttatttcagaaatttggtacaactatataaaaatgaagatgacatggaaatttcaaagaagattaagactcagtggacctctttgggcctagaagatgtacagtttgtaaattactctgtgctgcttgatctgccaggcccttctcccagcactgtgactctgagcagcagtggtcaatgctttcatcctaatggccagccttgcagtgaagaagccagaaaagatagcagccaagacctgctctattcatatgcagcctattctgccaaaggaactctcaaggtaatatgaccatttgtctctgtcatttacagtgagatggaattagaaaataacagctttcatctaaattgaactaactgtcaagatgcaacatacaaaagtaaccattaaatcttttcagtgtggaagtgccaggaaagagaaggaagatgtggccctcctgacccttttcttgtcatattttgaaagtgaaaacatgttagaaaaatttaattcaaaggtgttgaatgtgtgactgagtcattcacattttgctctgtccatatagtgcaagtctatttcattctacagctttggagaggcaaaatttaatacactgatatagagaaagggaaagaaatggagagggttgtgttttgagattgtgcacacacaaaagaaattaagtggaaaattgatatgattattaacacatttaagatttgaaacacagcgcccctactttcatgatggaaaacacatgtgataagccaggtgtgtattagttcttcaccttttctgggtcagcagatttatgatgcagtttttttttttggcattgtggttaagtgcaaggcttctagagccacatggactagttttaaatctcagctccccagttaaccactgttacttaaccgttgggaggaaacgggctgatttcctcatctctgtattggagtcaataatagttccaactcataaggttgttgtgagaaaaaattacaaatatatgtaaatctaggaggacagagcatagcctatagtaagaacaatatacaagttagatataacaacgtgtaattggtcaacagtttcctttctatggactagttttctaactctatgtaaaagtgtaattttaaaaaatacacttagttttttttttttttccatcaaactgttgattgcctcatttaataccaatgaaataatgttatctttctgactgttgttaatggcacaaatgtttcagaatctaacttattattaactttgattgatatatggaatgtttaaatcatttaaaattactttgcataaatatttgaaataataacagtaaatgctcgttcctaatagatcttgggggagtgggagggagaggcagattttctggcagtccagcatcgtttctattctgtatatatcacactttgacttttagccaaagagctgcatataactattaccaccttgaaatgtcttaccattaattaaacttcaatataatattaaatgtctgcaatatttctactgtaggactcatataatttgattggattaatattatgctctttctggcaggtaataatggtaacacacctgtatattaataaaaatagaggaaggcaactgtcactctttccttgattcagaagctttggccttaagccaagactctaaaagttaccccgatattttatctaa

SEQ ID NO: 31026 - DNA, 2300 bp, Homo sapien
gatgggtagattgcaaaaattttcccccagtctgtaggttgcctgttcactgatggtagttacttttgctgtgcagaagctctttagtttatttagatcccatttgccaattttggcgtttgttgctattacttttggtggtttagacatgaagtccttgcccatgcctatgtcctaaatggtattgcctaggttttcttccagggtttttatggttttaggtctaacatttaagtctttaatccatcttgaattgatttttgtataaggtttaaggaagggatccactttcagctttctacatatggccagccagttttcccagcaccatttattaaaaagggaatcctttccccatttcttgtttttgtcaggtttgtcaaagatcagatggttgtacatttgtgatattatttctgagggctctgttctgttccattggtctatatctctgttttggtaccagtaccatgctgttttggttactgcagtcttgtagtatagtttgaagtcaggtaatgtgatgcctccagctttgttctttttgcttaggattgtcttggcaatgtgggctcttttttggttccatatgaactttaaagttttttccaattctgtgaagaaagtcattggtagcttgatggggatggcagcattgaatgtataaattatattgggcagtatggccattttcatgatattgattcttcctaccaatgagcatggaatgttcttccatttgtttgtgttgtcttttattttgttgagcagtggtttgtagttctccttgaaaaggtccttcacataccttgtaagttggattcctagatattttattctctttgaagcaattgtgaatgggagttcactcgtgatttggctctctgtctgttattggtgtataggaatgcttgtgaattttgcacattgattttgtatcctgagactttgctgaagttgcttatcagcttaaggagattttgggctgagacgatggggttttctaaatatacgatcgtgtcatctgcaaacagagacaatttgacttcctcatttcctaattgaatacccttcatttctttctcctgcctgattgccctggccagaacttccaacactatgttgaataggagtggtgagagagggcatccctgtcttgtgccagttttcaaagggaatgcttccagtttttgcccattcagtatgatattggctgtgggtttgctataaatagctcttattattttgaggtatgttccatcaatacctaattttaatttattaagagtttttagcatgaagcgctgttgaattttgtcaaaggccttttctaagtctattgagataatcatgtggtttttgtctttggttctgtttatatgatggattatttttattgatttgtgtatgttgaaccaaccttgcatcccagggatgaagcacacttgatcatggtggataagatttttgatgtgatgctggatttggtttacctgtattttattgaggattttgggatcgatgttcatcagggatattggtctaaaattctctttttttgttgtgtctctgccaagctttggtatcaggatgatgctggcctcataaaatgagttagggaggattccctctttttctattgactggaataatttcagaaggaatggtaccagctcctctttttacctgtggaagaattcggctgtgaatccgtctggtcctggactttttttgttggtaggctattaattgtggggaaaagcaagagagatcagattgttactgtgtctgtgtagaaagaagtagacataggagactccattttgttctgtactaagaaaaattcttctgccttgagattctgttaatctataaccttacccccaaccccgtgctctctgaaacatgtgctgtgtcaactcagagttaaatggattaagggcggtgcaagatgtgctttgttaaacagatgcttgaaggcagcatgctccttgagagtcatcaccactccccaatctcaagtacccagggacacaaacactgcggaaggccgcagggacctctgcctaggaaagccaggtattgtccaaggtttctccccatgtgatagtctgaaatatggcctcgtgggaagggaaagacctgaccgtcccccagcccgacacccgtaaagggtctgtgctgaggaggattagtataagaggaaggcatgcctcttgcagttgagacaagaggaaggcatctgtctcctgcccgtccctgggcaatggaatgtctcggtataaaacccgattgtatgc

SEQ ID NO: 31027 - DNA, 2300 bp, Homo sapien
tagaggtcctagtcatataataaggcaaggcaaagacataaaatatcttcatattggaaagaaggcagtaaatctgcctttactaaatgatgacattgcatacatagataatcctaagtgatttacaaaacagcaaggtcagaaaatacaagggaggtatactcagataattatatttctatatgctagacatgatctatttaaaaataaaaaaccaaaacctttagcaaaagcattcagaaacatgaaattattaggggaaaatttaacaaaatatgtaaaaacatgtgtaccgtagaccataaaacattgttgaaataatttaagaaaataggctgagcacagtggcttacacctgtaatcccagcacatggggaggccaaagcaggaggattgctgggttgcttgaggttgggagtttgagaccagcctgggcaatgtagcaagacctcgtctctccaaaaaaaaaaaaaaaaaaaaaaaaaagacagaaaatacaaatagatgaagatttgtatcttgtccatggattaaaacattcatattgttaagatgtcaattttctccaaattgatatacagcatagattcaatgcaattcccactagtatcccagcaaggtgtttttagctcaatttagtcatgctgcatgtatacatattttaaaaccatatattgtacatgataaatatatacaatttttatttgttaattaaaaataaagtttaaaaataaaaatgtttttagaattggacaagctgattctaaaatttatacagcaattcaaaagatttataatagccaaaatgattttgaaaaagaacaaagttgtagaacttaccgtacctgttttcaaggatttctgtatttccacaataatcactgccatatagtattggcataaggtgagacacaaattagtggaacacaatagagttgagaaatagaccacaaatacatggccaattaattttcaacaaaggtgctaaatcaatccaacaagaaaggaaagtatgttcaataaatgttgctggagcaactggatatcaatattaccaaaaataaattgtcaattcttgtttcacagtatgcacaaatgtaacttgaaattaattgtagaactaaatgtaaaagccacaactctaaaactaggaaaaatatagaaatctttgtgactttaggatcgattatttaactagaatatagaaagcacaaaccatggaaaagtagtcaaattgaaattcatcaaaatgaaaaatttatgtaaggaccaaatagtaaatattttaggttttgtgggcctaatcatctttgttgcaactacttaactttgccaatgcagtgcaatagacgctgtagacaatgcgtaatgagtggatgtggttgtgtttcaataaacctttatttacaaaaacaggcagcacgcagggtttggctcatggggctagtgggccaacacctgcactagctggacagaagctctagcatgagattcagcaatgttaacaaaaggccatgagatttgtggaggaaaaaggaagaactttattttctacgaaacgcaatctgcagattggggaggcatggtcttcaatacaagtgaaggtgtgctctccaaagaataaaggaagagtttggcttaagcaggaaaatttcctgccccatgtctcaatcatattcttttttttttttttttgagacagagtcttgctctgttgcccaggctggagtgcagtggtgggatctcggctcactgcaacctccgccttccgggttcacgccattctcctgcctaagcctcccgagtaggggggactacaggggcccgacaccacgtccggctaattttttgtatttttagtagagacagggtttcgccatgttggccaagatgttggccaagatggtcttgatctctcgccctcgtcctctgccggccttggcccaccaaactgcggggattacaggcatgagcctccgcgccccgccaatcatgttcttttacgtagacaaaagagtcaagcttatatttcgttctgattggtccagatagtcgaactctgattgggtggcttcccaatcccaaaaccagaagtctgtcagatgttccttccaaaaggctgagctggagttgggggttctctcatggcttctcttggctcccgtcacaagaactattctagcttaagggtataaaacaggatgtttgtcgccaggcgcggtggctcacgcctgtaatcccagcactttgggaggccgaggcgggcggatcatgaggtcaggagattgagaccatcctgg

SEQ ID NO: 31028 - DNA, 2300 bp, Homo sapien
ggataccactaaggacttggttgggagtttgaaaatgaacatttattatttataccttgtatttaaatttctttaaccagcatgtgctctacaataaatataccacatgctagtgacaaccacctcccacattatgacacaaaaccaaacaagcatatgaaaagcagcacacataccttgtgctaccatattggtcaatgggtaggacaaggcataaaagattccaacgcacattccaagttaaccaacactgtttaagaagtagaatgaacttaccgctaattgactcttatcagacttcatttacttcaacaccagatctgtccaacttcagtttattcccacacactaaaatatttcaaccatttcaggtggaaatattaaaatccatattacatagctaatttttatgtcatattaaacttaacttgaattatttgatgactctaggccatcccaaatggcagctcttcattctgctaggagttttagctattcctccctctctatggggagcactgttcctcatggacccaggttggaaaatcagataattgatctggtccagcaagtgtacgtaaattaaaccaataaaagcttagggaaaaggtcttgtcttggcagtgtgtagattcttcaaaatcccctatattgaatgtgagagatcctggaagctgatcctgtttttaaatgtctgatttcagactgtgaagttcaatgtgactagattttttaatgcaagtctatttgaggtgctcaggcagtgcttgttttctccacaggagcccggcccagtggcaatccaacctatgctttacggctttctgacagcacaacatctcttaaggcagctcgttctgacattagattagtatgtcagaaagtttgttttttttttttttaaataagactgtgatatctttttcggtatagattccaccccattggtcttagttcttaaaatataaattgtctgcccaatggatcatacaaacccaacaaccaagaaacattagtaattgtcttctgtactttactaaacactttgtgtttaatatattttaaattgtaaagaaattacaaggaactcctaaaaaaatttaatacaaaaatattacaagttaggacaattaagcattaagatgacatttaagaagcatgcagaaaaagtagcatagggttaacatttcattgatgacaaagcactttggtacagcagagaaaagcaccataaaactaccatctaaagtgtcttttcctccactgtattttttcaaatgaatatattggtaaaacagtaaactttgatctgatctgctacggattatactaggtaataaatctaatccattgtaaagtgttaactatgaaattaaaaataatcccttctattactgttcaaattagtttcagctttccctcaagcttataaggattctaatccttaggagtccaaccctttttggaaaagtatacaatgcaggatattactaataatctatgccatgcaataaaagttaaccccttgaaaatgaaagcatgtcagttctagcaactgcagtggcttatttctaataaaacataaaactatgcttgaatttatttctgtttaaggaaataaacaggaaaaatagaagacctagagagtgtaaattcttaaaaaaaaaaaaaagaaaatatgctcaatgattctttttaaaaagtctctaactctaaaggagttggtattaattaaaactagaaggtgtctagttgtttttcttataaagtttgtagtaacaactagctaagagagaaaatgattcaactataattggcttgttgtgaagcaaaaaaaggtcaccgagaagttgagcctcctgccctaatcttcaacacatctacacattgttttgtgctcaaccgtgtggctaaccaaacaaatgttatctaaggtctctttttcagcttctgtgaaataacgtcttttaaatacaatatttatttttcaaaagaattaaaaattacaatcccttagctgattagatgctctattatactttaataaaaatagtaaataaccccttcatttaaaaaaatcttatctcctgcaagaagtaataaaaatagtaaaatttgtaattttattatgggcttaaagtatatatcttgggaaacaatacgtttatgaaaaacagtggtttgggttctgatggcagttattaatcagtaacaccagtatgggagagaatgaatgtgttataggttatgaaggctaacttggaaaaaaaggtttattctacaatagaacactggagaag

SEQ ID NO: 31029 - DNA, 2300 bp, Homo sapien
ttggtggaggctctttgaagttgggttcaggagtgtagaattggcaaagttattgccagcttcctggtaagttttgggtggcacagagtcacgttattttctgacagtgtaaaggccacgttgtgagggtggtttctcggtaacttcctctttgcaaccgatttaattttttgaacagaagcagacttttatttaagtggaatattaatcttaaatggcagctcgagggaagccatgcatgtgttaacgtgttcagtatttttggaagttcttaatttgctgaaacaggcatcacttcgcagtggcaaccgggattaaatttaggttgtgaaaatggtgtatttcatgtaaaatttgggttgtggcttttaaaaaatgctctctttgttaggttatctaagtgtctctaagataatttggtgattacaaatgagaaatgttggaaactagttaaaaattaggtgttctcagtgtctggagtttacttgaaatcttggactgtgcaggcaccaggggtgaagagttttagtacctatgtgatttacagttgacttaggaaagtttactattcactttcttgttttccaaacaggaaccgtatgctgatctaaacaagcttgttaataaaatgtggggggtgaaaatgccaggttatttttagtttgaattttaagactgaatggttgctctaccccccacctcatataattaagtgatcttccccctccgtttttcctaaaggcttcttcaccagtttggataataaggccctcgtggtgtgttcatctacttacctgaaataacttggaataaataatttcgattacacgttgaagatacaatgagtgactgtttgggttttccagtgtgattcattttcatttttgttaaaataagacccatgctacattgatgtattttagtaatgccgacttcctgggattgtatgttctcaccattttaatagtttatagtctggggaagtagggcacctttgtctccccgaaaacatggtgtgggttgggtggtatcatgggagttgatggcaagcttcccaaatagttgagagttctagaaatagttagcatttacctgtgggggaggggctgcaggaagaaagtatgcctgagagcagttaggcgtgtgatgtgtgattaggcttcttgctcttaaatccaggttttcttgtttggaatatgattttttttttcaaccctatcctgcactgagatgtatgtaatcgcaatcattaaattcataaataactactattttttttgacgtttgagttgttggaatccgacctacaggacaaaatactaaactgtatgggggacgaaaactacgtgcctgggaaaagtttttcttattgctaaggaacttaataaagtgacatgttaatggcataaaaattgttgcaaagctcaccgtcagtttatgacatttttcttttaacgtataccagctttgggtattaatgtgggagacactggtggtaaatggagtgaccccttgcagagatgatatttttgcattggttgcttcaaagaagtgttaagcattttaatacgtatgtctaagaatctttttgatatttgtattctcgacacctaattaaaggttttgcatgattaccatgacaccagtctcccgaaagaattagaggtaactgcttcctgtgttctaggagcctttcaagctaacagaaggtaatataaatataaggggtactgataaaaggaaatgtattaatagaccttttgaacatcaacttgttgattaaatctatcagtgcagtatatatacaaccttgtcagacgagtagctgacaaaggaatctccctagtacaacttgtagcagtactattataaagaattcctgacttgacacattttgatgaagttggttgaaataatttgttgggtttgttcaatttttggtgtcatttatataaaaagaataaagaagaatgtgaatggtaggaagtcaggggagaggcatggcagaaacattggtattcactagaacttgtatttttctagtgcatgtgaattggactcatttcacaaataacatttacagtataagtcactgaaatgcaaaaaaggaaagcagctaacacgagacatttatactttatgctcagacattctggtagtagaggagggctaggaccctagagctgtgtagtaaagaattgttgagtatcgttcagtttaggtaccacgaaggtggtatctcctgctctgccaccaatagaaacttgaagttaaaaagaaaagactctgagagcgctgat

SEQ ID NO: 31030 - DNA, 2300 bp, Homo sapien
catttgctttaaaacctgtgaggtgcctcccttctttaaaaacaaccctccctcaaccatactgccacattatcactcatctaagttatactttataaaccgccttgctgtgcttcacacatgcaaaaagtacacaaagtggataaacttctactgtggatgccactgtgcaggtatatatttagtaaacatttagttacattattttatttttgtgaaataagaactgatcgagcaaacctttcaaacagacccaccagatgataaataccaccatatgcttgattcacagtacatttgggcataaatacttcaattacagctttgtgtttagtatcaaaaaccttttcttgtgtgcgtgttttctctccagatcccgtgctctggatcacattttgaaagtcgcttattacagataaagcacctttccaggtacgcttcggagaaccatatgtatttacgcacacaaaggtgttcacagagattttcacaaacaaatgtccatatgatgccgcgccgcactcccccacatgcccgccgcgtgtgcgcccagcccccaacgccgccgggccgccccccggacacgcgggagcccgcggcgtccttggggaaacttcgccggcggctccaccccggccaccgcgcgggcctccccgcccccacccgtctcgggcccagcggcccacacccgagcacacccaggccggcccgcggcggtgggggcggggcgggcggcccggggccccgaggcgccttcgagtgcccgcggggctcgcctgatttttaaaagaatgcgccgcacagcccagcccccagtgccgccagagcgggccgggaaggagaggagcgcggccgctggagcccccccgccgcgccgccgccgcctcccggcgtccgcggcgcccctcccccgccggcccctcccccgcgcgcccgcccgcccgctcgcccgcccgcccggcgcaggccgctcgggtttgttttgctgcgcggccgccgccgccgccgccgccgcgggcctcgcgagctcatttgtgcctggctggtccccattcctctctccccagtgttgagtgtctgagccgttggctgctccgaaccgtttggctctttcccttagtaacagcttttaccttctgcctcaattcctctccccgctcgcgcccttcccccgcgcgccgcctccccccgccgccggccgcgtgcgcccccgcccctccccccgcggcgggagcacctccgctcgccacctggggacccgcgccgcgctccccgcccccgcccgcccggcgcccatcccccgcgccctccgctcgctggggttataattgcctctcaccccccggaggggttattttgggggtggttggaggcggtggcggcggcggcgaggaggggaatttccttgtgcctccattcccgggaggggggagcggcgttggaggccaccgtttccaggtaagcgctgggggccggaccctggagtgggggcggccgggggcctgggcggggggcgcgggccagaggcggccgggggcgctgggccgcggggggatgggcgcgagtggaacatgcatttttcaacttggcccttgggggaactgggcttgcgtgggggaagggaaggcagggagggcacttggggcgcccccatccccccgttttcctctctcaggtttctttgaaatgctcacgtgcctgcccacccccctaccctttcccggtctcgggggatcctcaccctaattatgttgtccccgaaaatgtgcacctcggccttctccccctcttcctcccttcgtgcatttacaccccctttttgtgcgtgtgtgtttggggggggaggctttcaggaaaggatttgcagcaaattgaatcaaggagccatcatgaggccgactcctttatagcctatttttagcagaggagaaggagcttttcggtgcatgctattttgtgaaacctcgggcggcaatggaaatctcccctccccgggcgcgtccccggcccgggcgcggcgaccccggccggcgtgctgggggctgcgggcggctgttggggccgcgcgtccggggcgggggcgccggccgggggaggggcgcgcggcagccgggccttgctccgggacgtgtttatttgtaacttagtgctttttatcgtcttaaggaggtatttggtggaggctctttgaagttgggttcaggagtgtagaattggcaaagttattgccagcttcctggtaagttttgggtggcacagagtcacgttattttctgacagtgtaaaggccacgttgtgag

SEQ ID NO: 31031 - DNA, 2300 bp, Homo sapien
ctgaaataaagtcttctgaaaggtgttagttctgaggtaaacaagcctcagctttagaatcctattgaaatgcaaaacttgctttgtgcggtttccctgtacactctgcatagtgttttggaaacctgcagttatctaaattcccatcgggtgacattgtttaatccaacattcccactttcatacatgaaaatagctctaaggacacaccactaatatgctttgaactctctggtggttggaagggagtttccaatcccactccctttcctctgatggttttcctgctccctgccccactaggtcattcaggaaaggcctctggcagctcccccaagcaagggctcaggggggaaagagacattgaccttggccaagaaagcacctgtctaattactgaacttattaggccaccaggagtccagactggtgcaagttacgagtagtgtgtgtgtgtgtgtgtgtgtgtgtgtgtgtgtgtgtgtgtcgcaaaacttcaggtttctgatattgagaggaaatgatggttgctttaaagtgatcactacatctattttcaaatattctgatgaaagtaggaaaacagaacccttcacctttaagaaagctgcaaacattattttgctttgaaggcagtaataagcgaaataacaaaaaggtttcaagtcgtatcttaatgtaaaagggtggctgcttctccagtcctgagcttatacaaagctctaaaaagcaccctaccccatctttctgaaagtcttagaaagattaccaccccatttgctttaaaacctgtgaggtgcctcccttctttaaaaacaaccctccctcaaccatactgccacattatcactcatctaagttatactttataaaccgccttgctgtgcttcacacatgcaaaaagtacacaaagtggataaacttctactgtggatgccactgtgcaggtatatatttagtaaacatttagttacattattttatttttgtgaaataagaactgatcgagcaaacctttcaaacagacccaccagatgataaataccaccatatgcttgattcacagtacatttgggcataaatacttcaattacagctttgtgtttagtatcaaaaaccttttcttgtgtgcgtgttttctctccagatcccgtgctctggatcacattttgaaagtcgcttattacagataaagcacctttccaggtacgcttcggagaaccatatgtatttacgcacacaaaggtgttcacagagattttcacaaacaaatgtccatatgatgccgcgccgcactcccccacatgcccgccgcgtgtgcgcccagcccccaacgccgccgggccgccccccggacacgcgggagcccgcggcgtccttggggaaacttcgccggcggctccaccccggccaccgcgcgggcctccccgcccccacccgtctcgggcccagcggcccacacccgagcacacccaggccggcccgcggcggtgggggcggggcgggcggcccggggccccgaggcgccttcgagtgcccgcggggctcgcctgatttttaaaagaatgcgccgcacagcccagcccccagtgccgccagagcgggccgggaaggagaggagcgcggccgctggagcccccccgccgcgccgccgccgcctcccggcgtccgcggcgcccctcccccgccggcccctcccccgcgcgcccgcccgcccgctcgcccgcccgcccggcgcaggccgctcgggtttgttttgctgcgcggccgccgccgccgccgccgccgcgggcctcgcgagctcatttgtgcctggctggtccccattcctctctccccagtgttgagtgtctgagccgttggctgctccgaaccgtttggctctttcccttagtaacagcttttaccttctgcctcaattcctctccccgctcgcgcccttcccccgcgcgccgcctccccccgccgccggccgcgtgcgcccccgcccctccccccgcggcgggagcacctccgctcgccacctggggacccgcgccgcgctccccgcccccgcccgcccggcgcccatcccccgcgccctccgctcgctggggttataattgcctctcaccccccggaggggttattttgggggtggttggaggcggtggcggcggcggcgaggaggggaatttccttgtgcctccattcccgggaggggggagcggcgttggaggccaccgtttccaggtaagcgctgggggccggaccctggagtgggggcggccgggggcctgggcggggggcgcgggccagag

SEQ ID NO: 31032 - DNA, 2300 bp, Homo sapien
cactgcaacctccacctcctgggttcaagcaattttcctgcctcagcctccccagtagctaggattacaggcgcatgccaccacgcctggttaatttttgtatttttaatagagacggggtttcaccatgttggccaggttggtctcgaattcctgacctcgtgatctggcccccctcggcctcccaaagtgctgggattacaggcatgagccactgtacccagcctgttctccccttttttctcatgttttgaacatcttttcctagcaaatagaaacatatttatctcattcacagagatatgtaaacatagcaatggataggcaatattcactgccacaggttccttaatttcagctgttcacccctgtgcttccctgcaggtcaattctactatgggtattgtttggatattaccacctgataacagtctgatccacaagtttcaccagagcaatgccaggggtatcatcaacagccaattagaacttgggcaacatgagctagtcagctggaagactgaattgatctaattttagcacaaagcaaagaaatatgatgttacggttaacttgtgtaaatagatatatggtgcaagtacaattgtcgttagagtttttttgtttgtttgtttgtttttgagatggagtcttgctttgtcgcccaggctggagtgcaatggcgcgatctcggctcactgcaacctccacctccagggttcaagcagttctctgtctcagcctcccgagtagctgggattacaggtgactgccaccacggccagctaattttttgtatttttagtagagacggggtttcaccatgtcagccaggctggtcttgaactactgaccttgtgatccacccacctcggcctcccaaagtgccaggattacaggcgtgagccactgcggccagctagagattttaaaatgctaaaaataaccctagaatgtcttgcccacttcacagatccctcagagtccaggcattaggggtgggaaagtgccacagtaggctattctacaaatggtattcttgtgcctatataacatgcattgattctgtagtcaagtttctattaatctaaaggagactgggtaactctcaagatttcaaaaaaagtgatattacagaaagtatgaaaaagtaagaaaattataaagcatggcaaaccctttggtctttaagcagaaatttttattttcagtcagttgaatgtaagggcttcagaaggatcgtcgatgaatcatgttgtataggtgacaaagcaatcctgcgttcattatctcacttccttctcccaggaatcaggtgatgtctcattagtacacaatctgagcactgaagagcgtcacattctataatttttaggaactttttgttgtagatgttagaaacccaacataaactaccttatgtaagaagggcaactgattggaaggattctagtattttcttttttttttctctttgagacggagtttcgctcttgttgcccaggctggagtgcaatggcgctatcttggctcactgcaacctccgcctcccggattcaagcgattctcctgcctcagcctccctagtacctgggattacaggcgcctgccaccacgtccagctaattttgtatttttactagagatggggtttctccatgttggtcaggctggtctggaactactgacctcaggtgatctgcccgccttggcctcccaaagtgctgggattacaggcacgagccatggcacccaaccgattccagtattttcttttgatctgttttttgttttttaaatagaattctaggaataattgaataatcaagacacaggaagagcagagatgcagctgggttctgaatgctgaaagccagacactagaaggttgtcaggattcttctcatctcatgttcccctctgaatgttggcttcactctctcatttcagagtggctttcttctcttagtggaggacatgcttgccaggagcatgtgagttcatatctattaataaatgtggagccagtgaagagagattagttcagcttgctcgtcatccctaggctatgagccacaaagcaggactgtggcccagcttaagtccagtgctaacctgtgggtgaatgaacaatgaccggggaacagggccctaaggtatgtgtaaagtgactcctgtggtaaaaatgtacctgagtgggagttgtgagagtcggggtggggaagaaatacattcttagaaaagacgtgttaggcaggtaattctataggtatgcactccatatttatgcattctggatg

SEQ ID NO: 31033 - DNA, 2300 bp, Homo sapien
gtataactgaattaggaatcaataacaaaatgatctcaaggaaactttcatatatttggaaattaacaacacacttccaaataacccatagatcaaagaagtacttataagagaagtcagaaaatattttgaactaaatgataataaaagcacaaaatatcaatatttgtgagatgtagctaaaaccattcttagaagaaaatttgtagaagaaaacactaacaaaggaagaaaaatagtcactttctggtgctcaataaattattagtttttaatcattattaatagtatcatatacatagcaaacttagtttagacaaatttacaaaacgtgtgtgtcagggtaatgttacctatggcattcgttatcaacaattacctcttaaatttggcaaggaatttcattaacatagattccatttcctagtgaaagagaagagcaaagcatctgcagcttaaagacctggttccatcttcttcttctgccatttactactgttctgactttctctctcttggtggcaactttctcaactgtagtggaaaaaatgatatctgcctaatctatgtcacaaagtcactctagaaaatagaatgccatatgaaaacggacttagtgccaaaaacagttaaggcaattattcttactcatgaaggaagctagagagtgttcctgcttcttttatatattgcttgtttcactgacgctatcattctctctgatttttatatgtggccttgaactcaacaaaggtttatattaaagatcttctatgtaaataattgcaaaattagaccagaagagaaactaatgggcaactatggcgttagaagcttgaaccactttcacagcctgcaacacctgttgagtcacgttcatgctcctaggtgtaacattcagggtctccatcacctggtttctctctgttctccggcctcattttaacctacttagctctaaaacttttagactgtttcatgcctttgaatatttaatcatgcagtacccactgccttgaatgttttgcaaacttttttttttttaacttgaaaaacctgctatgattccctctagttctagttccaggcatcatcttccccaggaagcttttccctaatctccttaggagttaagggccccttccttctacccccacagaatcctgcacaaaatactgtcttataacccctgatattgtgttgtattttctgtgtaggagtctgtctcatcacccagactcttgagttacacaagggaaggacatgttttattcatttttgtagatttagtacaaaagagtacattataatagggtgcctagtgcatattaagaaatcaataaatatccattactttctttaaaaaaaaatgaattgcttacacttataaatctattgaaagtatcatggcaagaagcaaagctcttaaaaaccataaagaaattatgaatttttcagggtttttggaatgtggttgccacttaacattcaaactattaataaaatactaatgtgggtataaactgaaaactcaggtgtgtttttctttaaataaatttggtgcaaggaaatctgtgattatgttgttaaaattgagaattagaaagcggttcttcatttaatgaagaagactttctttatacaaaataagccataagattaaatggtgaactgcttgtggacattaaattgactaaaaaagaggtttaaattcccatacaaggaatacgtgatatgcactaacttatgtatatctatatcttaatagaatgtgttgggcacgtctacaagattttccttaaaatgtagaagaagcctagagtataatatttaagaaagattacatattattccagttaaaactttcaaattaggattgattgccaagactacttcaactcatgtggggaaattggaggagtgttttgacgggggaaaagacaaaacagaaaatgccagagcccaaaataagttccccagagaagctgggagtctttgccttgattggatacagactgggaactttctcattgctttggaatttgggctaacgtccaaaactgagggtaacctgtgacaattgcattgcacattctgaagaaaggtacttagacatgttccccacaggatgtgttaaggtgttggccaatcatcaaatattgtcactccaaagaacacatttaacagccgggaagaaaattgtaggaaaagagagcactttggcacggaagggtaagctgctatgtgacttcgtcttgatccaagagaggaaattgagagaaaaccctctggagcaaagg

SEQ ID NO: 31034 - DNA, 2300 bp, Homo sapien
ctctcatatttataaatggttccttggaaataaacaggtcttttcaaagaggcggaaatggccttccactccctctcttgccatctagaaatggattcaaaaggagattctttatcgcagccaagtgtttaggggtttaagggagagacactactcagaaaggtttctggctgtccaacagcccttttctttagtctcccagcagactctgggggaggatgtgagtaggatgatccagctgggacatcttggatggcagtaacctagtatgtacttgaacacttctccctaacctcattaccattgcactccaggaggattgcatactagggagcagatgctgtaactcttctcttctaatgtgaccacaggaaagtttgctttgaagggactttttgaagtacaaagtatgaaggtgaaagattaaaggtcttataacacaaagaagatctatcacatctcctgccaccccagaactgacaatatttgctcaagttcagtgtttttgtgatcgatgtgtgggtcatttttatttccagtggctgtcagcctaagactacaggacttgccagtcctagtaatgcaaatttgcattgtatctccattttaaggggcccaaaacacattgccgtatttctctgcctgttttcttatcctctcattagataatgcatgtctatttgttgcaacacaattctaggcaatggtggatagaaagtaattacagtagtctgaagagattgcttaaagagactggccatagtgaaaccagtgtctaaggtttccatctgcctgtctagccatctctgaaggctttgggcagtgtgacagaacatagaatttggggccagcctacctaggtttgagtcttaactctacctgctagggactgtgtggctttaagccaatatttttatgtctctgtgtttctgtttctttttctgtggaaacggtgaagaataatagctacttcttagaagagttgggagggttaaatgagctcatacatgaacagcacttaaaacagtacctgacacgtagtaagtggtatgacagagtttgctatcggccgggcatagtggctcacgcctgtaatctcagcactttgggaggccgaggcaggcggggatcacaaggtcaagagatggagaccatcctggcaaacatggggaaaccccgtctctactaaaaatacaaaaattaaacgggcatggtggggtcgcctgtagtctcagctactccggaggctgaggcaggagaatcacttgaacaagggaggcggagcttgcagtgagccgagatcgcgccactgcactccagcctgggcagcagcgcgagactccatctcaaaaataaataaataaataaataaataaataaataaataaataaataaataaataaataaataaaagagtttccaagagtttcctatcactattactagttcaggttttgtttgttttttacagcctgaccttcaaatgttttatgcactccttgaggttgtgtgcaaaatttagtgtggctgctcaaatataaaatttcctggccgagtattcatactgtttatcgaagtcatctatgaattttaaaagtttgggaactactgtgccaggctctgcaggtctcctaacacgaatagatagcttctatcattagtaaaactcagtgaaccattatgagttttgattcctacaaacacgaattagatcttcaagtaaaatagtccttaagaatttatttataacatacatgaaagctataggtgagatatgttcattttgttttctacagctttctttgaatcattttttaaaaatacacaattatcaacagcagctacctagtgagatcaatgggccaaattaatcaaagagagcgtaccacactgagcatcacaaagatttgagaatttcccccagcttttgagctggcctgcattaatgcagtgacccactagatgtcaatgtttccatgagaatgaataaagacattctgttgttatccttgaaacaggattaattgattgctataaaaagttagatgaaataaaatgttctccttgctcttcaaactaagataagctaataactttggacacaatttcactcctctgcattcaccaaatgtccaattacatatcctccctgcctggaccttcagaacaatataaaactgaatgaaggctatgaaagaagtcacaggaggatttttgcagagcttccatccagttcagaaacaaagcaattcaatacatgtcttcaagatttctaaaggcaatgacttagtaagtaatg

SEQ ID NO: 31035 - DNA, 2300 bp, Homo sapien
gctgatctcgaactcccgacctcaggtgatccgcctgcctcggcctcccaaagtgctgagattacaggcgtgagccaccgtgctcagccccattattattaaaagagaatatcacaaatacttttcccctgaaataattcttctattacaaatgtttggattatttgcttgcctataaaagacaggattttcataaaatctttaagcattgtttttcaacaatttcttttcggagtttttatactcacacttcagtggtatcagttactccaattacaaactgtgaagttgaggtactaaagaaaataattttgtattcgctggactcctcacaactgtgaaaatttaattacgctggtgagaaatagttcctcttggatgaccatgaggctagtgaaatgtcttggactcttaacataaaagaattttttttcttttactacttggaaaactgaaaatttgaaaaagtctttttctctttttcctaccaatttaatgggcaaagatttttttttttttttaatttgagttgcaataagtattttctgactttggttgtcccaggaaaaccactataaggatactcaaagagaacaaaattatggtttgtgatactaggacagttttcctctaaatcacgttttattcctgagaagaaactgtaaccagtcaagtaacaactaaaactcacacaccattagggcatattcaaactgacaactaggagtttagaaaaagaaaggtttgagaacaccctgggtaacatagtggacccctgtctcgaaagagagagagagagtgagagagagagagagtgagagagagagagaggaaaagaaaagaaagagagagagggagagagggaaggagggagggagagagggagggaggaaagaaggaaggaaggaagacagagagggagggagggagggagggacaaaggagcagaggaaacagcgtctttgctttatcagacatctgagcaattcagatattcagttattacatataataaaataatggatgctatgacccgatcattagagcatttctagattacaaaactaccaataattaagtagtggtgatttataatcattctctctaatattttgttgtagtagtttgtagcagtttttgtttgttaattgctactcatttttagttctataggccagtataatacatgtccatccatattacatctgctgctctctttaagcccttccctggagcacaccatctagtttccgtagtaactactacaatactattgctcctggagtagcaggaagaaaggaaatgcggaagagaatgaataaattgtgtagttctattaagaactttctccgcttccttacttgcaaaggtacttaacttttcagagtagcacttccagctaactgataccctcttctctgaccaatgttaagaaatccctcttctatcttccatgatcatgactgtccaaagtggagcaagataacgtacacattcccattctttccatccatcattcattcttgccgtttgacagttgtgcatggcatgtgattgcttcagcctgaaacacaaagctttgtaagtcagcataaaataaacactttatgcactgaatgatccattcagtctagttgatctataatttgagattttgtgtacatgtgtaccttaagtcatatctcagtaataatgagaacttttcctatttggattgattttcatacctaactccagagaacacttatttttgtaactgggaagagcaggaatcccttactgggagtgagaaaattgtttggagaatcctagagtgtttactaccaagttcgctttccatatagaaaatatctatttggctctctctcctatagttaaggaggatttggaaatctgatccagtgcagggcgatgtcggtctgggaaggaagactgtgagccctctctccctttttaatatgagaattcgaaagcagtggggaagtgatgttggacctatcacagcattgctaacagacagcctattacagtatttaataaaaacagaaacagcatgcctatcataggctaataaatcctacctcctgcacgctttaaaacagtatgaagcagctttaacggagctccagataactaatttcaagcatggctgtctagcgtgcctgtcactcctattgtccttccaaactctttcagacattttgagcagggagtattaaagctatgagttagaaagggttgtgacattaatggtccacaaaggctttaggcacaagaggtaatgatgattaccggtggct

SEQ ID NO: 31036 - DNA, 2300 bp, Homo sapien
tttcaccatgttggtcagagtggtcttgaactgctgacctcgtgatccacccacctcggcctcccaaagtgctgggattacaggtgtaagccacctcgccctgccgacacatacttttaaaggaaactttgtgcaactgggaaggaaaccaggagaatgcagaatcacagaggccaaaggaagagcgaattttacagtggcaagggtgattgggaatgtcaggccctaaagagagcctgagtagcatgaagcataagggactgtgtatgccatgaggtgactgcatagaaagctgtttcagggctaacaaggagcagaaccattgagaagataaagtgggagagaggaggatgcatagaatcgtagcttgagggacaagggaaggtgttttattaggataataatagcctaaacacatttgcaggtttgagggaaggagccagtaaaatggattaaagctgaagaataaacaaggattaattaatcaatcaagacctccacagcactggttatcaaccctttcttaacataaaactcacttaggacccttattataatactaacacctggtcctgattctgatcaggattatttactagttttcccaggtgattcaaatctgtatctaggtatgagagtcacttacttagaagaactggacattggattaagaccactatagatggttattttgggatgacaaaggctctctttttcctctgagatgagggtagtatagtaccggggtggcggagtaagaaaaggatgaattaagagcggaaacatttagaaagactttgaaaggactcctgatgaatggcttcgaactgagaaagtagaaggtgagatgcttacattgagggtgcaaaagtaagactgggccattaaagaaatttaaagcattccgaataactattaagatttccacagagataaacaaggtaactgtccaattactgctttattctctctacccttattcgttggccatgcctttacaaagaaagggcattactgtgtttcttgttactcttatgaaaaagagaaaaagaaatattataattggggaacagatagaagaatagtaacgttaatagagctttagtgaaggctttaagtaaaggtatcaagaataaggaaatctaagcagtgcattgagatctctgtgaaatcagtgagaattcatccttgatggtatcttggagattatctcacccaccatttaaattatgagtaaactagggttcagagacattctgtgatttgaccaccatcaaacagcaagttagcaacaccaagagacattgaaacgaaaccttggagccccacaccagtgccttcagctcctgcacacacttggcctcctgacctctgctgtgaggttcctggttagcaaaatggctgtcgttcttttgggaggattaataagaaaatctgtaaattggttttagctctttgcaagagagaaaaaaaaactatgtgcaatttcttctttattgctgttattatgtgaaccagattgaattgctgcatctctgaagagtttcttatgactagtgtgaagtttcccattttaacccaagtcaattttaaattgcccatacaatacacagataactgactgtaataattcagttgccacactcaatacattgtttgaaatccaatgaaaggcaaaaggaaaacttgcaatcctacagaatcagcaggatagatcctgcaagctgtcacaggacttattttaagtaattaaaaaggagctgtgtgtgtagtaacaagatcagtgggtctcctctgcatggctacaatacaaggataggagctgcaattctctgggcctggggttttttaaatctgtaaaacaagatgaataagctagaacacttctttcagaattaagcctctctcatttctgtctgtattttaatttttgtcatccctccaccaacatttctaaaatagttcaaaacaaactataaagaatatttcacggatcatagttccaggtttttttaaaatcataaataaatttatggctcaatttcaggttccttatcagtaaaatagaggagcgttggtgtaaatattctaaactcagctctgtgcttcagtgggcttttcactacctttagttagttgcactaggctggttgctgtttaccttgcatggttgactgctctcttctcacattgtgtgccaggaagggcactgcaccttggtataaatgctgctgggcaccgttctgttttctttcttttcttaatcctatccaagtatgcagtacgctcttgggtcgtct

SEQ ID NO: 31037 - DNA, 2300 bp, Homo sapien
gattggggacccctgccttatggcatcttttagtacagccatgcctattgccttgaatcggtgaaaaactacaacaacccagttcaggcaggataatggcccagatccttcaggaatgagatttgggtcaccccaccaggcaaagagccaagataaacttaggtgcttgctgaggccaaaatgaaaatggaatatgtaatgtgtagtggaagaaggtagcaacaaataccagttatgatcatatggccggttgtagaaatgagaattgtgatagttattggtactgttttctcattttgttatgaatacatttgcatatattttaaccaaatatatttgttttcttcccactcttattctcttatcatctaacataatatagatgttacagttttaattacagttcactttacatcagttaactttacatcagtatacttacagtttaattacagttgactttacatcagtatacttaagttgcaagatattaagaataagagtgaatgtcacccaaggatttgtgaaataattagtattctgggaaataattagcatatttgtattctacacaggatacttgtaacatgttaagtggaagtatgactttgttactgtctttatttggagattacgtatcgtttaaagaggtatgtatgagtgccaaattgacaagcagtggacttgtgatgatcagttttatgtgtcaacttgaccaggatatggtcccagttattcaatcaaatactaaatctaagtgtcatgtgaaagtattttgtagacatgattagcatctatgatcaattgactctaaataaagaagattatactagataatctgagtgggctcatttctatcagttgaattctgcctgtggcctgagagttccagtttgcccttcctgatagactgccctaaggtatacagatacatataggtatacatttgcctacacatgactatctctgcaaaatgcacaaggaacttatattgttgattgccttctaggagggtacttagtggctggaagttgggggatgcaaagctacttgtcacatatatcctttagtagcattcagttttgaactattgactatattacctattcaaagagttttaattcctttatttttaagaaatgtaattctccaaaagaattggattctaattctcacctattttctcttccatttttcatatactcttacatatgaaaagttcttatctatgtccacctaggtagattgctccaagaaaagtcacttgaaccatacagttttcaaaatgtggactccttcaagctatacatgccttgaaaagttcaatgatcaacataattttaaaagactttgaaattgttccaaataatctatctttgccaaattcacaggctacaagcagaataaaggagaatttcccagctacctatctcatgtatgaaaatattgttcagatccactttgaaatgggcaaaacatcaaagaaacaggtgagtactcaattgcagcccaacaggaagccccattatgctatgttacatatttcatgtttcctgggatttgggggtgtcatttgaagccatgtaacttgatggtgatgcattgcctaggaccaatttttgcagcgtgaaaaggcagatgttgttataaaaaatatatacacaatttccatagcagatatcatctccaattgggatccttaccataacagataaaactggcgggaactagctctcaatcaataaaacgacaggaaataaaaagccaacatacaaatgatacagagggagactgagaaacagcccatcaccagcatgatactgaaggttaagactgagtttatctactgactgtttgcttcctttggcattaattttactgtaagcagaaatgccatgtctgtgaattataggatggaaaatacggcactgaagaaactagcttctgatgcttccagaagaaaataaaaataacagctcctttattagtaagcacagtaaagtttaaaaaaaaaagaaaagaaaaagctaggcattgctggcacatacctgtagtctcagctactcaggaggctaaggtggggaggtcgctcaagcccaggaattcaaagctgcaatgcattatgattacagctgttaatagccactgcacttcagcctgggcaatgtagtaagatcccatctctaaaaaataaaacaaaataagatctagagagctcagttctttcaaagctctttgagaacaaagtctgtggaaaaccgtgataactgcagccaactatcaagccactgcacaatcat

SEQ ID NO: 31038 - DNA, 2300 bp, Homo sapien
tgatttggggtggagagttctgtagatgtctattaggtctgcttggtgcagagctgagttcaattcctgggtatccttgttgactttctgcctcgttgatctgtctaatgttgacagtggggtattaaagtctcccattattaatgcgtgggagtctaagtctctttgtaggtcactcaggacttgctttatgaatctgggtgctcctgtattgggtgcatatatatttaggatagttagctcttcttgttgcattgatccctttaccattatgtaatggccttctttgtctcttttgatctttgttggtttaaagtctgttttatcagagactaggattgcaacccctgcctttttttgttttccatttttttggtagatcttcctccatccttttattttgagcctatgtgtgtctctgcacgtgagatgggtttcctgaatacagcacactgatgggtcttgactctttatccaatttgccagtctgtgtcttttaattggagcatttagtccatttacatttaaagttaatattgttatgtgtgactttgatcctgtcattatgatgttagctggttattttgctcattagttgatgcagtttcttcctagtcttgatggtctttacattttggcatgattttgcagcggctggtattggttgttcctttccatgtttagcgcttccttcaggagctcttttagggcaggcctggtggtgacaaaatctctcagcatttgcttgtctgtaaagtattttatttctccttcacttatgaagcttagtttggctggatatgaaattctgggttgaaaattcttgtctttaagaatgttgaatattggcccccactctcttctggcttgtagagtttctgccgagagatccactgttagtctgatgggcttccctttgagggtaacccgacctttctgtctggctgcccttaacattttttccttcatttcaactttggtgaatctgacaattatgtgtcttggagttgctcttctcgaggagtatctttgtggtgttctctgtatttcctgaatctgaatgttggcctgccttgctagattggggaagttctcctggataatatcctgcagagtgttttccaacttggttccattctccccatcactttcaggtacaccaatcagacgcagatttggtcttttcacatagtcccatatttcttggaggctttgctcatttctttttattcttttttctctaaacttcccttctcacttcatttcattcatttcatcttccatcgctgatacgctttcttccagttgatcgcatcggctcctgaggcttctgcattcttcacgtagttctcgagccttggttttcagctccatcagctcctttaagcacttctctgtattggttattctagttatacattcttctaaattttttcaaagttttcaacttctttgcctttggtttgaatgtcctcccgtagctcagagtaatttgatcgtctgaagccttcttctctcagcttgtcaaagtcattctccatccagctttgttctgttgctggtgaggaactgcgttcctttggaggaggagaggtgctctgctttttagagtttccagtttttctgttctgttttttccccatctttgtggttttatctacttttggtctttgatgatggtgatgtacagatgggtttttggtgtggatgtcctttctgtttgttagttttccttctaacagacaggaccctcagctgcaggtctgttggaataccctgctgtgtgaggtgtcagtgtgcccctgctggggggtgcttcccagttaggctgctcaggggtcaggggtcagggacccacttgaggaggcagtctgcccgttctcagatctccagctgcgtgctgggagaaccactgctctcttcaaagctgtcagacagggacatttaagtctgcagaggttactgctgtctttttgtttgtctgtgccctgcccccagaggtggagcctacagaggcaggcaggcctccttgagctgtggtgggctccgcccagttggagcttcctggctgctttgtttacctaatcaagcctgggcaatggcgggcgcccctccccccgcctcgctgccgccttgcagtttgatctcagactgctgtgctagcaatcagcgagactccgtgggcgtaggaccctccgagccaggtgagggatataatctcgtggtgcgccgtttcttaagcccgtcggaaaagcgcagtattcgggtgggagtgacccgattttccaggtgcgtccgtc

SEQ ID NO: 31039 - DNA, 2300 bp, Homo sapien
cagcagagatttcagtttcccagggcttaaccagaaccgccacctcaatgcattgtcagtaggatacattattagaaactgttagggtctttcccaggacatttttttttctgtatcatgtctccccatcattgaagcgcaaattttcttgaattcaaatactcccaatgagcttgtatacttccaaacagctaaacttgatttccagttgtggatttcacacatataattgccgccttcttccctcctcttttttcccccctagttgaatcagcttgtctaacaagcccattttcatgccccagctgtgctgtgggttttccaagcctcatatttgaatattcaatgagtttaagatggatatgatttcaaaaaatagggccgggcgcggtggctcacgcctgtaatcccagcactttgggaggccgaagcaggcggatcacgaggtcaggaggtcgagatcatcctggctaacacagtgaaaccccatctctactaaaaatacaaaacattagccgggcgtggtggtgggtgcctgtagtcccagctactctggaggctgaggcaggagaatggcgtgaacccgggaggcggagcttgcagtgagccgagatcgcgccactgcactccagcctgggtgacagagcgagactccgtctcaaaaaaaaaaaaaaaaaaaaaaaaaaaatatatatatatatagatatattttccagcagtttttaggaaacaaaggtgtgtttgattttccaatttagagttacttcattgatagtaacatgcgcttatatcatgatctaaaccataagttcagattgcttgatattttgttttgccagacttttttgataatctgattcttacggtttacttacattttcctctgtcttgccagtctggtggccatcctgaaaaatatcaccacctgctgttttatacacagaggaattttttaaaaagcaaataaagtttcactatcttcgtttccagtagaaatatacacgaactatggttttattctttgtaattcggctttcttgaagatactaacaagtatatgatagatcactttggcatctgataattatatcagtattattatttttgtttttttgcgtttaaaataagaagttgtatgaacccaggaggtggaggttgcagtcagccaagaatcgtgccactgcactccagtctgggcgacagagcaatactccgtctccaaaaaaaaaaaaaaagaagctataatatatatctagattaactaatggagtgctctgtgaatattcattaactacattttatctatttactatattttatatgggtaagaccagtggtcatccgtatttcttttgaaagcccacttgatcaggaagtttatattttaagcagtatgtttgcacaatggtcagttcacatttgattgcttgtattactaattagaggtaaaacttctattttttcttgataattctgtaggcaaaaaaaattggggaaggcaaattacaatcattcttcttctgtaatactttgggacaatttttaaacaactcagacccatgtttaaaaacgagttttgtgtgattaacccttgtatagtatccagttactgtcttctcttgaagtggtggttctttgagaagtagaattattttgtaacttttcttctcccagaaacagaagaatcaaatactattctgttaggattctatctagacctgtgactcttagtataataacccttttattattattattattattattttttcagtaatctataaagtagagttgcttagttttgagcaatttagggcttttcttattggccagtaggttattcattttgctgctaaatataattttttggttaattttaacattatagtgctggccgcttggttctatgattacctaaaaatctagtttttttcctccataggtagatgtgtgtgtatgcatacccccacacacacacgtacatatatgttgtcatagagaggtatttcaacccttatttcaaataacagtagaagatacgaacatgaatttatattttgtaaaaatgtcattcatccactttgttttccattggaaatagttttataagaagggttccccttgctctctccacttaacaatttcattatatacgtagaaaaagcagccgacttaagggcttgatgttttttcaggccttgtggattcaggtttccagtttcccagtgcccttaatggatgttatgaatgcataagcacattttcttttaaagaaagaagttagatttatagtgttattt

SEQ ID NO: 31040 - DNA, 2300 bp, Homo sapien
actactgtcactgccatgagcttcaaatatctattacacaagcatcagatttgccttttctttctccccgaggcagggaaggaaatgccctagctgtctgagaagagtatgtgagcagagaacatggaattgttcagattttcatcctgatggacaagaacacatcaaactatcaaacataaaacttgaaaactccaagacatttatccttcctggactcaaggtatttacagggcagaggaaatatctcttaagtaattataatgtgggacaacaaatagtgtgtcatcaaggtgtgcggagaaaagtgctgtgggacctcatgaaagaagaggcctggaaggacaggtaggatttgacaattcaaggggaggggagagaaagcattttgtattcaagatgcagacagagctaaattacagaggcaggaaatgaaggggcatggatgggggtgtgagtgaaatgatgaggggagactggtggaaggtcagatcggaaaggctccgcaaggcctacttgtggtcctagataaggagtgtggactgtgaagttctaagactggctaaagaccatatagaaaaggggctggagagtggattttagcagcatttattattttagaaacaatatagccctttaaaatagtgacacataaagtaaatgtacctatacagctggaaaaacaattcaggtgatggattactctccccaaatggctggtgtacactgtgtgtatatgtttgtacttcatattcattgtacttatgaagtcttttatggtttgttgttgttggtattggattggtgcatttttcagccaaagaaacagccttgatttcctgcagttgtttccctactaatagggcacatcttactatacttagatctccttggcattttaattcgtgttttaaaaaataaccacacaataatgcaaatgtacttaatgccactgaactgtactttttttttttttttttttgagacggagtctcgctctgtcacccaggctggagtgcagcggcgcgatctcggctcactgcaagctccgcctcccgggttcacgccattctcctgcctcagcctcccgagtagctgggactacaggcgcccaccaccacgcctggctaatatttttgtatttttagtagagattgggtttcaccgtgttagccaggatggtctcgatctcctgaccccgtgatccacccgcctcggcctcccaaagtgttgggattacaggcgtgagccaccgcgcccggcctgtactcttaaagtagtatatttgttatcgtttgccacacacaaaaataataccccagcagatcttcatacgagttaatttacgctataagtttagagccggaatttcctcagctcatcactcagtgttaacattgaagatgtccaggttggttatgaaggatgtgacatcctagcgttggccactcttttcctggtccttcctgtcttgcaggtgagcctctgggggtcaggagaaagtctcctctatctcctgctcactttcgtgtaggggagggaaggtgtgtgtgtgggtgggtgggggcgttttgtgtgagggaggccgatactgggcaggcagccacgctcttcttcctccatcctggggcggaagtggggagagcagcagtttaaaggttctgttgcagcagtttaaaggatccactcagccgccttaaccgccaaccagcaggctaagggaggaacagaatgaacaatgtttggatcccaatgactggagatgaaagttgcaaaagctctgcccaggcttctaccaaggattaactttccagggcatctgctgaactgctcttcggggctgtctgctgagattggcggcgggaccctcccgcctctcactcgtgcctttgttccccacgccggcctaaccccgcgcccctgcgctcgcggccagggcacctgacccacgcgccgcccgccggggatgcgggagccgccactgctaccgctgccaccgctgccgggcctgctccgccaagcacatgcgcagtggcgacgccgagccggcgccctcagtctcctcctccaccgcctcccggttccgcagtcacttcctgcagctgtttccctgtgggtcgggttggactgacttttgacagtcagccttcggctgcggagggggctcggcggcggccggcggagaaagttgctccgagaagaggctgggtcgagctgggccgagccgggcgcgcagggcgggcgtcgcgggcgtcccgggcggacgcggcgcggagactgccggcgcgtcccgggggttc

SEQ ID NO: 31041 - DNA, 2300 bp, Homo sapien
atttttaaaaatcacaaataggccaggtgcggtggcttacgcctgtaatcctagcactctgggaagtcgaggggggtggatcacctgaagtcagaagtttgagaccagcctgaccaacatggtgaaaccccgtctctactaagaaatacaaaaattagctggcatgttggctggtgcctgtaatcccagctactcgggaggctgaggcagaagaatcgcttgaacccgggaggcagaggctgcagtgagccgagactgcaccgctgaactccagcctgggctacagagtgagactctggctcaaaaaaataataataataaataaataataaattttataaggaaaaatatccctagtatatttttccccaccaaggtctacctattaatatctcatataactctgtgcttgaaacacaatttgggatatattgccttaaaatttactttgactagcaattcagtgttccttttttaaaaaaatctgtactctggagtaacagtgttctaaaactgttgaagaacattggttcgagaaaaacatttagaaacacaaacccctggaatgtgagatgaaaatccgagctaaagggagaaaaaggacgaaagaaagaaaacacagaaaagaaagaaatacagtcaagtgaaactacgaccacaaagaggaacagatccatctcatttaccattggggtatggacggacgtgcggtgttcgagaagactgttattggtcagagttttgctctagaggacaagtaggactgtaacatctctaggatgggtcacttcccaagccctctattacttaaaaattcaaggaggaaccgatgctggagtacttgtatctcagacttctaatcactgctcctacgcttttccaatattacaacaaaagaccagtagggggagaaaaacgcacagtaccgaacccttatcagtagtaatctcaaaagtcaacagattgatttactctcaagcaaacagacttctaaggtacgcagcaccaagacactaccttgaatcaaatctatagcctatatgacatttctgaagtctctgttggcattacgcgaaaaatcccccacgtcttctgaatagttagaattgaatcctacaagctgcttcgaatcagaattcgatttaaaaaaaaaaatgagggcatagcaaaaggtctccacgaagtgagtcaaaggactgcagagggctgtgacagtgcattccgccttcgggatggtatacaacttaaaccatgtcggcagaagaacgcacagcaacgctttgtaaaaagcattctttctattatagaatccataaccacgctggttagccactgacagcggcggttagccaccgcacctcctctcacccccgaactaatctcgtttcctctatgggtgtaaaagtgaaataacccacttgctcccaatattcctttctatatctctaccccagctcgcctgctgctcgtagaaacaaatatactacacgtacgctgtcctaggatgacacaacaccctcactactgcagaagacggatcattaaacaaacgtcagaagagcagccccaactgtacataaacttcgggcggaaaagcaagacgcaggcgcagtagcacatattgttaccctatttgcccactccctgctcctcctcgcctcaatttcgcttccgcttctttgcgcatctgcttccgggggattgtaggctctgcccctcctcagctcttaccctcttctgccggaggagggggggggccgagggggtggggaagagttcgttgtttgtttacacgatgtgagcggaaaaagagaccaataaagtttattctggaaacaaaaggaaaaaaaaacaggggcgacggagaaaggagtcgggggcgggggcgtgtggcgggggctagcgaggagagggagcgagaagtagaaagcggcagttccggtgccgccgctgcggccgctgaggtgtcgggctgctgctgccgcggccgctgggactggggctggggccgccggcgaggcagggctcgggcccggccgggcagctccggagcggcgggggagaggggccgggaggcgggggccgtgccgcccgctctcctctccctcggcgccgccgccgccgcccgcggggctgggacccgatgcggttagagccgcggagcctggaagagccccgagcgtgagtagagcgcggactggccggtagcgggtgcggtgggaatggggaccgggtgggtgccggagactcccgggcgcgcccgccgtgttgggcggaggctacgggctggtcgtctccca

SEQ ID NO: 31042 - DNA, 2300 bp, Homo sapien
tggagatctatgctgtcaatcggacctcagtgcttcagttaaaaggaaaaaaaaaaaacaccaaaaacttaaaacctgaatacaaagacacgttaaattgttaagactgtagttgctttgaaagcaaagtgttttgatttatccaaactaacttagcaacacggtattttgagtattttccagaagttttcttaaaacacgcaatccagcacataaacaaattttgtacggtgcaatgtaagcaaatactcagaaaaattcaatttctaagcaggataacatatgaccaatattgccctcagtggttcaaaagtcgcagtagaaataatcccctgagataacctggaatttacctacccaagtattctaaggggttctccccggccacacaaactatgattcaaaacatcgttccgaaaacccaggtcctgcatgtgcacaaaggcgcagtgctggaatgaggaagcttcaccaagatgaaatcacaactctaattcattaaagaatatgcagactgttttctagaaagaccctcttgttgcgctccctttaccctaccctttatttaaccatgtaaacagtctcaattattgacataaaaaaatagctttcgattcccaagtctggtaacacggttggccaccatcactattcctttagcatcctaaaataaacccctcgagccgaggtcaaaaacacgccggctgaacgtctggtgtttacatagcccaatcccgggccctaccctacctttccgagccacttaagagccatggaacaggcatcacataatacacttagtaaagagacaagtcacatgagtcagtgtctcaggtctatgaatgaaagatctaagcgtttgtctcagctaaaaggaaaaaacaacctcgaaaggaagggtgggaggggagctggcgggggtgaggggagcggtgttccttccatacccctgccgggcgatttaaacccagtaagaggcaaacgcagggccgccaggctggcggggccggagtcctcgggcgtgacagcccctcaagaaaagctcgcggtttcgcgcccgcgtcccttgagccgcagtcctcgcggcagcccctccacccgcgggctgggtgggcgtgcagggcgcgggagacagagccaccgcggccggggcggcggccctgggcgcacttcctcaacctccagccgccccgtccccaaaactgggagtagaagcaaaggaagagcgaggcggcagccagagagaaaggagagggagcggcgagccctcgcctctgcagctaggagaggccagaggcaggcgagggagagggtgcggcgatcgcaggcgaactccgccgcgggccgacgctgggagacgaccagcccgtagcctccgcccaacacggcgggcgcgcccgggagtctccggcacccacccggtccccattcccaccgcacccgctaccggccagtccgcgctctactcacgctcggggctcttccaggctccgcggctctaaccgcatcgggtcccagccccgcgggcggcggcggcggcgccgagggagaggagagcgggcggcacggcccccgcctcccggcccctctcccccgccgctccggagctgcccggccgggcccgagccctgcctcgccggcggccccagccccagtcccagcggccgcggcagcagcagcccgacacctcagcggccgcagcggcggcaccggaactgccgctttctacttctcgctccctctcctcgctagcccccgccacacgcccccgcccccgactcctttctccgtcgcccctgtttttttttccttttgtttccagaataaactttattggtctctttttccgctcacatcgtgtaaacaaacaacgaactcttccccaccccctcggccccccccctcctccggcagaagagggtaagagctgaggaggggcagagcctacaatcccccggaagcagatgcgcaaagaagcggaagcgaaattgaggcgaggaggagcagggagtgggcaaatagggtaacaatatgtgctactgcgcctgcgtcttgcttttccgcccgaagtttatgtacagttggggctgctcttctgacgtttgtttaatgatccgtcttctgcagtagtgagggtgttgtgtcatcctaggacagcgtacgtgtagtatatttgtttctacgagcagcaggcgagctggggtagagatatagaaaggaatattgggagcaagtgggttatttcacttttacacccatagaggaaacgagattagttcgggggtgagaggaggtgcggt

SEQ ID NO: 31043 - DNA, 2300 bp, Homo sapien
tttggccagaagttttagttgtctgtagttagagtgggtgtctagtgtaccataccactgaaacagaagcctgttacttttacaataataaaaacatatctatgtgggctttttaaaaaaatttttaaatttatttatttacttttttttttgagatggagtctcactctgtcgcccaggctggagtgcagtggcatgatcttggctcactgcaacctctgccacccgggttcaagcgattttcctgcctcagcctcctgagaagctgtgattacaggcgcatgccaccgtgcctggctaaattttgtatttttaggagagacagggtttcaccatgttggtcaggctggtctcaaactcctgagctcaggtgatctgcccaccttggcctcccaaagtgctgggattacaagcatgagccactgcacctggccaaacctatctatgttttagttttttatgattattttatattatcccttccccacacatgaaataacttctttccaagtgacttatgaagttgtcaacttttcataaagccttggaacaaagtgggcagaaaaattataaataaaaagtcttgtctaggacagtacaggtctgtcttattcctaaattagatcagaatcgggttatgccggttttttataacataccattataattgggtatgttaaagaatgtattagagatgcattagaagagcgacctcattataagcctcttcacccatggattccaaggatatcttacaataaacctctgggataccttacgctacagagcaactaaagtccagctttagagcacaagggaaaatgcaggatattgggtcctggaaactacaaaaaccatcaaactctactttagggctaaaactttcttttaatcaatctgtcatatttattgataaattagaaaatgtggctgggtgcagtggctcacacctgtaatcctagcagtttgggaggccgaggtgggtggatcacgaggtcaggagatggagaccattctggctaacacagtgaaaccccgtctctactaaaaatacaaaaattagccgggcgtggtggtgggcgcctgtagtcccagctactcaggaggcggaggcaggagaatggcttgaacccgggagacggaggttgcagtgagccgagattgccccactgcactccagcctgggtgacagagggagactccatctcaaaaaaaaaaaaaaaaaagtacaggttcaaatttcattaaattttttttccatgccccttctctggtggtaggatgataggggatgagtaaaatatcaaagacaactaaaaattcctaaactagatcctcgggtcccaaagaagtgttaaccatggagtgccccaccttctgaggttggtgcttcctggcacaggctcttggaacattctggattgtctgacattccttttactcgctttagaacctaaagatgttgctgggggaaaagggagctagggagagggaaggggaaggatgtgggataaggcataaactatgcttgtgggaaaaaaacaaccagtaatttccttgatggggtttttgcttgactttaaaatgcagtaagcttttaggaagcttgatggagcctgtgtttctaccattagtgctgcatttgtttggcttaagatttcattaagcttcttaaaatggagatacttctggaactcaaatggctactgagcagggaatggcaaatcagtgacactgtaggaagtggagggattttggcaaactagagaacacaccttccacaggggcagccactgctctgctgggcccgctgttcatctgcagggacgtgcatcttgggattatttccaaagtcagaactcagcatttttatgagaaatgtcatgatttttaaggtcttaacaagttatcccacattaaaaaaataataataaaccaggccgggtgcagtggctcacgcctgtaatcccaacattttgggaggctgaggtgggtggatcatgaggtcaggcgttcgagaccattatggccaacatggtgaaacactgtctctacttaaaatacaaaaattagctgggcatggtggccggcgcctgtaatcccagctactagggaggctgaggcaggagaatcgcttgaacctgggaggcggaggaggttgcagtgaactgagatcgtacccagcctgggcaacagtgcgaggttccgtctcaaaaaaaaccaaaaaacacaaaaacaaaaaacgacagagaaggccaaacaaaacacatctgtgggctggatgccgccatgcccaccgg

SEQ ID NO: 31044 - DNA, 2300 bp, Homo sapien
aaacacttatttttaaatttctaataaagctttttaatttttaacattcatgtttgctttttgttacattttgcctataaatttcaccctttttgtatctgtgttttagatgtatcttttgtaaaaacatgcatatagatagttctccatttacagtgggattacatcctgacaaatccatcataagtggaaaatactgtaagttgaaaacttcagagtattagctatttaccctcatgattgtgtggcagactgggaactatggctggctgccactgcccagcatctcaagagagtagggtactgcatatcgctagcccaggaaataatgcaaattcaaaatttgaggtacagtttctactgaattcatattgctttcacaccatagtaatgtaaaaaaattgcaagtgtggggcggggcgggccatggggcgggcggaggcgcccgagccccgcttcccccgcgccattccacccccggccaggctcagcccgcggccacctacgccccgcccctgccggctgcgcccgagcccagtcccgcgagccgctccccggcgggctggctcttggccccggaagcgcgagcgttcacttcgcggcgagtggctccgtctccgcggacagagcgcgcgccccctggcccggcccgcgggggggggctccggcacggtccccgagcgtttcccgccgggtggagcgggccgagcccagcaggttgaccagccccgcggccacgcagagccgggagatctactgtttgagcgcggaagcgcagaggctggcggaggcccggctcgccgcaaaacgggaggcccgcgcggaggctcgtgagatccccatgaaggagctggagcggcagcagaaggaggtagaagagagaccagaaaaatattttactgagaaggggtctcgtaacatgctgggcccgtctgcagccacgctggcctttctgggtgggacttcctctcagagaggcagcggagacacctctatatccatcgacaccgaggcgtccatcagggaaatcaaggactctctagcagaagttgaagagaaatgtaagaaggctatgttttccaatgctcagttagacaatgaaaacacaaacttcatttaccaagttgacaccctgaaagatatgttgctggagattgaagaacagctggctgaatataggcggcagtacgaagagaaaaacaaataatttgaaagggaaaaacacgcccacagtatactgcagtttcagtttgctgaagtcaaggaggccctgaagcaaacagaggaaatgctcgagaaacatggaataatcctaaattcagaaatagttaccaatggagagacttccgacactctcagtaatgtttgataccaagatcctaccaagatgacgaaagaagagttaaatgccctcaagtcgacaggggatgggaccctaggaaagccagtgaggtggaggtgaagaatgaaatcgtggcgaatgtggggaaaagagaaatcttgcacaatactgagaaagaacaacacacagaggacacagtgaaggattgtgtggacatagaggtattcactgctggtgagaataccgaggaccagaaatcctctgaagacactgccccattcctaggaaccttagcaggtgctacctatgaggaacaggttcaaagccaaattcttgagagcgcttctctccctgaaaacacagcacaggttgagtcaaatgaggtcatgggtgcaccagatgacaggaccagaactccccttgagccatccaactgttggagtgacttagatggtgggagccacacagagaatgtgggagaggcagcggtgactcaggttggagagcaggcagacacagtggcctcatgtcctttagggcatagtgatgacacagtttatcatgatgacagatgtatggtagaggtcccccaacagttagagacaagcatagggcatagtttagagaaagaattcaccaaccaggaagcagctgagcccaaggaggttccagtgcagagtacagaagcaggtagggatcacaacgaagaagagggtgaagaaaaaggattaagggatgagaaaccaatcaagacagaagttcctggttctccagcaggaactgagagcaagggtcaggaggcgacaggtccaagtacagtagacactcaaagtgaaccctcagatatgaaagagccagatgaagaaaagaatgaccaacagggagaggcattggactcattgcagaagagaaagaacaagaaaaagaaaaagaagaggaaaaaatccccagtacccat

SEQ ID NO: 31045 - DNA, 2300 bp, Homo sapien
ttcttagccataataggtattgtatatttaattgagagaatgtgaaaaacaatgaggaagtagtttctccagtatggtgaaaggcaaagagggttcttttttttcccctaagtaaagcatctactaaatgcaaaagaaatgattgtggactctggaatctggaatccacgatgctagcactttgcagtaatagcctctttcatatatagatctcacaacagtttgtagacactaagtttttccatgctcctgcaactcacactgagtttttatttactccctttttactctggaaaagcagggcaggaagtttttaaagggttccttgcagttacaaagctagaatttgaacccagtgtcaaagcctctgggtcagattgggagggggcccacgttgtgaacttgacagttaattcatggttgctgttttatggagcaggaagtgacctttagtgactcagaggaaggaataagctgagggagggtccaggagaccagaggtacagtgcctggcatctcttatcactgcattctaagtggcttagccttgctgtgttcctgaatgcacacattgggattgcaactcacaccgaccactttaggttcttcttgagagataggctgtgagtcctgaatggagtgtgtgtgtgtagggggcttggctttcaggccaagagtggagtgagtgtggtacttggtggacagagaggccagttggttatcaagtgaaggggcgttagggaaaaagttcagagggcaaaaagctatgttgctccttctcacttattgtccatgagtattttcttttaaatggaaccggaatcataagataagaatgaccaggaggctctggtaaaggcaggtgcaagttttgtgtgacaagatcctcatggactaaaaaatgatcatatttctgaggttgaatcaaatacataaaagcagcagcaaatcacacacttcttcgaagagagttaccaagttgcaggggaaatttattagcacaaataagtctgaaaaggaaaagctatccatatatacaaggttaagttggaagaaggaggcagaaagaagaaattccagttgttatcattattttttattccaaattgcatctgttcactaaaatacttcggactgggtgcagtggcttacacctataatcccagcactttgggagactaggcgggcagatcacttgaggtcaggcattcgagaccagcctggtcaacatgatgaaaccctgtctttactaaaaatacaaaaattagccagtcgtggtggcacatgcctgtaatcccagctactcgggaggctgaggcaggagaatcgcttgaacctgggaggtggaggttgcagtgagccaagattgagccagtgcactccggcctgggtgacagagggagactccatctcaaaaaaacccaaacaaatattttataaaatagaaatagaaaaataatacaaatgaaaagtctattaagtatatatttttattaagcaatattaaaatgactgcaagtaagagtttatatagctatatgtacatggatatttatagatgagattacgcttacattcttgcccacaccatcttggaaaatgttaagataatatcgccttgactgaaaaacatacagcaaacatggtctctttggcattctgtcatccacatctacaggtgcctgtagcaatgtgtggtactataatataatggtaattgatgttcctaatttgggagtgtggaaagatccccaaatgtcttttaagtcatcagagaaagataaaataatatttgatacagcttttcttaaaatttgagataattttaatggcgagttattttatggccctttgtatcttgaaaaattgggaaatcacatatggtttaaaagcgaattatcttaattggaacatgccattaactagaaaacccattatttcagcttgcactctaacagacaatacgtggaaaaggaaacgcggccagggcaaaacatttcctcttcttataaaccttgaactgagtacgtccctcaccaattatagagggtccccttgggcctcagaactttccacaagcgttgaggtctctatggcgatgctcccggctgccgaggcggaaacacaggtgatgaggtggcggcaagcacagtgcaaagagagagaagcagcttcggctgcagcaaaccacgcaggtccttcttgatcatctagaactgaccgctccgccttgccaggagtctgcagaaccacgtggctagcctgcctgaagttctcacctctccaggaaggcggggggc

SEQ ID NO: 31046 - DNA, 2300 bp, Homo sapien
ggtaaatttacttttgctctttgtacttttctgttgtctccattctgtactaaaaacgtaactattttctaatcaggaagaaattaagtggccgggcgcggtgactcgcgcctgtaatcccagcactttaggaggccaaggcgggcggatcacttgatgccagaagctcaagaccagcctggccaatatggtgaaatctcagcaccactaaatatacaaaaattagccaggtgtggcagctcgcgcctgtaatctcagctaatctgaagggtggggcacgagaattgcttgaatttaggaggtggagattgcagtgagccgatatcccatctctgtactggagcctgggcgacagagtgagaccgtgagaaagaaaaaagaaaaaaaagaaaaggaaggaaggaaaggaaggagaaattaagctattctacaagtgtgtgaaaaagttggaagaacgatgttttaatagccctgaatcaaatttataatagtatttaacaaactctacaatttagcactcttgagattttagggttttatcccagctatcaccctcccttggagcgggagatgaggaaaagagggacccaaaaatgaaactgaaaaacactccagctaatcaagaacttgaaattgcttgcaatttgtgactatgttaaacaacatctaaacaaagtcaagctcctctaagtgcaaacaatacgtgggatgctggggagagtgtgcgtttactttcactacaaaatgttttggagtaaaacttcattttgaaatataaagattttgttggacacaaggctatgtggtaaggcaaaatggtaagatggtggcatgacacccccttgtggtttccaccgattcccggttctgtgctagatactaactattctaggatttaaaaatgtctctacatttcttcgaactttaattcgggccatactagcattcgtgagcatttatttgagctgagtacgcacataaaacttaggaggtcataaaaactgagcctcacaaacaagtagtgtctctttcaaatatagctttatctcctgggggatggtgaagggatcagagtaaagtctgtgattattactttccagcgattgattggttgattggcatgtggttgtcagaaaaagcagtggacgtgaacaaagagacatcattgcagccctaactatccgagtgaccttgggtacctgataatccacatggctctcagtcatcctcttaaccgtttgaacctcaggggtttaggctaccaaaatgaattaagacccagtctttagcttctcacacatttacttttccattttgtaaaatgtgactaaaaacctcaactcattgtcaaaaggactgaattaaacatatcaccacacttgcacagagatcatttatggaaccatgttcacaaatttatttatgctcgtgtaatttaatcatttctacagctgctcaaagaaagtcaaagtcgagaaaggacttaaatcgtcgagtccagtcccccttaactcctcattcattccactatttctcgagccaaggaatcgggtgaaactcaacaacgactcgcagtcttcaggtttcaccctcttgccctgagggcagcatcctagccctaggtggttctctggtgtggcctcagtaaaaccgtgacgaggtcctcggcctctctgtccccaacaggcggctggcacacttcggggtctgagatgccatctgccttgcctaacctgggcaagaccactcgcgtcctttcccttgaggagcagcgtgggaaaggtgccgctgcgcgccacgtttctcccagttccccagggcttgaaggggcggtggaggcgggcgggataaattcgctggccgcctggcgtggagtaatcctagagggtgggatcgccctcggggctcgggaggggctcttccccgcccagaaggagactgcggcggcgcaaggcctccggcagggggcgcgggccgctgggcctcccccggggctgcgggccggtggtccctcccaggccgcgtgtgcggtgcgttcgcgcagcccgctccctgcccccacctcacctcgtcacctccccgccctctcggcgggcccctgaggtgcgcggcgcaggcgcggagcgtggcggccagggcagtgcggccgcggagcctaggccaggggcctggcgctcagggcgtggggcgcgcggggagggagaggggtcggcccagcacagcgtccgggagcgctagggccggagcagcgctgcccgccgccgtgcgtccgcgggaaggaccgcgcggcccctccgcct

SEQ ID NO: 31047 - DNA, 2300 bp, Homo sapien
tttcactacaaaatgttttggagtaaaacttcattttgaaatataaagattttgttggacacaaggctatgtggtaaggcaaaatggtaagatggtggcatgacacccccttgtggtttccaccgattcccggttctgtgctagatactaactattctaggatttaaaaatgtctctacatttcttcgaactttaattcgggccatactagcattcgtgagcatttatttgagctgagtacgcacataaaacttaggaggtcataaaaactgagcctcacaaacaagtagtgtctctttcaaatatagctttatctcctgggggatggtgaagggatcagagtaaagtctgtgattattactttccagcgattgattggttgattggcatgtggttgtcagaaaaagcagtggacgtgaacaaagagacatcattgcagccctaactatccgagtgaccttgggtacctgataatccacatggctctcagtcatcctcttaaccgtttgaacctcaggggtttaggctaccaaaatgaattaagacccagtctttagcttctcacacatttacttttccattttgtaaaatgtgactaaaaacctcaactcattgtcaaaaggactgaattaaacatatcaccacacttgcacagagatcatttatggaaccatgttcacaaatttatttatgctcgtgtaatttaatcatttctacagctgctcaaagaaagtcaaagtcgagaaaggacttaaatcgtcgagtccagtcccccttaactcctcattcattccactatttctcgagccaaggaatcgggtgaaactcaacaacgactcgcagtcttcaggtttcaccctcttgccctgagggcagcatcctagccctaggtggttctctggtgtggcctcagtaaaaccgtgacgaggtcctcggcctctctgtccccaacaggcggctggcacacttcggggtctgagatgccatctgccttgcctaacctgggcaagaccactcgcgtcctttcccttgaggagcagcgtgggaaaggtgccgctgcgcgccacgtttctcccagttccccagggcttgaaggggcggtggaggcgggcgggataaattcgctggccgcctggcgtggagtaatcctagagggtgggatcgccctcggggctcgggaggggctcttccccgcccagaaggagactgcggcggcgcaaggcctccggcagggggcgcgggccgctgggcctcccccggggctgcgggccggtggtccctcccaggccgcgtgtgcggtgcgttcgcgcagcccgctccctgcccccacctcacctcgtcacctccccgccctctcggcgggcccctgaggtgcgcggcgcaggcgcggagcgtggcggccagggcagtgcggccgcggagcctaggccaggggcctggcgctcagggcgtggggcgcgcggggagggagaggggtcggcccagcacagcgtccgggagcgctagggccggagcagcgctgcccgccgccgtgcgtccgcgggaaggaccgcgcggcccctccgcctgcgctctcggccgccgccgcctctgcgtgggccggccgggagggcctcgggggactgactggtgagtgtgagggaggagcgggtgggtcgggcgctggactgctccaggggacgcgggcgtgcgggcgcatcttctaacgggagagggcgggagagaccggagctccctttatacggaaactctgccttcgttatatggcgggatggcgttcccctcccccatcccgaaggcagttccaccccctgcgcaggacgccttggccgggctcccctcggccccctgctgccgttgtctttacggaacctttggtgtcggggcttggaagtctccttggcgccggcttctgggcccgggcgaagctggtgcgtggcgccggggtggaggcggctaagtcccagggacttctgccctgcgcctccgacgggcatttgtctggctgcgtccgggctcgggacgatcctgggtcctcgctggcgctgcggccctgcccggcggcttcgtgacctccggcggcgaatccccgggctcgcgcaacgagttgtagccgcggagagcaggcgtcgatgctggcgcccaaagcctccagcctgagagtcgcctcactcgtgtgacggtgcttagaaacccccttttttggttttgtctttaagtactgtctagggaaacgaatcatttgaagcagtttatgccttttttgtttttttcgaagagaaagatttatgccggactga

SEQ ID NO: 31048 - DNA, 2300 bp, Homo sapien
ggcggccagggcagtgcggccgcggagcctaggccaggggcctggcgctcagggcgtggggcgcgcggggagggagaggggtcggcccagcacagcgtccgggagcgctagggccggagcagcgctgcccgccgccgtgcgtccgcgggaaggaccgcgcggcccctccgcctgcgctctcggccgccgccgcctctgcgtgggccggccgggagggcctcgggggactgactggtgagtgtgagggaggagcgggtgggtcgggcgctggactgctccaggggacgcgggcgtgcgggcgcatcttctaacgggagagggcgggagagaccggagctccctttatacggaaactctgccttcgttatatggcgggatggcgttcccctcccccatcccgaaggcagttccaccccctgcgcaggacgccttggccgggctcccctcggccccctgctgccgttgtctttacggaacctttggtgtcggggcttggaagtctccttggcgccggcttctgggcccgggcgaagctggtgcgtggcgccggggtggaggcggctaagtcccagggacttctgccctgcgcctccgacgggcatttgtctggctgcgtccgggctcgggacgatcctgggtcctcgctggcgctgcggccctgcccggcggcttcgtgacctccggcggcgaatccccgggctcgcgcaacgagttgtagccgcggagagcaggcgtcgatgctggcgcccaaagcctccagcctgagagtcgcctcactcgtgtgacggtgcttagaaacccccttttttggttttgtctttaagtactgtctagggaaacgaatcatttgaagcagtttatgccttttttgtttttttcgaagagaaagatttatgccggactgaaaaatagcgaatcaagtatttagtgaccgtgtgatattgcagtaaagactgcctccacgttggacatgtagtggattctagttcaggctctcctgcaacatgtttttgtttcaattcttttacaatttaaagcatatgcttattttaatgagaacgaaaaagaaagcttaactctttttaaactcgttaaaaatggagttatttactgtaaagacgtcttacagcaattaggaagaatatacattgcatgaaaggccttttgaaacgtttatctatttgatgattgctgactgcctgttgtatgtattctattttgtgcatagactttcttgttggttgaaaaaaatgacaggtggaaagatgttggtttctaggtgatataaaaaatttttaaacatttttctgatttttctgcagtgacacgtgttacatatgtcgtttgtatttcagagggaggggggactgtgataggttgcttgtgattcagaatcttcctgctaagaagactagtgagcaaatgtttatgacatccttgagtagaaagctaagttttttcaaggctgttatgcacacaaaaggcacataaaaatgattgctaaaatgaaggatggttagcatttttggtcttgagtaggcatcaccattgtgctgaaaggaagtccgatagacatttggttatcgttcggccctaagtaggagtcagacccttcctgatccgtgtgcctcctcctctcacctaacagcctgaatccaggccagcttgcaacgttgattttaataccacgcttggtttccttttcttacttttattcttcaagttgcaaagaacttgagatgcattctgaaataacaagagactacttaacatgttcggctgagtgttttcagtgttctccctgatacttttagagtatttagaacatgaagtgtgaagctttgggctatatgaatcgtaatagctcttctctttttgatttttgaatgcagtgaattgagatggttactcaaggaatgattgtttacattgttaggtgaggcgtttgattttattcttttttctttctttctttcttttttagacagagtttcactcctgttacccaggctggaggacaatgatgtgatctcgggtcaccacaacctccgcctcccggattcaagcgattctcatgcctcagcctcccgagtagctcagattacaggcatgtgccaccacgcccggctaattttgtattttcagtcgagacggggtttccccatgttggtcaggctagtcttgaattcccgacctcaggtgatctgttcgcctcggcctcccaaagtgctgggattacaggcgtgaaccactgcacccggcgaggtgaggtattttatatattggtatcatttctgtac

SEQ ID NO: 31049 - DNA, 2300 bp, Homo sapien
aggcacctgccaccacgcctggctaatttttgtgttttttattagagacaaggtttcaccatattggacaggctggtctcgaactcctgacctcatgatccacacgcctcatgatccaaactgctgggattacaggcgtgagccatcgcacccggcaagattaatcttttcgttaaacatgtaatagaaagttaccccgaaaatcatctagacctggctagttttgaatatgtgggaaacttagcctattcgagttttctattttttctcggtctaattttggtatttgatgttttcccagattttatacttcatctaagcttttcaatttgttggcatttatatatatatctatagttattctccccttaatttgtgtcctttcattttttatgttcttgaacagatttggcagtgatacatcaaattgataatttctttcaaataacgttagtttttgttaatatctatgttggttttagcgtttatattttaattcttttccttctttgtgtttactctcctggctttttggtaatatgtgtgttccacacacacacaaaagcaatggattaaatttcttattacttactatattaaacatttaattaccgtgctataatttatagcctgtaatatgtcactcttgctttaaaatgcagtaattatattaaatataattattaagtacagaactaataaaaggataccatcatgatttttaaaattcaaacagagtaaatgttccctttgagactacctatgctcagaactgatggattagctggcacgacccagaccgataaactggctcatctgacctagtgtcccccaacccaggaactgactcgtgcagaaagacagcttccactccctgcgatttcatccctgaccaatcagcactcctggctcagtggcctcccccaacccaccaaattgtccttaaaaattctgctccccagtgctgctcggggagactgatttcagtaataataaaactccagtctcccatacagccggctttgcgtgactaagtctttatttgcaatccccctgtcttgtatcagttctggctagtcagcgggcaaggtgaaggctttccttgggcggttaccatccgaagctttaattttaagtataatggcaagctgttggaaagcttttttttttttttttttttttttttttttttttttgagatggagtctggctctgtcgcccaggctggagtgcagtggcgcgatctcggctcactgtaacctccgcctcccgggttcaagcaattctctgcctcaggctcctgagtagctggaactacaggcgcccgccaccaccacgcccggctacttcttgtatttttagtagagacgggcgttcaccgtgttagccaggatgctcccgatctcctgaccttgtgatccgcccgcctcggcctcccaaagtgctgggattacaggcgtgagccaccccgcccggcctggaaagctttttaagttcggaaagtaatacgatctggatttcttttcttttatttatttatttatttatttgaaaaaatgtctcgctctcttgcccaggctggagtgcagtggcacgataaatcacagttcgctgcagccccgggcccaaacaatccccccgcctcagtctccgaagtagctgggaccacaggtgtgtgccaccacgcctcgctaagtttttaaaatttttttaatttttcattttttaattttgtagagacggggaggaggaagagggtcgggggcgggggggggggcgcctccctatgttgcccagcctagtctcgaactcctgggcttaagagatatcccaccccttcggtctcccaaagtgctgggattataggcgtcagccaccaccatcattggaagctagctaagcctaggctgggcagatacttggacactttgaggggagaagggaggggaagaagttggaagggggaacggaaaaccactctcctggtagcagtctctgcccacaacaaaccttgccttctgcccttaaggaaaatggcgcctggcatagatgcgcttccggccacggagccaaacagaacagaggaggcaagaggccggaagtgaccgccctttgccactccccctgcctcctctccgcctttaacttctcgggaagatgaggcagtttggcatctgtggccgagttgctgttgccgggtgatagttggagcggagactgtgagtgccggctgcctcgacagcacgtttgcgacgctcggagtgaccttcgagcgactggggaccgggggcgggagtcgt

SEQ ID NO: 31050 - DNA, 2300 bp, Homo sapien
tgttacatttggagagaagtgtgaaatctaaccaatcgctagcacatatttgttgtaatacggtggtttatttcatgtttgcatactataaaatctgaattgatgtgaaatatctgtgcctttaaatttcttaaacctttaagctttttgttctgttttgcaacattttgtagtatttcttcccttccttagcacaaaatactggtttctaagtggttttgcttcaaaggatgtctagatgtaagtgattccacttaaagccaaaataaaaattcctaaagcagttcttaaaggagttagagagctatattaaacagtttttctgtggtataataatgtgtctcttactagaagtcccccacgaccaagttaaagatacttttcctgttggattctcttttacaaataagtctaaatgactgataatagaagattgttagtcttgcttgatggtaaagtcttggattattctgatatatagacgtgcattgttttgtaacttagttacttttcagataggtctgtgttaacttttgaacatgtgtaacttaacctaaatactcccaaactttacctctaaatttttgtttttatgttgtgaatgtgctaatatgtgcatcaactgtaaagatgtatcagttttattaaaatcagttgacaattagaataataaagtggataaaggcaaattaagatataggaccaaaacagaatattgtagatggcagttatgaatgtatatttatattttgattaagatttctattaactttttggctgggcagagtggcttacacctataatcccagcaatttgggaggccaaggtgggcagatcacttgaggtcaggagttcgcgaccagcctacccaacatggtgaaaccccatctcttctaaaaatacaaacattagccgggcgtggtggcacattcctgtaatcccagctactcgggaggctgaggcaggagattcgcctgaacccgggaggcagaggttgcagtgagccgagattgtgccactgcactccagcctaggcgacagagtgagactccatctcaaattggaaaaaaaaaaaattatatgaacttttgctattaatgtttatttgtaggctatttatatcacttcataaagaacagttctttgagaaaagaataaaggaatgtattcatttccagaaaaagagggttggggaaagtttgccatgtaggttagtcagaagaaagcaattctattatgcataaaaataaccttaaatatgtaagagagtatctcctctacttaaaagttattatagtagtcacaggcatacagaccacaggaattctatggtcttaacatattttaaaattacatttattttaatgttcttaaagtttatgaagaggagtttaaagcaattcccataattaaatatttactcggcaactaaaaactatttaacacttgtggttaattatacacataaacaaatggcgacagagtagcctcactaccacaattacttcatggttacacctttgctttctaataataggggctccagttgctaaatatatttgtttacttacagtttaagttgagctgattgttgaattctgttattgttcctgaattcaatgagtatataatttgtagagatgttgaatagtttggatcttagtttttaaggctgaaaaatctggctggatttagtttttaaaaatttgcatcatcaagaatattgcagttaatgttcctttttttttttttttaaagacagagtctcactctgtcacccaggctggagtgtacagtggtgtgattttggctcattgcaacctcaacctctgcctcctgggttcaagcaattcttgtgcctcagcctcccaagtagctgggactataggcatgtgccaccatgcccggctaatttttgtatttttagtagagatggggtttcaccatcttggccagtctgatctcgtactcctggcctcaagtgatccaccagcctcagcctcccaaagtgctgggattacagacgtgagccaccgtgcccagccaggtttccttctttaccttctaagaaacatttaaacataatgtgcctgagaaggttaatttgttgactctgtagcatgtcaagaagagtagttttttgagatctggcaagaatattttagagatacatattcttttctaagtatgttatcaccctgtggtgttgagcatatcgtcccaaaaacctgcttcagcaagcagttcttggccaggcatggtggctcacacctgtaatcccagcactttgggaggccgag

SEQ ID NO: 31051 - DNA, 2300 bp, Homo sapien
taaactctttaaaagacagtcaaattcttgttacatcttttcaggttttgtattttatgtttaggagctgttcatttatatttcccctcatcttttctggaatagactatctcattgcttcccactgtgttttcctaaataccagcaacttgtttttcaacaaataatcttaacccaacaaccagctctcaaagctttataacatctggtaaatgctagtgcacaggaacaaggcagaaaagaatctaaagaaagaatatggggccgggatcggtggctcacgcctgtaattccagcactttgggaggccgaggtgggcggatcacctgaggtcagcagattgagaccagcctggtcaacacggtgaaaccccgtgtctactaaaaatacaaaaaatcagccgggcgtggtggcttgtgcctgtaatcccagacttgggaggctgagacacgagaatcgcttgaatcctggaggtggaggttgcagtgagctgacatcacatcactgcacagtgactccgtctcaaaacaaaaaaacaaacaaaaaaaagaaagaatgtgggctttggagttgatccaatctgatgtcatgcagggctctaccaataccttcgtgactccgataaattaatcttaccagggcatcagtttgcttatctgtaaaatggggataaaattcacacttcaaggtaattatgaggattaagtacagtataagaaagcagagagcatggtccgtaataggcactctttaacaatttccctttgcttcctccgaaaaacgacaatcataaaactcaggatttaatcattaaaacataaatagttacagatgcaaaacactcatgtcccaacgagctcttctgacactttgatatgcagaatatttggcatttctttcttcttaatggaaaaatgctcctaatattagtaaaaatgaaaattttgggggaaaaattatccacagtttctttatctgtggataaagaaaatagaaacagctgcttctatttttgtcacggcctggcttttatacaaaacggtcacattttccccacagtcacaaacagggtgtgtttatcatggcatcacctctttcaagggactaatagatttattccaggtgatagtgggaagcagctacagaaggaggattggaaggctgaggggttgttaaagttatctgatgatattgttcgaacatttctccggcacagaaactccacaaagaactcctctgcagttttcgctacccagggctgtttctttaaattgtttgacgtcagagaaggaatgctatagcaacagtctgtcaaactggaattaactcagaagaaaaatgggggtggggagaggaaaaatgctcccaggcggtactgacttcagaggaagcaaattggatagatgcatttattttatgacattttaaacataaaacacccagataaatgtgaaaaaaaaaaaaactcgattgagatgcatgtggtgtttaactcatgcagagaagagcgacttggcagggatatctggaaggccttccagttttatcaatgacaataggaacaataacttccaagtattggccatttatttggaggcaggcttcgtgcaaacatcacttcatttaatatgcttagcacctttatgaggcaggtatcagtatctttattttggcgatgacgaaacttaggcccgagacggtacacggtcctacaactagtgatggaagagcggggactgcaacgcaaggttgtgcaactctgggcttcagtttactttctgacatttagaattccagaatgggaaacctaaatggggcctttggggtcttctagctctgcccttcgatcctgctaacaagcaaactggcgcctgtcagcgccggaaaggaaactggccacgccacttagacgggcgctacttagcagcgtgccccggcgccacaccaacaagaaaacgaaactgcccgggaatgaatgtttttcttctccttctggcaggaaacgagagagaaaataggaagcagaagctgcgcgcggcgcccgctcccttcgccccccgcccgggctgcgcgcgctccgagggtctgcgcgtccccggcacgtccccgccgggcccgcgcgcctcgtgcctcgcgcctcgcgcctccagccacgtccccgccccggctccggcgcgccgcggagttggctgctgggaggtgcgggactgggtgtggccggcggctctggtctcggctgtgagctgcgctctccacgccggctccgcgctccaggggctgctgagcgcccagcggacacc

SEQ ID NO: 31052 - DNA, 2300 bp, Homo sapien
aagggtccagtaataaatgtattctccagctgagtgggacacatagtctctgtctcccaactactcaactctacccttacagagcaaaatagtcataaatgagtaagtgtgggctgtgtcctaataaaacttagtttaaggtcactgaagtgtgaatttcacatagttttcacatctctctccttctttcttttgttttctttttttctttttttttttttttttcagggacttgctttgtcacccaggctggagtgcagtggggagatcacgactcactgaagctttgaactcccaggctcaagcaatcctctcaccctagcctccagagtagctagggggcatgcaccaccatacccagataattttaaaattttttgtagagacgggggtctccctgtgttgcccaggctggtcttgaactcctggcctcaagcgatcctcctgcttggacctcccaaagtgctaggattacagctgtgagccaccatgcccaacctgtcacatattattctttaaaatattttaaataataatttaaaaacagaaataatcattcttagctcaaggccaaaaaaaaaaaaaaaaaaaggcagtcttcccacctgcttccccttttccccacctcccctccccaccccacacacaaaagactggatttggccctagtgccatagtgtgctgacacacatctgcattatctcactgggttaatagggcttttctaaatggtcagatacactgtgattatattgtcaagtgaatgggaaagagttttcccgctagccttttttcccaccctactgcctcatcactttctgccaccctctgccactgagactgatggggttttagtcaatcgtttctaaggttaaaagtaggcactgcatgtctagactctagacaaggatcaattacaaggataggcagcaatcttaagggtttgagcgctggagtgtcctgatcgggtttgggcgttttcacagatgaagctcccttgatcaagagtggcaaagggacacagcaacaagttgttgcagtaatctggggataaaggaaggtgatctggactaggctggtagaaataggggactaaggctgtttttgggatgcctatttaggattgggtgcttgcttgaatgaagattgattagctgttttaaatacctctcacaggataaaagaaattgattttttttttttttgagacagagtcttgctctgtcgcccaggctggagtgcagtggcgcaatctcggctcactgcaacctctgcctcccgggttcaagcgactctcctgcctcagcctcctgcgtagctgggactacaggcccggctacttttctcatttttagtagacacagggtttcactgtgttgcctaggctggtctcgaactcctgaccttgtgatctgcccgcctcggcctaccaaagtgctcggattacacgcatgagccaccacgcccggcctgaaatttttttttttttttaaagaaatgagtaagttttttaatagtttttaaagcgctacctaggtttagctgggataccgcataatttcattcttcttttacttattaataaccattttaaaaactgcaagatcctatcaatttgtctgatttactgattcccctatcccaaagtggagcgcaaaatttttactttttcaacataaaagttagtttaaaatactttttctgaagaaaaaaagaaagaaatccgcattccccacagtcactggacaggaatctcggcgtggagacacccgttcaatttccaggggtctaccttcccctacccgggttcccgccgctcctcagcgcccagacgcacctcctagtcccgcccccatgcttcttccagccttcctccttcttctcccactgcctccgcccattccctcgcccacccgggaagctccgccccctccagctccgcaacccaactccttctgtcctgctgtcgctttcctctttcccgcccccatggctgccttcgattggctaaacctgctgggccgcggcggggatgcggcgcagccgcattctgattggctagacttaggcctggaccctagtgattggctgataggaggagccagcaagtgtggctgagctccggggtgtgtggacgccgctttgttgcctgaggtgggtggcggtggaagttaagggagtcaggggctatcgctcctcgagactcgcagtcgcggccactgcagtcacttcgccagttagcccttagggtaggagtcgcgccggcagcagccatgagcggcggcgtgtacgggggaggt

SEQ ID NO: 31053 - DNA, 2300 bp, Homo sapien
tcatcaaaaaattcttctagtcctttccttgacaatgtggtatgaagtaatctatattggtgaaaggatgtcacatttggtgtactcttaggcaacaaactaagaaaaaacctgcaattgaacacacataaacaagtaaaagttttataatatctggattttataagcaataaacattatcataataaacataatcattttgtcatcgataacattttaaaaagctactcagggtttctgcacaagaattaatttttttttcttatttagagactgggtctcactatgttgtccaggctggtctcgaactcctgggctcaagtgatcctcccaccttggcctcccaaagtgctggaattacagggatgagccaccatgcttggccacaataaattttgaaaatgctttagaaagtattgttaatactgcattatagaagctgctaccttataatttcagaggtaacatagttacacaattatattttaaggtaacatttttgggtccttcttacattgctaatgggtgcaagcgcaggtaaaaagagcagtcaattttgcaacatgtgggctgggcacggtggctcacacctgttatcccagaaatttggaaggccgaggtgggaggatcactttgagcccaggagctcaagaccagcctgggcaagatggcaaaacctcatctttaacaaaaatacaaaaattagccaggcatagtagcacgtgccttatagtcccaactactcgggaggctgaggtgggaggacgctttgagcctgggaggcagaggtttcagtgagctgagatcacaccattgcactccagcctgggcgacagagtcagtccctgtctcaaaaaacaaaaacaaaaaaacctcacaattttgcaacatgtatcaggagcctcaaatacttcctcctttaattcagtaattctgcatctagaagtttcaactgaaaaaattattatagatgggaatttataaattaagatgtttattaaagcactatataggatgtcaagtttttaattatgtaaatacgcagctaagaatggtttaaaaattactgtgcatctggatgataaattattatgcagtaattcaaaaatcctgtttttaaaaaatagttaacgacctgagatgatttgaaactaaataatgaagtttatcacaagtgttgtatccctaccaaaaatatttagcctaaatcttataatgaggaaacaatcagacaaatccaaatgaataagattcttaaaaagctaatctcatcaaaatgtcaacaacattaagaaaaaaaaaaaaaagaaattgttccggatagagactaaagagtcatggcaaccaatgtaataaatggatacttcactggatccaggaccaagaaaaataaataaataaaagaagttactaagttaccagttactttcattgtaacacatcctgtaaatacaaatatctcttcttttttaatccatccaaacttgacacagacttgagtatcacaacaaaaacatcttcggtaaagtttttcgcacctcacccagcccaagaggatgcttctgtacttatagatgtatttacttcaacaaatgctggacatctacaaaccccatatactgtcttgtccacagcaggcagcaacaaaatgaggaaggaatagaaatgtcggaggtgagcgacttctccaaggtcactcactcctcaccaaagtgggctccggctctgccatccaggcggccgttccattcttgagttgttctcggcatctcggcatctcggcaaccaaacaagatccaaagttggagaggtgggcaaacctactttatacatcacttaccctgtgcaggcagggacctgaggagttattaacgatcgggaagatttcagggcggatgaaactctcctacaaagaagggccaaaccggccgcagccatgttttcgcataactggcaaaacgcgtttccgccaacgatagcgtcacttccggcgtctcaagccggcggtgaggagaatagaaaacttgccctcacttaagatggccacatcctgcctttgtcctcattggtaaattggctctctcagcttccgtgacccgcctcccttcttcctcctgcccgtagtagccatggcggccatgagtttgttgcggcgggtttcggttactgcggtggcagctctgtctggccggccccttggcactcgcctcggatttgggggcttcctcactcgtggctttccgaaggctgctggtgggtgctggcctagggagaacgggcgtgaagcgggtgcggggcga

SEQ ID NO: 31054 - DNA, 2300 bp, Homo sapien
tcacttcctctttacctgcttctattgcacagggcaaatagcttacagtatatatctaatgaagaggattaaataaattaatactttaaacccttaaaatgatgcttgaggtcaggtggggtggctcacgcctgtgatctcagcactctgggaggccaaggcaggtggatcacgaggtcaggagttcgagaccagcctagccaacatgatgaaaccccatctctactaaaaacacataaaattagccgggcatggaggcgtgcaactgtaatcccagctactcaagaggctgaggcaggagaatcgcctgaacgcaggaggcagaggttgcagtgacccaagatcacgccattgcactccagcctgggcaacagagcaagactccgtcttgaaaaaaataaaaataaaaaaggatgcttgacacgtaacaggtgctcagtaaatgttggctattatttagtgacacattatttaataattgagtcagtttcctcatctgtaaaatgaaaataacattgtaatttctttgcagagtctctgagataataaagtacactgaatatcaagcatttgatctttgctatgattattcacaccgccatgatgcaactcactgtctccaaggaggtccaaatagccctattaagactgtattggtcaggtgcagtggcttacgcctataatcccagcactttgggaggctgaggtgggcggatcatttgaggtgaggagttcgagaccagcctggccaacatggtgaaaccccatctctactaaatatacaaaaattagccaggcgtggtggtgtgcacctgtagcctcagctactggggaggctgaggcgggagaatcgcttgaacccggggggtggagattgcagtgagccaagatggtgccactgcactccagcctgggtgacagagtgagactgtctcaaaagaaaaaaaaaaaaagactgtattatgactttcctgagacctaggcacttttgccttcaagggccccttcgtctaagttattaaaaataatattttatgactgcattggtataaaacgaacataatacaggctggattcgttatcatattcataaacattatggtttttttaaaaaagaaatttaaattaaaagactttcgtagacccctaaaactatcatgggttcaggcaggagaatcgcttgaacccaggaggcggaggttgcagtgagccaagatcgcgccactgcactccagcctgggcaacagagtgagactctgtctcaaaaaacaaacaaacaaaacaaaacaaaacaaaaacctctcttcctccccagttcatctgcatctcattattgggcggcacggtacttactgtgcctaaagaataagttggccctgagcctctttacctgtctacatattacctgtcttcatattccttagcataggtgggcttctcggcaagatgactttgcatctgtgggactagaacctagcctttgggcaggtggaacgcaacaataagcttgtgccctagagatacagatctcagctctatacctttctagactcagcttcatccgcaaattagcattaattgggatggtgaataacaacgttttagaaatgctaataatgtaaacacgatctatctggctacttcaggaaaacccctcatatagctcgtgctccgtctctcctgtcaagccccaagcccacaacttgtcccggctccctccggatcccaccaaggtcaccctggaagcgtcctcccttttctcgccccgcacccgcttcacgcccgttctccctaggccagcacccaccagcagccttcggaaagccacgagtgaggaagcccccaaatccgaggcgagtgccaaggggccggccagacagagctgccaccgcagtaaccgaaacccgccgcaacaaactcatggccgccatggctactacgggcaggaggaagaagggaggcgggtcacggaagctgagagagccaatttaccaatgaggacaaaggcaggatgtggccatcttaagtgagggcaagttttctattctcctcaccgccggcttgagacgccggaagtgacgctatcgttggcggaaacgcgttttgccagttatgcgaaaacatggctgcggccggtttggcccttctttgtaggagagtttcatccgccctgaaatcttcccgatcgttaataactcctcaggtccctgcctgcacagggtaagtgatgtataaagtaggtttgcccacctctccaactttggatcttgtttggttgccgagatgccgagatgccgaga

SEQ ID NO: 31055 - DNA, 2300 bp, Homo sapien
acaacacgtgggaattcaagatgagatttgggtggggacacagccctaccataccaggtagtaagttctcccttaacctcaggctttcagttcttctccacagagcctgactagtttcttgtgtattgctctagagacatcctaaagccaaacaagtgggcatgcatacacatatgtatattttaaggggctacattaaaaatatttactacaagtacaaccaactggaatgaaggcccatggtatataggatgtgccaaaatgcctactgcatattatcagccttgcatgtattccttgcttttatacactagtttgcttaaattgcttttatcatctagtaataatttggagattgttccacatcagcacacgtagagcaacttcattcttttcaatggtactgtattttaaccactttctacagaaggatctttaggttttccccagacgtttgttactcgaaacagtgctctaacaaatatctttacacagccttaatttatctgttgcataaatgtctagacaaggaaatgctggggaaaacagtatgcacatataaagttatgactggtattattacatttccttccaaagaggtttatcgtttttatccccaccaacaatgtaatgagggtctacttcccaaacccatgctaactcaatatatctttaccagcccaaaggatgaaaaacagtgtctcactgatttaatttgtatttaatctaagattaaattttaagttttgtaaaaccaagtttatctctgtaattggagaaaacatcatccattaacgtgaaaggtaataagctgatgagactaaattcaaagcaaaagctcgctgagaggatctgcccaatgaggaagatgacagtagtgtctgattttttgctcagtgccacctcctccttttccaacagatagcatttgggagtgctgagttataagaaagtgtggtgcgctcgaggcttgcttgagggtatggaaatcttgagataggtctggagaaccagggagagttaaaagagaaaaaaagtaagaaaaaaaaaagaacttaaggactatctgatctgagagaggcttacaaaaattagcgttttggttcactatttctcgctatttctgcatttcattaactggcagggatcactggatactctgtcatgaatacatatgttgggtgtagttagagaacctcaatgtcattgaacccgtcttgtgggttttttggagagaatgagagtatgctgggagacatgctctgcttgcaaatgatcaacccccgaggccaaccccattcatcatttattttgaggaactgatgatcaagacaggaatatgtatgcctgcctacaaaatcctcaaatcaggccactgaatgttcgacatgagaactttgaatcacatagaagatactccaaaggcagagaaaaatagaaagccttccgacgccctgaaaaaatcttgaccatccctgacttcccccaatatgtaagaaaacctgtattattattacacacacactcccacacacaccccgccctcccccacacacacaccctctatcctcactcgatcttattctattcgctctatttttgagccttggatgttaaagtaaggaacgaagcttagtggggaagcactgaagtgcatggcgcaaatttagatttaagcctcacgttagatttcagatttgcacatcgagtcccgcccctatccaatccggggacgtcaccgccctagtcttcggctgttttaaaagcaagcggtttttaaaacccccaatcctgctctttgtgttggcctcctcggagttgcccctctgcaagccaacaattcgggatagaaaacacctccgtggtgttttcccggggccctcccgcgccgcgttcggccgccagcccgctcgagctcccgcgccaacgcctcaggggttcgccctccgccccccgccgccgcgcccggcccacgcgcagggcccctctccagcgccccctccccggcacgctgcggctggcgctccccagccccgcctgacgctgcagctgggccggagactcgccattggattaaaaatagcgtcgccagtccgccccaagcccgcggtgcccgctcccgccccgcagcccgctctccccgcccgccccggctcggccggctgccgttgcccgcgcagcccgcccgtcagcccgctcgctggcgccgccgccgccggcagaccccgcgctccggctccggctcggctcgctcggctccggtgcgcgccgaggccatgcagcgccggggcgccctgttc

SEQ ID NO: 31056 - DNA, 2300 bp, Homo sapien
gagtggccatttcccacctggactccattgtgttcttctgtggtgtgtctttttagttttgtcttcttaacttggtaaaatagttgagcacaggaatttatctcttttttttgagatggagtttcactcttattgcccaggctggagtgcaatggcacaatctcagctcattacaacctccgcctcccaaattcaagcaattctcctgcctcagtctcccaagtagctgggattacaggcatgtgctatcatgactggctagttttgtatttttagtagagatggggtttcactatgttggtcaggctggtcccaaactcctgacctcaagtgatccacccgccttggcctcccaaagtgctgagattacaggtgtgagtcaccgcacccggctgggacttaatctttgtggtgaattgtttttattacaaacacgatagcgctttaaaaaacactttatggaatgaagtcaaagaaaataaaataaaaatgctttttaaaagaaaaatagcttaattataattttaaaagcaataaaattcatagtaaataatttataaatataaaaatatacaaagaatatgtaccctggaagcctaacaataaccattgtctacattttgatatacttttctttgttttattgtctcactggaagaaagtatatatatgtctatatgcacacatactacatataaataaacacacgtatttacaacttaactaaaagcttaaagtatgtgcagagtgcatacaattttttaaccagtaatttcccatttcatattatatcatggttattttctcactttgccaaatattctttgaagaaattttaatagttctataatagttcactgcatggatttttttaaaattctggttttaagctagttttatactaagactgaaataagcattgttgtacataattctttgactcaatttctcaggctatctatggatttctataaagggagttatgggatcaaaggttaaaatgtttggaggttcctgatacattttagtaactactttttgatggagcttaagaatcaaaaagcagttgtagctgggtatgatggcatgtgcctgtgttcccagctactccagaggctgaagcgagaggatcccttgagcccaggagttcgaagcttcagattgtgctaccttactccagcctggggaatagaatgaggccttgtctcttaaaaaaaaaaaaaaaaagcagttgtgattccctaccagcattctgtccctttttatacaacgaacttgagtatagtaccttaaaacatcatggttaagtgttgtgcgccatatgatttagtgacttctttgtgtaaagtttcctggaactgacttaaatccatcaaatgcttctgtcttattttcagatgggtgatttacaatgaccacaaagtttgtgcctcagaaaggccccctaaagacctgggctacatgtacttttaccgcaggataccaagctaaacctcaaatataaaaattggcgaaaagaagccatacgcctttttaatttgccaaaaaaaaaaagaagaagaagaagttgaaacaactagacatgaaggaatatatggggtatttatcgtttatttaaagagcacgatcagttgacaccttctgaaatagaactgagaagaaatttctattagtgatgatacactattatattgtagatagtttttataaatgttcaaaaagatgatgatatttaaaaacaaaaaaagtattcatattgctggtggaggatctgccatcagcacatcaaaaatggggatgtgcccccagccctctattttgctttgggggtcagtgatagtggcctctggagaaaccaaataatgtggccagtggtgtggccttacccacaacaaatgaaaagcccacttgtgtttcatatagaaaatcagcagttgggtggggctttatttgtgacataatttttttcatgacatacaataatttctgatgtatccatgtagatattatgctctgtccataatagagcctctgcaatgaaagatatttttaatttgtcacattaaaattcataatacgattgtgtgaatgtgtgtgagactgactgagagtgtgagacttttactagaaaagtgagtccactagaaaatctgtgacaagttggtttttaaagtctgaacagttgatattaagcatatctgaaaaaagcaagtaaatattttaacaaaactatgactcaggaaccttcgagaagattagttccccacttagatttttaaggagtaaaaagggctgagtta

SEQ ID NO: 31057 - DNA, 2300 bp, Homo sapien
gctggggaataagcttctactgaggagtaaatgtgcacacgtgcttatcaattgaatgcgaggtacaggaataaaatcctctcctctgttacatctgaagtccttgggttgtgagagggcctcaagttaacagaaaccacaagtccttgaggcttacatatgttataacctattctagtttataaagacaaaaagctgaggccactgtgaggagtgccaggttttgatagtcattgtcaaagttgacttgggccaggtggtagctccagctggtcagcagaaggcagaggcattcaggcactcatcatgggtagcagcgaccacccagtctcagaccgtgcttctctacagtctcagcagcaaagtaaagctcaacaatgctttcaagaatggtattgtaagaattgtagaattcgagaaacccagtctggtaaggactcttggggccagcctccaagccatggcagggcctgcttgaatatgcctgattaagcatcctttccttccctgctccttcctcctgccatctctgtaccttgaccagaaagtcggcatgaatagttcatggacaaaggattgaatagcctctgaacaaaggattcaaagcaaactttgtaagtgttctgtgatgccattctatactttgagcagcagctgaatctgcagcctggatttaaagcctgaaactagtataaatgtcaaataattaatttgttgctaaatggtggcaaattttgtggcccaagttttattttgctattggaacacaaactccaaggagctgttttagggaagactaaacaatcttccattcttaccattatttggcaatttgcagagcatttagtagtactttctctagtgtatgtagtatctgtcagatctaagatttttataggctgtcaagaagtccagaattacggcccaagaggaaaagagttgcatttttcaataatattttttataaaattaagttaaaaccattattaaaacatgagtgacaggccaggtgcggtggctcacgcctgtaatcctagcactttgggaggcagaggcgggcagaccacgaggtcaggagttcgagaccagcctgaccaacatggtgaaaccccgtctttattaagaatacaaaaattagccgggtgtagtggtatgcacctgtaataccagctactcaggaggctgaggcaggagaatcacttgaaccagggaggcggaggttgcagtgagccgagattgcaccgctgcactccagtctgggtgacagagcgagactccgtctcaaaaaaaacaaaaaagtgacagtttataggaatagagcaccaccaagaaatcagtagcaagactttagaacagtctttttgtataaatcatatacagtaaatgttttgtttcttagaagtgcatctactttattttttggcagaacaatttttggcatcttatcttcatggcatgaaattgtcatttaaattactctttccgtttgaaaggggagggtatccttatttcccttctgaggtactctgagaaggctttgagtttcctttttcatgtattaatgtataacagcctaacagctcctagaagagggtattcttactagaatggctacatacgggtgacttcagttacatacaggtgacttccagggactgacttcgcctgtagattggatgaaaataaagagaaagccagtgattattgctgagtttcaaaatataaccatttctagtaggctacttctacatgctgttgtaccttcctggtgaggaggagacagagggataggggagaggaggaggaataaaaatccctctcactgggccaatcatactgattcattccctttacttcctccaaaactcactccccatgactcctgaaaaatgggtagatctcgtccaccaggaaattttaatagaatactatgcaccgtgctttctcagtcaatctggattcctactagaacagaaaagtaaggaaacataactgggtaggaatgtccacttacgtttcacaaactcacttttagagtttcatgccactttcctcattcttctctttaagatactattatattgaacgtgggacccatgtctaaatacttgtatagataaatatttcttgtatattcttcccatacaagcaagacttgaatacagttgtagctagtcccacttttataataaaagcttccaaactctttatcataaactttgtctgtgagcttgggaatacagagaaagcaagttgatcattctgagacccttcctcatttgccctgaatcagttcccca

SEQ ID NO: 31058 - DNA, 2300 bp, Homo sapien
aacctgccgttagataataacaagcatataatggattggaaaactttgaccctattgttacttcacagatttctagtacttttaaatcaaagcactatacttttcccagtttttatataacatgatagtattatatgataattagtaccattttaaaatctgcagtacttgaggtctcagaaaatcagtcctcatcttttctgaactgggaaaaaaaagtctgtttgcatattcatatatcatggttggtaatttacaacttcctttgcatacattcagtcctcagcagctctgtgcagcacactaggtagatatttgtcttatttcaaaattgaggaaatagagagttggtacacttgcccaagagagcattgaggtagtgagatggaactagcacctcttgttgctgactccaagtcctgtgctttgtcctataaagaacaataaaataagaactggatgacattttacagtttacagtgcttatgaacatatctctattttcagggtaaaaaaaataagttttttatacagagtttagacatgaaaaaactgatgtccaaagtagtaaaaggaaattgtccaagggtaactactagtggaatctaataggaatccatgtctcctgcttacaggtcttagtccttttgtgtttgtttggttggttgttttaggacctcagatgcattgaattggttcatttcacatccttttgttcatttcacattctcctcattagtccatacatggttctattttatttagttacacagtaatttttaataggatattaggtgtcctatgaatcactacccggcatagaagataagacattaacatctaaacttcaagtgaaatgcttccccatctatttccctgcctcccttcacccagggtcaccaacactctgaacactatattcattgttccactgctttcctttttatattgttgtatatgaatatatgaatacacattgacatttctagggattttttaaactttataaaaagcatattatgctatatgcaatattttggggatatcatgctgtacataatatgaggggcctgtagaattggagatgtttttaccaacaaaattaggtaatcacagtatacaccaccccgtggtgtgtgtgtatatatgaacatttattgtgtagacacatcaaactacccagtctcaacttgagacatatttaaatgcactcttcatatatgtgtgtatgtgtgtgtaagtgtatagtagtaaaggtctattcattcagcaaatatttattgtgtgcctgccatgtgtcaggaagtactaaataccttactgtgcacacacgtgcaaaaccaagtgcaacactccacccccctaaaaaaaagtccctgatctcatggaaataacattgtacagagggagagacagacagtacataaaataaatatggaaaatataaaggatgttaggtgatgttacgtgctagggaaaaaaataaaacatgccagatcctcagggactagggtttgccgttttaaatagaatgctcggcgatgaactggggatgaggggagcggggagtctttatttaacgggtgatacggacgtaactttcgagagctgaatcagaaccgaagtaaactcttcggcaacccctgcactcagcctataatgtctgtaggataacaggctcagccgcggtggatggcccccggagagacgatgcatgtcttcccgcctttcttccggccggccatcctctccgctagaatcgccctgcccgccgacgccgcacctgaacgccgcgctgctgcgggcgttgtacaccagcgcgaccaccgcctgccggcacctcgccttgccgccgcgcgcgcgcagccccgaggacgcgctcggggagcgcgcaccgcccggggccgccctcgggccgctcccaggcccctgggaacgcgcgcgcgtgcccggtcccgcggcctctcggcaggcacgcggctgggagaacggcgcgcgccccgctcggcagctgcggcggcggctggtgtaggcgctcacgtcagggctgggaggagggggttcgcagctcagagagagagagacatgaggcaacctggcaggaagcgagaaagagttcggcgaagaaggagtgagttctagagacgccccgcgagcaggacccgcgcctgcaggagagcctggccgacccggctcctcgccttctctgcgcgctctcccgcgtccgctttcagcaccccgagcggagaacagttcccggcagcccgcagcgctgccgagtggccgccggccggccgagt

SEQ ID NO: 31059 - DNA, 2300 bp, Homo sapien
ctttagcgtgggttcacggcccttagctatctgccctgacatctctcctccaacctgtccctacttcagttacactgtagtactcctcgtttcccccaacaacttgtgcatgctgttctcatagtgttctccttagtcttccattgcatgcatttttcaaatgtttttcaaatgtgaggtcatctaggaaatccttcaggatccctctcttcctttatggaatcaataattcctctttccaattccatatagctattgtgtcacacttctaccaaagtacttaccacattgattatattaaatggacaatactgatcaggagaattaggggaaatccatggcatggaagaataaaaagtttcagaattagaagagatgcaatgtggaaagtcagtgaattcaaaggaacatgtatatatcaggaacatcttagagaaacacatcaaaaaaagattttaaagggagaagctgaggctgggtgacgtggctcatgcctgtaatcctagcaatttgggaggtcaaggtgggtggatcacatgaggtcaggagttcgagaccagcctggccaacatggtgaaactccatctctactaaaaataaaaaaatcagctgggcatggtggtggatgcctgtaatcccagctactcaggaagctgaggcaggagaatcgttgaacccgggaagcagaggttgcagtgagccaagattgcaccactgcactccagccttggtgacagagcgagactccatctcaaaaaaaaaaaacaaaaaaaacaaaggagaagctgaagactatttataaacatattgccaggaggtatcctgacgtgccctgagaacactatcggacctcatgttacagacagggctgaaattctcaaggtccacagtcagtctccttggtaatagactccttcaccatgtcatgggcatcataatgggaaaaaccacttgcaaatgaattggtaatcagagttggagctatatgtgatctagttatcttcaccttttaacaaaggtctggagagatttgaagaggtttgtaccaaaaacaatgagatcctgaaggatgaatattagattatatataataaaagggcacactttggtctgcatattcaagatatttttggggaacattgcatatctgttatttctccatgtacatttgttgatgagaatactaagtcaggtatttactaattaccaggtatttattcagcaccatgatatctcacctactctactcattagtcccactgccaggaaaaataatacttaaaccagagtgttgcttaagcattttacataatttcttttcttaccacaactggaaatggtggaagtccattccccttgtgacctaagttgggttggggactggaacccaccacttaaatttctcaagaggtcaaaaaattggcacataggcaaggtgcaaggttgtttctgcagagacactagcaacacaacttgacctgcactaagggaaatgcagagaaactagaatagtgcctggcataaaaaaatgcagggatagactaatgcccatgatggggtgttggaaggagatgcaacatttaaaccagtaaacatttgctttattacagagacagatccaaaatagagagaaactttcacagccctaaaaaaatctggggatatcctcatgaatgaatagaactggagttatcttcagaagtgtggaaaaagataaagatgcccaaggtccacgaccaaaaagagtctacaagcaaggtgtggtcaaagtgataagagtctaaaaagaccaagggagagaagaaaacttgcagagaactagcagatcatcatagtaaactctgctcaggccattttggtactggaaatgacagagaagccagaaatggtagccatgccatgccatgtcatgccattttcaatgacaaaagaaggaaagagttttccctttctcttcctagtccccaaggagagcggctgtaaatagtagtatattagctatgacaactggcaaatagctatgctgtccctatgtcatggctgcttctgtgggtaccattgtgaccccagcatgagtcaagatgattatcagaatgtctagcagattacccaggccttgcacctggatcaatgggctgccctaatgaaggatatcaaaaatgaaggggcagctaaagaaaaataaaagacacctcagaaagtagcctgcctctttgacaagggacatgccttcagaggaacataacagaaacctctgagaattgtcaacaataaaaagactgagcaacaagggaaactgg

SEQ ID NO: 31060 - DNA, 2300 bp, Homo sapien
gttttgagtacatttgcttaaagtgcatttcttctgtcactactatacgaaaaatatcactcttgataaatgctgtttaccccctaaaaggagctgctttctatgttcacggccatttcagatgttcaaggtatgaggtgggggagggttatcctagtgttggaattaggaagaagtatagacagatcccatagtgataaaaccatgtgctactgaagaatggcctcagaaggtgacattcccaggctaagtaacactatttggtgtctggttctcagacaccggtttcttagtccctccaaaaaatgaggtccttgatcacagattgactctaacacaaatcacatacttatcaagatgtctataataatttttagtggtcagctttccttttcagtgacagcactctttcctaaaaacaaccattctctagagttatggcttaaaacaagtcagtctgtaccatttattaaagttgatatgcctatagaagcttgaaatttatttatttatttatttattgagacggagtctccctccggcgcccaagctggactgccgtggcgcgatctcagttcattacaacccccgcctccggagttcaagagattctcgtgcctcagcctcccgagtagctgggactacaggcatgagccaccacgctcggctaatttttgtatttttagtagagacggggttaggccatggtggccaagctggtctctgaactcctgacctcaagtgatccaccctcggcctcccaaagtactgggattacaggtgtgagccaccgtgcctaacccaaatttatcttttacagttgcattcttgtttgttgcattttctcaagtctcaaactgtttacctatttgcctgggttttccacaaaacagtgtggcagtatcgattatgttctgggctagatctcctatacaaaagtggtaacacagtgaaaggcaagttgatttcctcaaagacacatggtgggaagtggagagactaactgtcaccgtttatttctgttcaagaggactatactgaactatttacactgaacatatttaaatggtacaaattttatactggaataaaacgaagctacatgatctcaaaattagggttagttagaccttccatatgataaaatactcaatccagcaactctgcctgagaagaccaattaatacttcgtttggaatcctaactctagcctcttactagctgtgtgccattgagcaatttactgggactctctgagcatgtttcctcgttttctaaaatgaaaaagtacaatagctaccatagtggttaggttctcaagtcagtaagtaaggggatgggggacctaagttgaaattccctttgaaaatcacttgaattgtccataagaacagtatattgacttttgcgtacataccactatacagtaagtcccacagacactaaattttgagcaaccattgagataaactaaataagaaatgcatgtgttcattagttattgtaaaacttgaatggcatatgcacgtgtggagacattaaagccatcctggttttagaattcacaatcactaacagtaaatggggtatggatggagaacaccactccaggtgcttaacaaatgtccgtgtccttcctttcttctgcccttaaaaccacctggaaaccttcccggagcagccggttgaatggggttacgccagagacacaggtattgatttacgcagagagtacgtcgagggaagaagcttggagactcgtatagggttcttaccctggcactggcacttagaagcaccttgatgaatacgaaaaggaattattatttaccctaggttacagctcgagctatttcgacgtaataacgatcccacgtacactttaaaaagcaaacttctcacatacatcacttcctggaagccctagtcagcctttagcccaagcaatgctgagcccaatccttcggccttccgtagtctcgctcggtttcgcgagatcgaggctgagctccgccgcgccgccgtgggggcgaccccagaacacttccgggtgtaactggttgtgctgtctgtgtacttccggcagcctccagacagtttcttccgcttcctgtaccacccggctcaagtagcggacacggaacagggaactatcagcccgtcggcctccgggccctgcattctctagccatggaccgggaccttttgcggcagtcgctaaattgccacgggtcgtctttgctctctctacttcggagcgaacagcaggacaatccacacttccgtagcctcctggggtc

SEQ ID NO: 31061 - DNA, 2300 bp, Homo sapien
agatcatgaggtcaggagattgagaccatcctggctaacaccgtgaaaccccatctctactaaaaacacaaaaaaattagccaagcgtggtggcaggtacctgtagtcccagctacttgggaggctgaggcagtagaatggcgtgaacctgggaggcagagcttgcagtgagctgagatcacaccactgcactccagcctgggtgacagagtgagattccgtctcaaaaaaaaaaaaaaagaatgaattttacagtctactaatcaggtgtgtcaaaacactttatttttctacaggctgaattaatatctatctctagtactcatgccaccaagaggcagaaattaaactcctagttaattcaactttgcatctaaatcctggatttacttggccctcaccatgattttggactgaatgtatgtgtccctcccgtactcctacattcataatctgaacccctaaacgctagtatggttttatttggaataaggaagtaattaaggttaaatgaaatcataagggtggggtcttgatctgatagtgtttttattttattttatattattattttttttgagatggagttttgctcttgttgcccaggctggagtgcaatggcacaatctcaactcaccacaacctctctctcccaggttcaagcaactctcctgcctgagcctcccaagtagctgggattacaggctcctgccaccatgccctgctaaatttttttttttttctgtatttttagtagagacagggttttgccctgttggccagactggtctcgaactgctgacctcaggtgatcctcccgccttggcctcccaaagtgctgagattacaggcatgagccaccacgtccagccagatagtgttatgttcttagaagaggcagcagagagttcattcactctctcttctctgtatgaggacatagtgaaaacgcagccgtctgcaaagcaggaagagagaactcaccaaaacctgaatcaacctgcaccttgatcttagacttcccagcctcaagaattatgagaaaataaatttctgttgcttaagcagtctagtattttgttagggcagcctaagcagaccaatatactcaccaaggattttgggatcttggcatcaagagttggggggagaactcattctccaatccattgtaaacatctagcatgatgctttcttcccccgcccttttactttctctagtctggacaatctctctttagcctctggaatgacaatctctctttagccttggaatgagacggtatatctcctctcctcccctctttccaacttacttacttactcatttgtagtagtttgtgttttttttcttcttcttctttttttagacagggtcttgcttattgccttagctggtctcaaactcctggctcctgggctcaagtgatcctcctgccttggcctctcagatgctaggattacaggcatgagccactgcactggcctaattactttttaatgggtaaaatctatgtcctggatccttaagattagatttttgaaattctttaatctcagattttacagataaaaagctttgtgtttcattatgaggccattggagaaatgtgcctccctacatatttgatgatattaaggaattgtttaatgtttaagtgtgataagaatattgtgatcatatttaaaagatgaacctcttccgattaatacatcgtgtacaacaaaaagattgatgtagaaagagggagtccaaaaaccctttgtcttttggagaaatatgctgaatatttgtgggtgaaatgatatgatgtctggaatttgcttttaaaacttcacaacagaaggggagtgttaggtaggtatagataaatcaggattggctttcagttaatggttaaatggggtgctacatatataggaactaattatattagtttctctgcttttgtatttgtttgagaattttcattataaatatgttttataaaatgagttgtaagaacctgttatggcaatcagaaaacaagaactaaatgtctttgtattctgcattcttttaggtattttcctcctttcctgaaataatgtgtagttctgaccaagtgagaagaatcataaggtaaaatcagattcctgaaaggaagatatcttgttactatctcaaattttcatcctattgcacaaaccaactacccaatccagcgtttgcatttggatacatttaatgaataaaaatatgaatcactgatactttcttaacatcttttggttatttattcaccatgttagatgtgcta

SEQ ID NO: 31062 - DNA, 2300 bp, Homo sapien
tctcctgcctcaccttctcaaagtgctgggattacaggtgtgagccaccacacctggcccagtcagttgatttttaatgaagttgccaagaccatacaatgagtaaaaggatagaatattcacaaatggtgctgagacaactatatagttacatgtaaaagaatgtaggaagttagacccttcctcacaccatatacaaaaaatagcacaagatatatcataagcataaatataaaagctaaagctataaaaaatgttagaagaaaacacgagtaaatatttttaccttggttcaaatgatggtttcttggatgcatcaccaaaagcataagtaaccaaagagaaattaaacaaaacataccatcaaaataaacttgtgttcatcaaaggatacttccaagaaaatgaacagacagcccacagaattggagaaaatacttgcaaatcatatgtcaggtaagggtctagtatctagaatgtataaggaactgttacaactcaatgataaaaagataaataacaaattaaaagtgggcaaagtgaacagacatttccacaaagaagtataaatggccaagaagcacatgaaagggtgctcaacatcattagccattacagaaatgtaaatcaaaaccacaatgagatatttcaaaaccactagaattgcactatatgtatgtatgtatacatatacatacattttatatttatgcttatgatatatattgtgctattatatgtatgtgtatatatatatatacatgcatatatatacacgacagacaataacaagtgttggtgaggatgtggaggaatttggacttttgtacgttgctggtgagaatgtaaaatggtacagctttggaaaatagtctggcatttcctcgataggttaaacatagagttactatatgatccaggaattctaatcctaggtatatactcaggccaaatgaaaacattcatctacacaaacacttgtacacaaatgttcagagcaacattattcataactaccagaaaacgaaacaattcaaatgtccatcaactgatgaatggatgaataaaatgtggtatatccatccagtcggtagaacattatttagcaataagaaaggatgaaattctcatacacacttcaacatagatcaaccttgatagcattgcgctaagtgaaagaaaccaccacaaaaaaaaacacattatatgatttcgtttatatgaaatgtccagaatagacaaatctacagtgacaaagtaaattagtggttgccaaggactggggttggaatggggagtgactgctaatgggcatagaatattattttggggtgataaaaatgttctaaacttgattatagaaatgagacaggatagttcccttgacccacttcgtgggtgggaatggaagtggctcatttcacttagcctgccactggccactcctcatgagacagagtgtgccagcaagggagtgtgggaactggagagaatgaaccctggacctggccactcttctctggcggaagcaggttccgtgcgggccctacagcagcatccaagcccctgtcctctcggcacctgagttcttgtttggcatccaggaagaattaggtcacccacacggattgaaaggtagtgtatgtagaagattttactgggtaatggctctcagcaggatgggagttggaaaggggatggtgcggaaagaaagtgatttttccctgaagccacaccatctgaagttagcggcgtctatctgtagtctctgacactcagttgctgcttctctgcttgctgcgcatatacccggcgctcagccgcttgtgttgctctgccagctgaagtcttttttatatgggcacaggataggagcatggcaggccaaaaagcaacatttgagggcaaaaatggggtgagctgttttcacacagggctgtggttccaggtttaagggtggggtttagccaggagccaagccgttctgtatcatttcccccctctgaagaggcacatctaactgccattaggatatggacaacgaccagtctttccgttgtttaacgaaagcggcagttggattcctcccagaagtctacccaaggatccccagcgaaagggagccatagtccgaggctctggctgcctgcctgtttggagctttgatggcctcgaggtgagagaaaaaacaagctttacatggccaaatatgcatggatcaaacatgtattatacaaggaaagaatctagtgtgaaatattacagaaataaaaagtgaaatatactagtaacattgtacc

SEQ ID NO: 31063 - DNA, 2300 bp, Homo sapien
gcctgggaaaataatgggtccccaacagagctgagaagtgggctcttgtttccagctaagggtggatcaggaagtataagaacagaacatttggcccatgtcataggagttgtagttggaagggtcctgcaggatagtgtccaaagaatccatgaaaccagctttaagtgtgactcagctttaaacatctgccaaaaccagagagcgcaaagccgtcttaaaatagtaccagtcaaggaagaactttctgcttccctttcttctcctccctcctcgtgttccaactaagaggggtcagctacagcagctgagaatgtgagaagaggtgaacaaacaaaacaaagattaccatgttcccttttgcaaagacagatagatggcctgccacaattacaccctaactgggtaaaggagtgagtggagggaatcctatttttattgaaggttgaggctgagtgcggtggctgacgcctgtaatcccagcactttgagaggctgaggctggtggatcacctgaagtcaagagttcaagaccagcctcgccaacatggtgaaaccccgtctctattaaaaatacaaaattagctgggtgtggtggcgcatgcctgtaatcccagctacgtgagaggctggggcaggacaattgcttgaacccaggaggcagaggttgcagtgagctgaggttgcgccattgcactccagcctgggcaacgagagcgtagactctgtctcaaaaaaaaaaagaaggttgaagtattgattaacataatggcctgggcattggagtttcaccttctagtctgtgtaatgtggtttaaagtggtgattcaactttgtattgcctaagcatgaaaaggaaagttaatcctccaaggagccagaaacaaattcctttattgaatataattttctgagggatagtgggaaataataatttcctgagatctattgattagaaatattctatttcttttgtgtctttaactgctccctctatattggctactttgcacaagcatttaaacgtgttcaagtcacctctattttaaagaaaacacctcatctccacactctagctatattgatctcttgctgtcttcttccttttaaagtcaaacttccagaaaacattaggtgggtggcacgggtgactctcccaggaccctgaattcctgatttcagcagtgggcacatgattctgactccacaaatcataatgagctatctctatgggaacagtgattggtctaaggagtaggtctgtgacataaacagtttcagtcagagtacgtacttccttgagattactacttggaagttgagaagcctgaagctcctgggaaacctagtttttgcctccactaccttactgatcatgcatttgcaagattaagtatttccaatatttattattataaaccacatattatatctttgttactatcgctgtagtatatgacctggaacggctagactaaggtatatgcatattttttaaaaaacaactttactgagatgtaattcatatatcatacggttaatctacttaaagtacacaattcaatggttgttagtatatttatagttgtgcaactatcactgatacagaatggctgggttcccagctaaaccccacccttaagcctggaatcacggccttgaaaacagctgaccctgtttttctgcccaaatgttgtttttttggcctgccacgcccctatcctgtggccataaaaaagacttcagctggcagagcaacacaagcggctgagcggtgagcagagaagcagcaagagtgttgaagactacagatagacgcagctaacttcagatggtgcggcttcagggaaagatgaccctctttcaccgtctgctttccagtacccatcccaccaggagccaccactcaatcaaatcttccgcatacactactcttcaatccgttcatatgacctaattcttcctggacgccggacaggtaccccggtgccgagaggccagggcttggacgctgctgtgaggcccgcacagagcctattcccgccagagaggagtgaccggccggttccagcattcggtcgctccggttcccgcactcgcacgctctgccgccaggagtggcaggaggcgagctgagtgaaatgagctgctccagttcccgcccacgaagggggttaagatgaagggaacaatcctgtctcatctgggggcctgtccaggatatgaaaaacagtgagttaaaatgaggaacttttggatctgtgtcttttccaagaccgtggcaactctctctttccttt

SEQ ID NO: 31064 - DNA, 2300 bp, Homo sapien
catttatattaaatatctagactaggccaatctatataggtagaaaacaggatagtgatttcctagggcctggggagctggggttaaatctagagtgaacgctaacaggtatggggttatttttgcagtgatgaaaatgttctaaaattgactgtggtgatggttgcacaaatctgtgaatatactaaaaactactgaattgtacattataaatgggagaattatatctaaagaaaactttttaagaaagcaaatgggacattataattctgaaggatcacaatgagatacaatatagagtgttagcataaggtgcccttaataaatggtggctattactcattgatgggcatttagttgtttacatttttctcatgatgatcaacactttaaaaagaacatcccagcccagtgtgggatggccaagagttcaaggttacagtgagctatgattgtgccactgcacttcagccttggcgatagagatcctgtcttaaaaaaaaaaaaaaaaataggccgggagtgaatacataggctgggcacggtggctcatgcctgcaatcccgaggcaggcagatcatgaggtcaggagttccagaccagcctggccaacatggtgaaaccccatctctactaaaaacacaaaaagattatctgggtgtggtggtgcgcgcctgtaatcccaactactccggaggctgaggcaggagaatcacttgaaccagcaggcggaggttgcagtgagctgagatctcatcactgcactccagcctgggcgatagagcgagattgtctaaaaaaataataataaataaaataaaataaaataaaataaatattgtagtcctagctactcgggaggctgaggtggcagcatcacctgagcctgggaagtccaggctgccacgtaatcacgccactgcactccatcttgggtaacagagtgagaccctgtctctaaataaataaataaatagaatatcctgtacataacaacagtgagcactttcacagccctcattttttcccagaatcttcagagatgcagacgtgctcataaaatgttgtgtacattttatttttttagaatctgaaaaactgggtcagtgggcgtttcatgggaagtatagaatgttagcaaagtatcctttcttaagtttttctgcgaaaacggtaataatgtaagtataacaaggagcacttatagtattattttccaaagcccttgcttagggaaggagcttcagtattaagttgttaaaatccatacccaaagtatttgttatgcttacaaaactggagatggttctgctttgatcctatttgcggaaatttgcatgcatttaacagaggaaaacgtggtctcctgctctattaagtttgtctgactacttttaataaggcgaattcacctaaactctgttctagggtgtgaacacaattacttgccctgaaaatactcagtttgacttttaaagagctaaagtggtaacaggtggggagagggctaggccaaattgtttgagggggtgtggaactgtggaatttgagtgaagagaaggcccaactttttttaaaaaaagagcggggcgaaataacttggggcacaacagtatgtctattttgtaggcatccctcttccccagggcaactggagcccaaaaagtgggtgagaaagccattccagggcagccagcacttccagaagtttaaggtcaggatgccggagctcaggggaatgccgatgcgccgggcaggctgtgcctgggcagttcattctgtggcagctggaggcactactcggccgccgcggtgcgaactgcgggcactgtggggcggagacctaggggcgggtcaacaaaggtcgggcgattgtgtctggaggcaaatccgacgtagacggcggcaggcggagcccaaagccggtgatgcagggtgcgcagggatcccacctggagagtcggggcggcacgttgagaccccaggggtgaagggcgggggatcccaatcccagccctgttttcccctcccctttccccgcctccttctcgcccctcccccctcctcccctctggttggaaagtttctagaatctcttcccagcggcctttgcggttccaacatggcggagctgacggtggaggttcgcggctctaacggggctttctacaaggtactgaccgttttgccactttgtcgagtgttctgggtgctggagcgcgtttgagggagggttggtggtcccagagagtgaggtttggggtcggaaaggcagccaggccaaagctcgaggccgctgg

SEQ ID NO: 31065 - DNA, 2300 bp, Homo sapien
gagaagtgacttacctgatttaaaaatttgggatgagaaactaagaagatgtgcttgagtcctttctcattcttttgtccctaccccctcttttgtcttttattactttctatagtaaactaaataatgtgttccaaagatttcaggtcctaatacttggaacctgtgaatgttaccttatatggcaaagtgttggaaactatgattaagttaaggatcttaagaaggggagattatcctggattatctgggtagctggtaaatgcaattacatatatcctttaagaggaaaccagaaggagattttacaaacagaagagaaggacaatgtgaagatggaaaagttggagcagagtgagatttcaagatgctggcttacaagactgcagtgattcagtcacaagtcaaggaatgctggcagtcaccagaagctagaagaaatgaggaatgattatccattcatcagtcagtggacatttaaaaagattacttttcaaggctgtttctaggatcttggcaggtaggtaagaggcaaccagacttaagattcatgagtgaggtatcatgagaatgaggaaggcttctacactccaatttgcactctggcttccctcataataatagccccacactgagtgatgaccataagcagaacacaatatgtgcataatctctacgttcacaaaaactcggcaaggtagttatcattaccttcattttacaaatgaggaagaaactcaatcagaaataacttttccaagtcacagtattagtaagtgacagagccaggttacctccagtttgatctgccaccaaaaaaagagctatctccagctcaacaaaatgtcttgctgtgttgctactcccaatttcctgagtctgggttttgtaaagtctcaaagctaattagagtctactgtaaatctattcctccagaaactgcattacacagtttgtacataccaaaaatatgcataataaatttttccagatagcattctagcttgttgatgccaatttggtcccaaggtcttatgcctcacttgattatttattttgtaattgttgggtaaaaaccagataaaagagaggcaaaagaggaagttataaacttaatgctagtgtcttagtgctggatgtcaccttaaatcatgtgttgacaataaattacatcacaaaaaccttagcgctagaagagctcttggattatcaaatgcaaactgcttttacagatgaggaaaacaaacccaaaaattttgcatatttgtttaataactaacaaactcatcaaagcagaattgcattgcaatgtaaacggatatttaacactgtaaattctgagtgggaagtaactccaaacttattttgatcatgcaaacgttgcattgtaaaattccattattgtctccattatttttttcttctcaagcatttatgtagggatgtatgaaactgatgtccacgtaagggcaaaatccagccctactttttattttgggtgaggaggaaaacttttaaatagcccttttcagttgtaggatcttgacattccatgttcagaatatgaactgtctttaatcccattctacaaaacgaaaacccaaatattcacaaagtcttgtcaagtcacatccttaaatgaagttcttttacattaaaaaatgctaccgagcaatccctgaaacacagtgtggttggtttcatttgtttttctgggcatctcgtttcctacactgggttacaacatatttgtttgggttcgtggtggaaatgtcacagcatgtttaactacattcattacccttgacaattattaacataaaataaaggcaaaacgaggtgctaagatgtagggggaaaaaatcggtctgagtaaggctgcccatgcccttccctgcaagaatttccaaatacccaccgcccaggagcaaaggacagaaaacacagagaagccccacccctacacccagaaataaagagatccgcccacccttcaaccaacccgaagtcgctttctccgctctgtccactgcttgagcgactttccttctcctccgcgtccccttttacgacagttttccggcctagtttgcggctgctcctgccgtgttgcgtagggcgcctgtgcttgaggttgggggttgcgtcgctctctggtaaaggcgtgcaggtgttggccgcggcctctgagctgggatgagccgtgctcccggtggaagcaagggagcccagccggagccatggtgagtgcggccttccggtcttcttggcgacctccggcccaggcctcaacctcagct

SEQ ID NO: 31066 - DNA, 2300 bp, Homo sapien
ttgttgatgaatttgatgaatgtgacaataattagcagagacagatgagagctaaattactactgacaatgtaatgctatcctgctcgagggcctgggaacgtggcaggataacatggcagggacctgggcctcgtttctaattaatagtctttttttctttttctttttttttcttttttctttttttttctttcttttttttttttgccagtgggggaaaaaaggagtaacggtaattgttttcctcaaaggctgcagggagttatcagggtaataaagttaattagcagaacaaacatcctttcactgccttaccagtctgaggaaaagagggtaattcagactgcagaaagatatgactagatgggatgataagaaaagaaatcttacacaggaggccaacagagaatgattttctcccttcatttatttggcttgatgcatggaaagaaattagacagcctcttccttcaggtcacaaagttgctcatgtaaaggactttattgttatgattttgagtttgggaaataaagttagcttagataaactccactgtttacttctttcttttctaggtagtgataggtttgttcaattttatctttattcaagtgcattttcctaatgtcccagacgtagaagtgagttctaatatttgccaaagagaacatttggctgcactttgacttacagaaatctgttttgttctctgaatcttttggaaaaagtaagaaattgttcagcaatttccacgaagtagtactctttattttcctgtgtaaatttaaaaatcaaaatgagatttttttaaatgtatataatctaattctatttttgtaatctcaaaagtcatctttattaaaatgtggcaatattgtcatttctgtcgtggcattgtagatatatgagtaatcaatcaaaaaggtgaatagttcaatgaatctcagttttacatatagctgtattcagtttggtcacattgcttaacataagtagattcaacataatgggaaaacatccaccagacattctgaagactttgcaagtttattttttcctatgaagatcataagtggttggcccccttcaaacatcctacatctgaaatgactgtttagtatgaagtaaataacactaggatgaaagcctgaagctttctaaaataatatccacaaggaggtgtctatgatttttactccttttaggtacatttccaaaaattttcattttatgcttcataaatcattacatatctaagttctacatatttaccatgcatataaatgtgcacacattcatttattgttagagctaaatgaaacacctttcacatgactgtgtgtttaattctaagttaagaacataaggagttaagtggtgaatttctacttctgtgtttgacagtatggcaccaggctgacttttcaacagaatcctatatggatagacttccatgaaaaatgggtgaaacttctaacaaaatggcctttattcctaatatccacattactaaagtactgtactagtccctaaggacaaaagtagtatagaggacataacactgaactgactgagttgtttactggctgtgctaccacatgtgtatgacttgcattgtcctgtcatgtcccttatcgttgatttgctcatctataaaactggttaccctgccctgccaacctcataggattgctatcgagcatacacacacacacacacacacacacacatacacacacacacacactctgtctctctctctctctctctctctcttttagattgctatgttttaccttgtatccttagcagcatttttaattttttgccatataatcaaactttacctttacgtagaactaaaagaagcattccatgctactttccaacaacgtgtaacattttaaaacaagttcacttaccaaaagggagacaaactgaaagaagtaacacaaaaatacaaatgcaaaattgcttttttctagaaatggtctaaaatttttattgtgagagaaagaataacagggaacacatttgtttgtttcctttgggacctaagacaaacgtattgaatattctggtactttcccctctagccactacttccttcattggactgcaaggtatttctgtttggaaaagtaatggagtccagtcaacttcattgatcgccaaggactgtcaaaattataaaacttgctgtggagctctgacatgccagaagccgctagaaaaagaagtttgacattcagaaacttatcaagaggttctactctttggatagagaccaaaatcat

SEQ ID NO: 31067 - DNA, 2300 bp, Homo sapien
aggtcaggagttcgagaccagcctgaccaagatagtgaaaccccatctctactaaaaatacaaaaattagccgtgcgtggtggcaggtgcctataatcccagctactcgggaggctgaggcagagaattgcttgaacctgggaggcggaggttgcagtgagccgagatcacaccattgctttccagcctgggctacagggtgaaaatccatctcaaaaaaaaaaaaaaagtgatcttaaagttggagtgggagaataagacagtaaatcagcccaatcttttatagcagcatattcacttcacttagaaaaaataactttaattgcacagggatagaaagaaagatatttgaatacctttccttgacaagattcagagctttcatgtaagaataaaatatacatttacagtaaatttagatttggggtagaatttaaactcttgtccatcaacatgtaatgaatgaatgtgacgcttgcataatagcattttttggagcactgttagagcaagggagtcttcgcaatgctaaagaaaaaaggaagttaaaaaatttaaggatgtttcactttcaataaaaaaaatcctagttgaaataagttggcaactccatgttcagaatctatattgtttctctaatgttcaggaatggttaaggcaggaaagagaatctcaaggtcaccaggaatagtccttagagtattcttatagggcttatctgtgctcacatgcctaatttttttccaagtgcaaaagaatggccacttgcttgagacaggcccagtgccatcctttattcaagttcctttatactcctctttttaaagaagctgtcaagttctttttttgcagttgacaggaaaggccaaatctgtggtacaggaaaggaggcgcaaaaaagaaacttttttgtgttgatgttttactaagtgagctaaggagaattttagaatcatgcaatttactctggaggcatttactgtacatagctatagtgatggtaatttctttcattgttgaagtgaaaagataaccatcaatcagttgtcaattggtcaattgcagaagtgatgaaaagaaactggtaggaacaatcacttctgtggctacctagaccatttggaggcataagaaaagtatgggaactggattgcattttaaaaagggattggaccagattttcaaaaaggttaataggcataacttctttgtaaaggatggctttgcagttatgcataatcaggaaatgcattttaaaaatgaaaaattttaaagacaatgaaaagtttaaaagtaaaaattatttatttaattagatcaggtaaataagcccagaagaccttgaatttcagtgtgttcctaatggaggaataaatatagtttactaataacccaacacatgtatttaaaacaaattaatgaaaattactttgcactcatgccttaggttctaatcttggacactttgaaataaataactttccaagtatttattatgagaaatagaacatacaagctaattgtgaacactgtttttaagcaaatatttacagataatttaatttttttgaacctatggaagtttatataaaggttaagataagagcaatttaaaaaatcattaacttgcataaaaggcaaatggcacacttagggacttagtgctgtaagcaagatttcattttaatttatcctattttcctaagaatggcaatgttattgatttattctgagagagttccccacacacatagtgattttttttttttttttaccgtggtaggtaataaaaaggattacaggcccccagaaggatgagatatcatcagtttgtaatccagcccatggtttcctagataccgtattgtctattctgttccgctatgtgaaaaatgttgaatatcaacaatgggtttcagtgctgtattgttgagttttgtatgaactaatctagcttctctaaaaaaaaaaaaaaaaaaaaaaaaaagaaagaaaagaaagaaagaaaagaaagaaagaaagaaaaaaaaagaaaagaaaaaaaagagaaccacagctttggacaaaagtctatagccagtgcatttgaaaactccccttgcaccagggctgactgtagctgggggaagacattttactcatttgctctttcctttcatacagtcagctggtccctcttctcaggtgtagatcacctattataattttacctaattttgatactctgataaggaaagtcccaggacttatcagctgggataggcctcacttacaagacagctctgttcagtatttggaag

SEQ ID NO: 31068 - DNA, 2300 bp, Homo sapien
tggctaaaacattttacattcacccttcctcattccacttttagttggaagaagtttctagtattgatttaattttgtataaggcccctaccctctcctacaataccattaagtaacaaattcacccaccttagccttttctggtgaaagtcactcttgatttactctcttcacttcccttctacccccaatgcactcacacttttacagacacatttttcttgatccagagagtattgggaggtacataactttttagtattgtcttgactttcattcttttctaactgagattggactctttatcctgtgatacaaaatgaatttttgagaaacaaccatgtgaaaaattacttaattttctgttttgatgtatttgtttttcaagcttcataggaaaggctttagttggtgtttaaatgatagtccataaaaattccttattagatgactccagaccaattgtaaaccaataacataattgtttccaaaagggaaagtggaagttgagatcagttagtcgagggattcatttgagtgtgtttatctttaaaatggtttatgagaagaaagggagaaatgaactgggtggaggacagaggtagagaatccagtgaaaacatgtttttaagattaaagccatttttccacattattttcttgccacaagtgacaacacagagcaggagtcatgaaagtggattactgtcactctgggctattggaggcccagagagccctggcattaattcctatagaaaggtagacaaacctagtcagtaactaacactgtcccccacagcgccctcactgccaagtgttcaggctctctcagagttgatacagacctcaggggggtctaggtggcagggcttcccttgtgagaggaagcggaggctctctgtggaactgagagggaggaagccaggtggctgtaagagcaagcctgaggggatagggtgctgtaataggaaggctgtggccaccagtccctcacatggctgcaattagtgagtcaaagctagctaatgatgaatcaaaaagagccaagagtaggactttctgggtgctaaagactaacctttagcttgttccactcctcccactgggctcccatcctaggttttccaggattggagaccttactggaggaaagggcaagtatgttaagaaaacatgcctagcccctgtctagcatgcgcatactggcggggtcttgcagagatggggagaaacaccttgggatgaaagaagccctcagtgatctgtgtgtctggctcatacagttgtgcacggccaaccagagagtgggggagagtaaagcctcatttttttttcagtcactctatctggggttgcttatctcctctcccccaaccctctgcctcaccccaccaggaccaaatagaattgaaacttcattgcctttgcctgtactgagcctaaaaactcagggtttgataaggttactgcaccaatgatacaattgtagatttttaaaagcctcctcaaagagacagatgtttgggctgattaagaattgaggaggaaacctgcagctgcaccaaggaataatctattggacaaatattgtaataaaaaaatatgaagagatcagcccgaccttgcaaggtcttctgctttaaaaaaatctttatcaaacccctattctatggcttcaataaacagaacccattacctcacggcatcttttgttggccccatacaagagagaacaaaatggttattcaggggaacgctttcgatttttattgtgggtagcctgcacaaagagccgtgttattgtatttaaaagaaccatctgtagcagaaacaatggcatcaaattatctttgaatacccactgaaaaaacataaagcttttttttttattcttcttctgtacggtggggggatagagcagtgttaggataactgacttttttgttgttctctgggtgcattcttctcgctccccctctctctccccctcaccctctctctcttctctctctccctctccctctctctctctctctctcttttaaaaaatcagccatttggggttttaagccataaacgatttttcttgttgcaggggattgcagtggcaaagctaggctaggtcttggaggctggtgtaaggcgatgtgggtgaaggcaggaggctgatggaaagactggggggaagaaaagccgaaatggattcacggtgccttggatgaaggacgagaggggaactgcaagctccttcaactggttctgtccggtgagaagtgatcaagcttgggctgacaaga

SEQ ID NO: 31069 - DNA, 2300 bp, Homo sapien
ctggattaaacagaaaacagtgctgtattttgaagagcgccgaatatgtatgcattttgagaaacccaatctcaccctttccgggttcccaagaactaaaacaagccataacttgagagaaaaaggagaaccttcggggggcaggaaggttgattggaaataacttaaggaaagtctgcagaattcttttttttacaacttttctgagtttccagtgggtatatttagtgtgagtttgacagtaacaggctagggagggcagagattggagaaattgggggtcgggggagtgattatgggaagaaggttagtaaggaacaaaacaatgcaccgttttgtaaagataataaatggaacgtggctggtagatactattcagtacattttcttagggtgagtaagggtagaccaggggaggagggggcggagagagtgttacagaagaaagaaaataagtaaccctgatggtttaagccctttataaaaaagaaatggcatcaggtttttttttctttattcccccccaccccaccctttgtagtcaagtgcattttagccacaaagatcccaacaagagagtggaaggaaacttagacgaggctttgtttgactccgtgtagcgacaacaagagaaacaaaactacctatttgtaacggacgtgctgccattgccctccgcattgagcgcctacctattgaaatctttacgtcgggacaatgggagagcggctaaaattaccctcttgggtcctgggcgggcaagattcctgagcccctacccccgcccccatctcatcctcctctaacccgggccttgctgggctcccccttccccagtcccggccgccttctcccagtgtgcgctgcctgcacctgtgcctggagagcatcgaccccgcctcccaggccttgagcccctttgcggcgcagccccagccttgcgcggcctgggctttgcggccaccacaatggaaatctacggggaaaatgccagggctggttctgctggagtcctgggaactctgcgtgggagggagtttgtgactgcggcccaaaagccacctccatacagtgccgtgggatgccaggaagttgaaatcaccctcccccatcgcctgcacttttgagcgcccttccgtctgtgtctttccccagcccccatttgaaagccgcacgaccgaaacccttcttacggggaggcatgggatgggaatggggagtgggggcagacagtagaagcatcccctttgctacggttgaatgaagacagtctagtgggagatgtggctggggctaagaggaagagctgcagtttcctgggccaaagagctgagttggacagggagatggcagcttaccaaggcctgctggttctcagctctagagtctgccttatggtccgagcaggatttatttttaagaacagagcaagttacgtggaagcaaggaaggttttgaggacagaggtttgggtctcctaacttctagtcgggactgtgagaagggcgtgagagagtgttggcacctgtaaggtaagagaggagagcggaagagcgcagtacgggagcggcaccagaggggctggagttgggggggagtgctgtggatgagcgggagaacaatgacacaccaactcctgcactggctgtttccagaaatacgagttggacagccgccctgagccacccactgtgccctgccccacccccgcaccttagctgcttcccgcgtcccatcctcatttaagtaccctgcaccaaaaagtaaatcaatattaagtttaaagaaaaaaaaacccacgtagtcttagtgctgtttacccacttccttcgaaaaggcgtgtggtgtgacctgttgctgcgagaggggatacaaaggtttctcagtggctggcaggctggctctgggagcctcctccccctcctcgcctgccccctcctcccccggcctcccccgcgcggccggcggcgcgggaggccccgccccctttcatgcaaaacccggcagcgaggctgggctcgagtggaggagccgccgcgcgctgattggtcgctagaaacccatttattccctgacagcccccgtcacatggatggttgtctattaacttgttcaaaaaagtatcaggagttgtcaaggcagagaagagagtgtttgcaaaagggggaaagtagtttgctgcctctttaagactaggactgagagaaagaagaggagagagaaagaaagggagagaagtttgagccccaggcttaagcctttccaaaaaataataataacaatcatcggcggcggcagga

SEQ ID NO: 31070 - DNA, 2300 bp, Homo sapien
ggtattcattatttgagcaaaagatttaggtcacagagttggggaacagaccatttttatgcagttacaaacttgattttcaagatctggcaagattgaagaaagatgtttaatatacattatctttacatctagcaactcaaaccatagaggagcatgaacacaggattactgttgtacaggtcatgttagaactgctttgcaaatttggtccctactttaatgtcccattgctattttgtgtttcctctaccagaggctccattctcttatctgtcaagctcctcctcctcctttaaaagcccaggtcaaatgctccttcctctacggagacttttccccccttttccttcaatgtctctaaactgggcagaagcagtcatttccatcttcatgctcccattatgatctgttcatgcctaaattttatcacgccattgtgcttttctgttaaatatataagggtctatctttggtgcatgttgaagttccctgagggatggggagggttattatctttgtcctcagtatttagtacaatatatgatctagggtaaggaactcatacactaatatttttagggccttttaatttaggatcatcagctatacatatatatatttaaatcctttttgttctcagtggctgctaagctaaatccatgatgatatgcaacaaatccaggatgtccttttgaatgggttcttttggctgggtggcttctcaggcatcttcagccattgttaaatggcttctcatggaagccatgagaaggcgttgtgggtggggtgggatggggctcttgaggcagatgcagtacccaaactctctctctccacatactgttgtaaggagggtggcttggttctcaacccattggtcttccaaacccaaatatgtttaatcacctacaagtaccactcattagactacccctaaaaacaataattaggtaccacatttcaatgtgaagtgatccatgttaccattgtttcttctgcatagtgactctcccactgctggtattgtgacagctaaataaaaaggccagtaatatgtgggtttctgttttttgtttttttaccttgaggaaacaaagactctcctgacgtaatgagatactaggaatctgaaaagagccaaacagaacaatagattcttttttgtatattattattatgaagccactaagaaggaattattcagcaataacatatgggagactggttattgttacaactttcagctcatcactaggggaaacaacaagttgttcaaagcaacctgtgaggggtggattaccagaaatgcacataaattgttagaattgacactgtctcttggctgggcacagtggctcacacctgtaatctcagcactttgggagtccatggcagatggatcatttctcttgagatcaggagtttgagaccagcttggccaatatggcaaaacctcatttctactaaaaatacaaaaattagccgtgtgtagtggtgcgtgcctgcaatcccagctacttgggaggctgaggcagaagaatcacttgaacccactaggcagaggttgcagtgagccgagatcatgccactgcaccccagcctgggcgacagagtgagactcttgccaaaaaaaaaaaaaaaaaaaaaaaaaccaacattttctctcaaaggcagaaattaacaagcaacaaaatgctaataagaatctctcaatgcacctttcaaacaaaactctctagtgttagcccaaagttttaaaaaagggcaaactttttttattaaaaaagcgtttggccgtgttgccttgtacatgacttttggagccctcactaaaaagctgtttaccctaatttcccagtaatgtcttcatttcttggtcaggagatttagattatctcattaccaagatcctgattcattggcttgaggagttaggttccccccacaaaaggtcctctctgtcctctgggaagtaaaaaagccacatataactccatataactgccatagaatgcccagacaactaaactgacatcttaccatgtgattggtctggtgcccaggagcaccatgggagagaatttgaacgctcttggcagttgagattcagaccttgacagttgtaaccgatagactgggctggggcaacgctgatgaaaggcaaattcctgagagaaaaatcacccagagtaaggagtttggcactgtagactagattcagctgcaggaattgtgcactagaaaaatgcagtgtttcttttttttttttttttgagacggagtcttgttctgtcgcc

SEQ ID NO: 31071 - DNA, 2300 bp, Homo sapien
aaggcaactgcctgagctcatggtctgatctggcttctgggaaagagaaagcaggggaaacgtctagagatggcatactgggagaagaaatttcttgctgtggaatcctgcccccatctccctccccaccatacacaatcccacgtgcatttacacctacacgccgtgtacacacgaacattttttctgctactcccatgggccccaactctgccttttcatcaaaatcacccagagttttaaataaaatgcagatgttgaggcttgttcctaaattataatcttgggcatctaaattttttgattaaaaaaaattgacatgcatgcttaaagtaaaaatttagacaatacagcaaagaatgtgtttgtacccctcccacctagcccttagttcttccgaaaggcaaatacttaaccgttccttgttatccttccagaaaacaatatatgcatatattcatcttttttttcttcttcctctgtaggtgattgtggtgaatagtcatgagaatctgggaactggctcctgctctgtctatcttggagatgcatcttttgtgagaagccagggcaagaatagggaggcttaggcaatgggaagtttctgagtagataaagcagatggcagagcaaagggacagagcctggcgagaggctactccctgtagcaacctgcctaagagtgagaggaaagcaaggcatggctatgagcacgtgtagtctcagctacttgggaagctgaggctgggggatcacttgagcccaggagttcaagaccagcctaggcaacatagtgagaccatgtctctttaaaaaaaaaaaaaaaaagaaaaagggagagagagaaaaaaaggtgacaattcccccaacacacataaagtacataagagttaacaaggacacagtggcagaaaatagtcagaactgagcaagcatcagtgaggaaatgttttcctgaggagacttgagaagtctcaaaaatgaaaagaaagagtatttggtgtagaaagaatggcatgagatgtgaaagctcattcatccatttattccaggtatatctttttcttcagtactttgggaggcaataggtgtaatagcaagaacattcaggttagtgggttagtgtgagtctgccatatgtatgagggttgaatacacattaggtgtggtgactgtcatatgggaggcactgcaaggtgaaggagacatgtcctcacatttggtctttgggaagcgaagcaggcagaaacccaagtgcaaagtggccatttgttttcctaatgctagataagtacctgatgtgttggaagggtggagtagaactagaaactcctggaagttcttttaagaacgaatgcaggacctcatcagcccgagtctttaaataagtcacacatttttggtcaccacattctggaagggggacaaaaagatctgtcacagacaaaatttggagatatttaaggctttgttgactttggcaaatgcttgattatagttctgtggtctgtttgttttctagagtctccatgaattgcaagggaaaacaagtggtacactggtatttctatttgataacctgttctctttggaattccggttagaaatcaaaggcttacttgagttttaatgctttcgggacttcaaatgcttttctatcttcctaataatatattaacattttctgaagacaacatatatgtggaaaacaacattatttactcaaataattttttttgaaaaatggaccaaaaaaaaagaaaaaccaacaaaaaccttttcatgttgtatctcagactagcccatgttgtgttccaaaatttttttgctgaatggttgtttctgtaattgaaaggcccatgatttttttttcacagcaccattttgctttttaaaatttctactgtgtgccaggtatggttttggcattgcatccttgcaggagcactgcaagggaatgattgcgctattatcttcattttacagacaaggaaagtgaaagcaacaaaaagtttcatatcttacctaaggtcttcttgttctgataagtgatcaagctggtatttgaacttgggtgcctcaacatgaaggtcaagcatctcattttacagatgagccaactgaagtcccaagatcactcacctcattggttacagatcttggagcccagggactctcaattcaggaccagtatgctttgcatgacatgcaggatgtatctgagacacaaactgtggtttgttctcttttcttcccaatgcatcctgcgtacagtatgctttgcatgacatgcaggatgt

SEQ ID NO: 31072 - DNA, 2300 bp, Homo sapien
tctcactctgtcacccaggctggagtgcaatggcgagatctcagctccctgcaacctctgcctcctggtttcaagctattctcctgcgtcagcctcttgagtagctgggattacaggcgcgtgccaccacgactggctaatttttgtgcttttagtagagacagggttcctccatgttggccaggctggtctcgaactcctggcctcaggtaatctgcctgcctcagccttccaaagtgctgggattacaggcattagccaccgctcctggccaaatgtctttatctttaaaacaagcatttcagtctacagtatttgtaaaggactgggatttgttctaattagatttgttctcatggaggacagcattgtttttattggcttgtgaatgtgaccggagatacttgcaatctacctcatacataggttctgtagttcacaatgtcccacctggatgacttttaggctttgttgtcctcatggtagcctgccacctctttgggcctggcctgtaggaagcctaagtgaatcatctcctcacagaatcaagagtagaccataaatgatgatgaatgcttccaggttgcctggagccactgcacctgatgccatttgaaactcccgcaggaaatactggtcatcttattccaagtgtccttgaagccagtggcaaattcctcttgttcactcaaaaagcatgcttcctgttgtttttgggtggtcttccaaataccgagacctgagaatgtttaacagagaaaataaagagcatattttaaattctcaagtaaaatactctctgattggtagaacttggttttgatagcatagtgtggaaatagcatggctgtttatttactatgagcattttgtgacaaacaggcctgattcagggtatgatagcactacccttcactctctgaagcagccaatttctaccatctgtttaggccggtttctgactaagcaagttgttccttttagatcctgtcttcaaggcagtttctgatggtagacagaggacacatttttctctgctcgtccatatgtcagtacaatcattggctgctcagacactccaggttggaggtctatataagttacgctcaccagcctttctgaaccagatgccaaggacacaccccaactggcttgtaaaagcagtacatctaatcacataaagcctctataatgtggttttttaaattaagtgacccacaggatattaatctagtggtaacaactcccaagggatgtagcactggcaaacacttcaagagctgctagtactagtattaaatgtgatgttcattttgtctaaacatatggaaataaaaataagccatgggagaacgtcagtgctgcacatgctatattgttcataaacctgtcataaataagtgtctcttaaaaagaaaccaattaataaatgtgcattgaattgcaaggcttaaatattctataatatggggtttctcctccccgcaccctccaccagcattcctatccctgccagggcccccccaccccacctccttgttacttaagctgttataacattttccactttgtggcccatctcggttttgttgttgttgattgagttatttggttggctcagaggcttgaaaaaataaagaaaaaaaaatctgtaagctataaaatgcagcttgtttcttcctttgtctgtgtgttagagtctggcttggcactagaaccccaccccaaacctcccaccgagagtatgtcatatttctatatgctcacgcatgttcggctctacctcttttgaaatgatgcccaaagcccagcaatgtttacataagtaaaagggagtttcacttttatgctttaatttctacatagagcagagagttttcctagccataccttatactttgttcataggtgaacttttatttttcgaatgtgatggttttatccagctttgacaacagatttctttaggagattacacacctggaattaactttttctgccaagaattacagtgcacctggaagtactaaatcatttttatctatgttttagaagctttgtgtagtgaaattgcgtatctcaatcttgacttgtctcttgaggagaagcttaaggactggagtcgggtagatatgtatatgctggtgctatggagtaaatacatccagggtgtgtttacttttcaccagccaaatactcactacctgaacaccatctccctgagtacctcgcttcttaaatgactccgcttactgcataacatatggaaatgtgagtatgcactttcagcagattgtttg

SEQ ID NO: 31073 - DNA, 2300 bp, Homo sapien
gctcattctgttcctgacagtttgagcttcaatttgatctttacatagttaccctgagattacttcttaccatattccaccagagcactaggaatcaagcccttccttctcccaacttcttccttttgaaatttggggcacaattaaataatgatacacaaagtattctccagatcgctatttcttatgttatcttgaaaaattttagcggcatataaataaaaatttccaggcctaatttgtaatcaaaccatttgcagatgaataaaagtaggcatggccatatttttatttttggacgtagcttaagaacatgagcactattgcctgacaatccagaatctgaatcctagctttgccaaattagtgtgagcctccatttctgcatctatacaaaacgggaataatacctacttcaagggattgattggagttaaattacagcatacaagtaaagaacttgatacaggacctgggtgctccatgaatggacacagtgctccatgaatggcagtaaggttttgtcactaaatatatctcaaaacttccttttagggtcataaagtaaggtttagccacaagaataaaagtaagatgacttttcaaatatctagctattttttgaagttggatgatttataatataaaattccatgttggttttacagatcataaatatccccaaagaaagattctatttgtggtgctggataagcattatatagtaagaaatgtctactgaaactagaagattgaggatgcatattcaacgacctgcctagtcatgctaatctcatttagatttgttcttgcttaattttttttttttttttttttttttgagacggagtctccttctgccgcccaggctggagtgcagtggcgccatctcggctcactgcaagctctgcctcccgggttcacgtcattctcctgcctcagcctcccgagtagctgggactacaggcgaccgccaccacgctcggctaatgttttgtattttttagtagagatggggtttcgccatgttagccaggaaggtctcgatctcctgacctcgtgatccacccgcctcggcctcccaaagtgctgggattacatgggattacaggcgtgagccaccgcgcccggccgcttaatttttttttttttaaccacaaacgtctgtcggtgaagtgtgctttaattcagcaaaaatacagcattcaatacatatacataacacaatatgtatacggggctgcttttaaacaacgccaaacctttaagtcaaagccttgttccagttgcttgtatattccttctgagcttgtcatccacacacttttttaacctaggtcaagttactgctacgggtgtttttgattgcagaagtttggcagttagcagtaaagaactacctttttatacaaattatcttcccctgaacctgtccaatttagcacacggcaagacagaatatctcatccattcgcctagaaacacgggtccaggctgtaccaggctcaggggacttgcaacgctttcgaatcacttaatgggtgtgatcaagatttccctagccccgtctcagccatttgctaaagaagaggcctgacttgtgttgagacgaaagctcttacagcttgatggaacccaaactgggacttctggggggattaactttcagtcacatacgttcaggactgtgcgtatgcgtgtcgggagacgcgtgaaccaaagaagccacagagcccgaaaaagacctgcaacaggaggtagagaccgaggaatcggccccaagctgcagactccggagatggccagacccacagacacgacttaatcccactcccagaacggggaggagggtggcagtggacagaaacagcgttcgagaacccggcacctttccacgctcgcttcttcccggacccacaacacagaaaccccccaactcggaacggcggcggggcgcgccaggcccccctcggtccgcgcaccccctttcgtcacgtccgggggcgggccggggcgccgggggcggtcccgggtggagccggggggccgggcggggcggggcgggggtggggttgcgggggtgctttgggtgacaacggtcaataatgaaggtggctgcggcgcggcggcaggctcagctgcgccgggcgggggcggcgccggggccgcgcctgtaggactcggggccgacgccgcgggatggggacgcggcgcggggagtgaggcagtggcggcggcggcggtaagcggaacttcggcccgaggggctcgcccgctcccgcctctgtcttgtcggcctc

SEQ ID NO: 31074 - DNA, 2300 bp, Homo sapien
gtgtatgcatactcatgtctgctttgtctttaagaaacttctggtgattatttctttaattactgattttctcagcctctctttttgcttttgaaactacaagtatttaatgtatgtttactgcctctattcctattttgtcttttaccaatgaaatctactttatttcatattcttctgtgctctttcatttccatattatccaaaaaacaactcttaggaaggtttacagtgatgacctgtttatcatgaaagttaaaagattaaacttcttgattttatatatatatatatacttttaaatcaaagttaatttattttatccatccctaccatctaatcttttttctaaagaatcctccatgactgatagtgcagtctgtattctagtaacctctgagtattatttctgtttgattgctaatgtatcttatatattttctgtataactcatccctcattcttcctgatctacatgtgtgggctttttttaattaacttgcatggggtctttaaattccagttcaacattgctataaatactgggcaacatttaatatcaaatagtaaagataaagtattctatctcttatttccagtttcaccatttatttgctttttgactttaggtaagttaagtaattttttgccaaatttaaccctacctttctttttggatatcgatctttttatcctggaattgtgctgaacttatatattctattttttttagtcagttttttagaattttctgtatacaaggtcatatcatgtgcaaatggagatagttttacctcttgttttccaatcatgttaacttttatttcccttttcttgcctaattgtcatggctagaaccttaagtacaatgttgagtaaaagtgacaaaagcagtcttattcctgatcttaggaagacagcattcagtctctctccataaggtacgatgttaactgtgagttttttatagataccctttatcaggctgaggaagttcctttttattccagtttgttgaacgcctttatcatgaagggtattggatttttatcaaatgctttttctgtacctattttggtggttattttatcaataaaatgaaggccaggtaccattttattaatatgatggattacattaatttttttaagtgttgagtcaatcttgcaattctgggataaatcccacatatttgtagtatataaccctttttatatgtttctggatttgatttgcatctctttataagggatgttgatctgtagcttcttttcttgtgatttctacatccctttttaaaggacttctttctcaagtcattattgcagtaatcagattttcatgatgatcctggttggatcaagacttgactattacatccttcttttttcatggacatactttcttttaaagtactttttctggaattagtctccaaaagtaataaaataatttgtcttacttacttttaaaaatatgtttttttcttttaaacatcgatttttttcactaaatttgttttctgtcctcagtttcaacttctctctgttttagacaattcgcacctctaacttcttgtgttgctgtcactatcactgtgtattcctattcctagctctgcactatttctcctcactcggataccctttcccattctacattattaagcatcctttccaccctgctttagagataattcttagagtcctactacttaaaataccttagccaagaaaaagaaaagaagcattaataccaaattctcgtcaattctacagataaacatgtacgtaaagatgccacaaacttcaaaatctatgtagctttaaactattttgtgttaccctgttttctttccttggcatctatatttatttaattgtgcttggattataagaatctcagcatccatatatcaatattaatagataaactggacttcaggagagcgaggacagagatttttttcttgtttaacataggaccatgaacacaaaggtttattttcttttgttttctatctctataggtagagtacgtgtttacagataaaactggtacactgacagaaaatgagatgcagtttcgggaatgttcaattaatggcatgaaataccaagaaattaatggtagacttgtacccgaaggaccaacaccagactcttcagaaggaaacttatcttatcttagtagtttatcccatcttaacaacttatcccatcttacaaccagttcctctttcagaaccagtcctgaaaatgaaactgaactagtaagtaatttttaaattaataaataag

SEQ ID NO: 31075 - DNA, 2300 bp, Homo sapien
gttttctttccttggcatctatatttatttaattgtgcttggattataagaatctcagcatccatatatcaatattaatagataaactggacttcaggagagcgaggacagagatttttttcttgtttaacataggaccatgaacacaaaggtttattttcttttgttttctatctctataggtagagtacgtgtttacagataaaactggtacactgacagaaaatgagatgcagtttcgggaatgttcaattaatggcatgaaataccaagaaattaatggtagacttgtacccgaaggaccaacaccagactcttcagaaggaaacttatcttatcttagtagtttatcccatcttaacaacttatcccatcttacaaccagttcctctttcagaaccagtcctgaaaatgaaactgaactagtaagtaatttttaaattaataaataagggtttcatatgaaataattctcttcagtagttgatgagttgcaggaaaaaaagtttgtgtcagtagagcaaggaatatacatttgaaattcatatatttgattcaacaatataaaatataatcctaagaatttgttgttacagcccagtttaacttgttatttaatacgtgtctgccttagctctttgagtatttaaatggaacgtagttaagaaaagcccttactgccttgaagtgaagaagactttctttgaaaaatagagcttaaatttatttaatactttttgagacctcacttcttctataaaaaagtgttcccctctacttgcaatgtggttgtacctcctaaaaagatgctcacgtgttgaagggtcctaagcaaatgtgacattttactttttgaaggcagaaacaaccaactgttattcaggcaatcaaggttgtagcactcttgttctagatcttagaattttgcctctggtttcctaaatggtatgtggaaatgatatttttatcatgaatattaattacatttttacagattaaagaacatgatctcttctttaaagcagtcagtctctgtcacactgtacagattagcaatgttcaaactgactgcactggtgatggtccctggcaatccaacctggcaccatcgcagttggagtactatgcatcttcaccagatgaaaaggctctagtagaagctgctgcaaggtaatttagtctgatttccaaatcttcggaaaaacaccatttaaataaatgtaacaatattagaatcatcatttaaaattttcaaacataaattcgtcattttaagttgtcagaattcatataaatacataaaaatagaagtacaatttaaattttaaatgacaatttgaagtcattttattatcaagcttgcattgagtctttttttaagatctctttgaaaatctgattactataaaaatctgtgtaatagaatttattaaaaatgcttgtgcatatgttgtactacacctactctgatccttctaatccttctagtccttaaaagtatatatatatgtttgtgtatgtgtatatatatttatatatttttatatacattttataaaaatatgtaagtaataaataaaaattattatatataacatatataaataaaaatatatattaaaaagaatatataagaatatatataaaatatatatatatttttttttctttttttgagatggaatctcactctgtcacccaggctggagtgcagtggtgtgatctcagctcaatgcagcctctggggttcaagccattctcctgacccagacacctgagtagctgggactgactacaggcacagggcaccacacctggctaatttttgtatttttagtagagattgggtttcgccatgttagccagactggtcttgaactcctaccctcaggtgatcaacccgctttggcctcctgaagtgctgggatgacaggcatgagccaccactcctggcaccaaagttgtaatattaaaaggaaatatttttaaatgcattttgaactttgattttaaatgtttttattcaagttaagctatagtgacattgtgaaatatgcagtattatttcttaagtctcacttttttatccttttgatgtctaggattggtattgtgtttattggcaattctgaagaaactatggaggttaaaactcttggaaaactggaacggtaattttttttcatatattggaatgttttctgtgttaagtgtatatagtatagaataaggatcagtaaactgtagctcacagggcaaatgtggcctatattttctgtttttctacagcccacaagtca

SEQ ID NO: 31076 - DNA, 2300 bp, Homo sapien
agacccactgatcatcggtatttctgggtcatttctagagatgataaaagcagacagcagacagataagcacaggttcagtatgacttttgattctcctcttgacaaatacattccccaaatgctctcaaataaaggaatattaattgatgtttcattgttgataatcataactattatttactgattgcctattatataccaggtaccccattctttttgtataccccaattcttatagaaaactgcgatttatcctcattttacaaatgaagaaagtgagatatagagaggttaagtaatttgttaagtaaatgataattgttagaaatctgtaataaaaaacaggctttttattaatttttttgaaccagtgttaagataatgattgttaggtttggaagggaaggtgagagttaaagaaagacacacacacagaaagagggcggctcaacagcatgcaggctttttgtctagcataaaacctacagaagtcagggaccagcctaatgccagagcccactggctgcttacaggctagggtacttacaggtgtgggcgggaggggtctgggcagtatggctcgctgcctggcaggatattgataagatgttcccatgatgaggcagttctgacccttgttctggcaggatgtcttcgtggtgttccttggacctttatccagcaagatacgatagggctctttctttagtggtcaggtggttaggcaggatgtttctcatgtcccgaacccccgtgaaatgttgcactttgaccaaggtctgcaaaatagcagggagcttacaaaacgatgcagtttggactaacaatgattactttgtaaactaaattattaaacttctggttgtattcttgtagagataaaatcctgaaactcttttggggttctgcgtgattaataccttagtaagttttggctctaaagcccaggggaaactttctgactggcaataactgcatttttacatggaatcctttgaggagtaattccatgatccattatccttcctttcagatacaggttttaagtgtaaatttcttttctcctgctctactgtactgtatccaaaaataccgtggcatgtgctctgctgtaacgtctggttggaaaggtttctgaaaatacttgtgattgaaaaggattttgttaccatttttactgtgcaacagcaataaagcagtccctaatgactacattattctaactaaaaatagtctgtgccacaccattctaaacccatctttgggttccagtctgataatgatatctaaaagatcattgtctataataataacacatgtaaataatgctttatgctgttcttctcatacttttaactttatgagtatagtcaccagtttcaaatgtacctgacttaaataattcaagggatttttagtagagaattaaatgactttttacctgacatttaacattatgttaacacgtaatgtaatagtgtattctttctgtttagatgtttggaaactggacatttggcactttggtcttcacagtcatggttattacagtcacagtaaaggtatggtactgaaattagaaatgtggacacattttgcaactgtttacatagttagttaactttcttcatttctttagccatagatactttccctttttccattttcaataacgattaatttcactggttactattttaatagttaaatttttgtcaaaaaattatttttaaagtttattattttgggaagcctcagctgatatttatgatcacatttttaaaaatctctaaaaattttgcttctctgtgtatagtgcaagacagcgtaatttgttttaggccatggagttgaaaatagagtaatcacatgaaatttgaatgctgtttcctcaaagaagaaaaacattataaacttgaaattatttcattttatactaggaccttttcattcatatttatctctgagggattttgagggattgtatctgtcttctgagagacttttagatacttatgtttattcttgagtttcatctgaaaggttaaggtaaagctttatttgtttatatttctaaggatataaaaacttttttttagatggctctggaaactcatttttggacttggatcaaccatctcgttacctggggatctattatattttattttgtattttccttgttttatggagggattctctggtgagtgaatatattgtattttaattggattgcttcaactataataaacatttattgtgataggttacattatgaacatattctgctcataacag

SEQ ID NO: 31077 - DNA, 2300 bp, Homo sapien
tgcagcctttctgtatgctctcaggacccactgtaggagaaacgctgggtggttgagcttccttcgcttctgtcctatttctcttccaaaactgtaccatattttctgtttcatattttttaaaagttagcctttctgatgaataatagatcaaaaataaatcttaagctaaaatgttttaatgttttgtgaggaaaaagtattactaagaatgtttagttagccatatagaaatatttagtcttatgtgattttacatagagtttcagtttattttctggtttcaatagaacaagttgaaatcatcgcagaaggataaagttcgtcagtttatgatcttcacacaatctagtgaaaaaacagcagtaagttgtctttctcaaaatgactggaagttagatgttgcaacagataattttttccaaaatcctgaactttatatacgagagagtgtaaaaggatcattggacaggaagaagttagaacagctgtacaatagatacaaaggtgagtgcttgcttgtgactttaagtaaattttggaccagattttccaaagagatgggcttatgagaaatgaaatactatatataacttaaattgggtggatgtgtccaatagaggtctgtagatcttagagttatttcaagaggtctgaggaaaaattattttcttttcactaaaatttcttcttggcctctttattttcctcccccattgtgcaagttgagaatggggatggggaactgttttttctgccctcatatgtataaaactcagctgaaccagtctaaggaaacctgcatactgaatctttaaagaattataaagtaatgcatacttttaaaaaagttcaactgcataataggtgaataagaaaaggttaatagtttgtcttttcttattcattctcctgagtaaccagtgctgtggatccttccatatcttttatgtttatgcagaaatatatttacagagtttctttcaaagtttttctgaaaatgggatatttattttatgcataacttgtgctccaaagtcaaattatgttcatgttttttattgctggaaatattgccagattacttttagaaaggtgttagcaaggctgggcgtggtggctcacacctgtaatcccagcactttgggaggccgaggtggtcagatcacaaggtcaggagttcaagaccagtctgtccaatatggtaaaaccctgtctctactaaaaatacaaaaattagctgggcgtggtggcgtgtgcctgtagtccccgctactcaggaggctgaggcagaagaatcacttgaacctgggaggcagaggttacagtgagctaagatcatgccactgcactccagcctgggtgacagagtgagactccgtctcaaaaaaaaaaaaaaaaaaaaaaagaaaggtgttagtaaatcatatttgatagcagtctatgagtgcctctttctctttgtttttgttatttaaaatttttgcctctctgataagtatagatttttttctttaaacaagagatatttacattgttgagattagggttgaattgcatagtttaggtcacagtttttctgatactcttaagaagtaattgttgtggtaaaatgaactttgttctaagaaaaaaagaatttctgttcagaatgcctacctaagcaaaatatggatatcttgaattagaatcccatgtccctatatacgaatgtctgattttctgaatgtgtataagtatgggacatatttcacatgaataaatgagactttaaaaaatcatgtctcatctgcatatatctctacactttaagaatgctgttagtaaggagaatggctttaaataatgggaaagtgtatgttagagtaatatcgtttcatgccttccatatattgtggtcatttaaaaaatggcatataaagcattacctttttcagttttcataatgtagcataatatgacactactttaatattgcattgttatttttaaagaccctcaagatgagaataaaattggaatagatggcatacagcagttctgtgatgacctggcactcgatccagccagcattagtgtgttgattattgcgtggaagttcagagcagcaacacagtgcgagttctccaaacaggagttcatggatggcatgacagaattagggtgagtatataattacaataggaaattagatatgttactgtggaactgaattatgtcatgaactttttagtgtaaatttaaagatttgctggcccacaaacattggtataaatagaaatgggttaacttgctagttt

SEQ ID NO: 31078 - DNA, 2300 bp, Homo sapien
gttaactttcatttaagcaaaattaggacagttctcttccttggcatttgatttcattgtgagtttgttgtcattgaacagtaaatctcaaggaggagatagttttcaaaagggaagaatcctagacacttgagggatgtgttttgcaatgggatatgacttatctgatgtgcagatgttgtagagttactagtgaagtagcagaagagtagtgaatttatagtttcttaattttagtggagtacagaggttgagattttaatctgtaatcctaacagtaacatatttacaaagagaggagtgtggctgacatcagattctagagcatagatatttttcatattgcaagaaaaagggaaatagggctagttttcatatttgattttgcatagtcttgtttttactgtgatcggtagaagtatgttgtaaaatctcaaaagctatgtaaatatgtacagcaagcagtatgatttatggaaagattactcagattcatgagacctctttgttcttgtctcatttctactaataacaacctgagtgatttttttgaacaaatgccttaaccttctggttaaggttctctgatctgtctaatctggaagttgatgtttacgatctgtctgtttgggccagatgagggaatctggggctctcaaatgtgttgcttaaaccacagaaaatatatatatatatatatatatatatatatagtttttttgtttgtttgtttggaggtgaagcctcgctcttgtcccccaggctggagtgtgatgatgtgatcttggctcactgcaacctctgcctcccgggttcaagcagttcttctgcctcagcctcccgagtagctgggattacaggcacctgccaccatgcctggctaatttttgtatttttagtagagacggggtttcaccatgttgggcaggctggtcttgaactcctgacttcaggtgatcctcccgcctgggcctcccaaggtgctgggattacaggcgtgagccactgtgcccagccaaccacagaatattgtgtctattcatgagtacctcaagttttccctcttcatttacaatagtagcttaggaagaacccaagtattttgctagaagatggtattggagcttgggaggaggaagagtaacagtggtgaggctgcagttgctaggaggccggcttgggtgagagggaagggagaacatggtctttgatactgggagagagtatcctgccttcttttcctgtgggtttaggtcagatgagaaatgaatccttgacaatgtgcagcaagtgagaagaggtgattatctcttcacctcttcccctctctgagaagaagtagaagggctgtttggagagaccaagggtctctgctaggctctggctaagggaatgaagtgattctttcaggggaaaaagaaaaaaaaattattttgataggatatgaggaaattttgttgataattttcttggttcctggatacaactaggagaaatgtcgaatactcctattttattgctttctcctatttggtaaaaacagcaagaaaacaaggtaggtggtgttggggagggaggatcccccctcttcccacgccatatcctttatagtgggtattaggactgcagtaaacacctgttaatctcatggttccccaggggcatttgctgactgggcagatcatgtcatcttcttccctgcgtctgatcatgtcaccttcttccccgtgtctgcttgtgcatccatctcagagcactgtgcttggtcggggtttggagggtagcgcggcttcccttctgcagcctttctgtatgctctcaggacccactgtaggagaaacgctgggtggttgagcttccttcgcttctgtcctatttctcttccaaaactgtaccatattttctgtttcatattttttaaaagttagcctttctgatgaataatagatcaaaaataaatcttaagctaaaatgttttaatgttttgtgaggaaaaagtattactaagaatgtttagttagccatatagaaatatttagtcttatgtgattttacatagagtttcagtttattttctggtttcaatagaacaagttgaaatcatcgcagaaggataaagttcgtcagtttatgatcttcacacaatctagtgaaaaaacagcagtaagttgtctttctcaaaatgactggaagttagatgttgcaacagataattttttccaaaatcctgaactttatatacgagagagtgtaaaaggatcattggacaggaagaagttagaacagctgtacaatagata

SEQ ID NO: 31079 - DNA, 2300 bp, Homo sapien
caacaaaaagaattggctaagaaatagaaggcagggtgcagatttaaaagtcatttaggagggaaaactggtgagatgcggagtaaggggatgaggcaggaagagtggtggatgattcttagatttctagtttggatgatttgataaaaggcaggaggaaaagtgggtttggggataaagttttagatttggtgagcttgatggacctgtgaaatgaccagaatgagtgtttaggcctgtcacttggggactggaagtcaagatttgagattcctcttgatatgggcagtagttgacgtgggaatgtgagtgacagcgtgacacaggctgtatacagaaggacgttcaggaatggtcaggaaagcctaaattgagtacagccagcaaaggagagtggtcagagtaaagaggagatgcaggagaaggtggagtcatggaaaatgaacaggaaattcaaggaggaagtgtccaaacgcaggcgagaggtcaattagaataactaaggcctgtaccttggtagagcttaggaaaacccacaaacgattatttcaatggagtagaacagattggagtaagagatacagtgaatcctcctcattaacgccctaggtgttaatactttaggtcaaaagctaggtgaattcctggagaacctccgtggatgtagtccagtttcaggcttgctgcatgaggcagatctggcttctccttgcaggactatttacccagagcccagcaaggagcttggcacattcacatgcattctttaaatattgggggaaagaatggatgaacggtttgtggccgccagaaacctgccttggtacagcgctgggcgctcccagtacatggctagctccaggaagttaggaggcctttgggagttaccaaagaagttctgttgttttggtaagaacaaattcattagttatagggttgatctggtcgtttaatgcctgtgctggtgatgatggtgataacgggtctactcaggtgggtcctgttctgaaacgtaggtaagctcttggtacagtttcagatgtgactttctgagtgagtttgctttcttagctgttttatttccttcctgtgtgaaggtgtcttatctctccaactggatactacatttctgaagggcaaggaccacttactccacaggagtcttctgtcctccttgcagcacgaatttgtccacttgatcctcagctcagaatcctagtgctcctcagcctcagttgatttaacgcccagggcaggtcacacctggactgtccgccctgcgtgactagaccctcagtgaaaaaatgtgtagttgcttcccgaaacttatcctgggcgggccgaactgaggggatactgagagctagcagtaggcaggcaacctggactcccgcagcccggccttgggtctcagtgcaccccaccccatctcactatagggttaccccaactgtctcccagtagacaggtctggggagagcctggtcctcactaatggagtgacagccaccgcaggggggggactaaggtctcccctgggatgcccacgcgagggaactgatgtaggtctgatactgagattggggggaaaaagaagaaaacacggggcagggggaggtgtttccactatcttctccctttttttgatactgatggggaggggaggtctgggatggatgaagctcctcaaccatccgtttcagccgcccccagctgctcaacttatccgccgccgctcgtgcccgcttccagcctgcgtagacccggccgtggtcgtccggaaggaaccgcgtaggaaacggaggtggggtgtcccccggcgcccccaccagagaccgcccggcgcggcaggaggatgtcggcgcgcggagggcttgcgtcgcccgcccctcccccgccgcgccccccgcccccgcccactccccgggggacccccgcgcccgggggaagccccgcgcggggcgccctccgcctgcctccgtccctccgcctccccgaggtccggggctgcctcctcgggccgcgccgggccgccccgcactgcgcatgagcgggagccgggcaagcccgtgagaggagccgccgccgccgccgccgtccattcgctgcggagccggaggaggaggggagaggcctggaggacaccaacatggtgaggcactgcggccgcccgcccgccctgccggctgggggccggcgctgccgcgcacccccgccccggccgccctccgtcccgcggcgaccctgcagccccgagcctcggcccgcggcctccgtcccgctcccaggcgggggctctc

SEQ ID NO: 31080 - DNA, 2300 bp, Homo sapien
atttcttgtaagagcttgtcaaggctcttcagaaagagaagccagcttttatcatctggggagggacactagaacttagggaagctgctggacctggtttatagagttcaaggcatttggcatctggccttcaaacagaggtaaaacaaaggggctcaccatttggtgagtcaagagtctaagctcgaggacctgcctgtgcagtcaagccttcctagaacaagggttgaatgatgactgatgtaagtgtcctgggttcaggctgcagatacagatagttaacagtgttcagggaaagctggtgaaaatgtcaaggttaggggttccggagagccagtgtcagcctgagagaactcaaatggcacatatctccaaagacccagaggcatgattggggcctgtcttttctgggctcaagtggaagccaagcttggaggaaaatggacaggcaaagacaagtcaaggtgaacacaagagacagagttttgctctttttgcccaggctggagtgcaatggcgtgatagctcactgcaacctctacctcccggcttcaagcaattctcctgcctcagcctcccgtgtagctgggattacaggcgtgtgccaccatgcccggctaatttttgtgtttttagtagagacagggtttcaccatgttggccaggctggtcttgaattcctgacctcaggtgatccgcctgcctcggcctcccaaattgctgggattacaggcatgagccaccacacctgacccagaattatttattaaaacgttaaaaaactggttccaagtctattgtgaacagtgctgcaataaacatacacatgcatgcgtctttatagtagagtgatttgtaatcctttgggtatatacccagtaatgggattgctgggtcaaatggtatttctggttctagatcctaaggatggaatgataataggtaacatagtgctgactgtatgccagacacttttctctgaagcatggaaagcttaagaaacttgtctagatgacaaagtaagtatagagacaaaatttgaacctaggcaatctgtctgcagagcctgaggtgttttcaaaatatactgccataaaggtatttaacttagttccgtttcctttcattcttaactgctgtgcatcctgatctttcatatttacagattcagaaaaatgaaacttttgcttctgttttatacttaccggtttagttcaatgtcatgctaagttacttagagtctagattttcctgtatctatattgctttctcaggttgtcattttctcatcttggaaaaaaacttaagagtaaagagagaaagtgcaatgtgtcctccaatagccatttccaatttatactagttaattgaagagagtgatttgttgtattggtacataataactaaaatagtaataattatagtaacaacaaacaatagtgatcaccctgtttgtaatctggtatcatgcagtacatatcaacataacaaaattgaaaaaccatcattttcccctttctgttttgctttatcacccacttactggtgaagattacagcgtaggatgacaatgtcagctacactttttgcttggctgtgaatctagtcctaaacactaataatatactattttttaaaaaaaattgatttgggaattaagtgctaatgttttaaatgaaaactgagagtgtgttgctagtaagaagttttggttttgattatattgaacaaacactgatttttatatttgtaagttagccatcactttgcctgcttttgccatttaaaaactccgataccccaaatgatagactgttgccaagctgcatctgttttttaattttttgttttgcccaatactcaaatgagtagacaaaataatagtttttatttggctgcattgcaaaacctaaatgtacattttacctagaaaaaaagcaagaccattgatttactaagtctggtagccgctatacggtagatttcataagaaacactattctattgccagattgcagcaggagagaagattcctttgagccaggaagaaataactctgcagggccatgccttcgaagctagaatatatgcagaagatcctagcaataacttcatgcctgtggcaggcccattagtgcacctctctactcctcgagcagacccttccaccaggattgaaactggagtacggcaaggtaaagtgaaagaaaatgaaaagtctcactctttttaagtttttagtacattattgtttttggacacattcttatccctgagtcttacagaactgtctagcatat

SEQ ID NO: 31081 - DNA, 2300 bp, Homo sapien
tagtggatcccgcaccggggctgcaggtggagctgcctgccagtcctgcgccgccgtgcgctcgcattcctcagctcttgggtggtcgatgggactgggcgccgtggagcagggggtggcgctcatcggggaggcttgggccgcacaggagcccatggagtgggtgggaggttcaggcatggcgggctgcaggtcccgagccctgccccgtgggaaggcagccaaggcccggcgagaaatcgagcgcagcgccggtgggccagcactgctgggggactcagtacaccctccgcagccactggcccgggtgctaagtcccccattgcccggggtcagcagggctggctggctgttccgagtgcggggcccaccaagcccacgcccacccggaactccagctggcccgcaagtgccgcacacagccccagttcccgctcgtgtctctccctccacacctccctgcaagctgagggagtgggctccggccttggccagcccagaaaggggctcccacagtgcagtgggggactgaagggctcctcaaatgccaccaaagtgggagcccaggcaggggaggtgccgagagcaagcgagggttctgaggactgccagcacgctgtcacatctcaatggggggttacaagacatgagccacagcacccagcgtagttaatattttatttagaatttttccactgatacttacatgtgaaattggtctgtcgtgtgtgtgtgcgtgatatctttgttgattttggtatcaaagttatgtttactttttaaaaagagtttggaagacttccatcttttttgtgctctgggacagaattaatagcatttgagtcaattactcatttgtgtggaattttcttgcaagacatggagggcttttgtaacttttaggggtgaaggtgaaggtgaaagtgggccatggtggtagcaaggatagttctttgataaacttctctattttttctgtggtaacggtttgcttaaattttgtctcttccaggatctattttgataaattgtattttcttgtaacatcatccatttcatccagagttttaagttcacttgaagttaagcaaaattagcatcttacaaatctataatttgtttcctgtgtctgtgattttcccctgcttgttttttaaatcatgtcaaatgtgcatttttctctatttctgattagataactattttattttttgtgaacctgtgggtttattagtcctttgacactggtttcctgaattcatttatttattcctttatcttccctaatttctccctcctgctttcctcatgaagcatctacatgtagtgtttacagtttctttattctctagatgttcctcagtttgctctttgacttcctctttttcccaatagtcagttagaatacctgttttaagctcaggtggtttaaagattttcactttagcttatttattttttcatccctgagagcactagagaattgtgtatcctgctgtccatccgcatttggcttcttccccagggttcttctcccagaaggtgacgagagcgaagaaaccccacgggatgcaggaagaaacagtgacaggcaaccaagagggggaggatggagaaaacccttgccttagtcagagcaggccccaggggacgcagaaacaaaggccacacccccacgagcacgtggccagactgcccaatcgtcgctactgaagccgggctctggtctttgattggtgttcgtggagacgccctcacattcttggatcagcccaaaggtaggctcaggctccgacggtggccggcgggggtcacgaggcttcgtagtggaggaacgggtttggcgtgtgggacgcagctgcctctgtactggggagtcacggagtggccgggctccagggacatggcggcggcctctgcggtgtcggtgctgctggtggcggcggagaggaaccggtggcatcgtctcccgagcctgctcctgccgccgaggtgggtggaggggccatggctcagtgggcagaggcgggagcgaggggtgcacggacccgcgtgagcggtgggaggtgcggcggaacccagggtcggtgtggggaggacggtaggaaaaccccaggcactttcggaggggttctgccggcagtcacggcgtcgggaggaagacatccccaccagcccttccctttctccccgcttccgcacatccacgcttcagcgcgcctttggcttctgtttttccatttctgaggactgggcccgccatcctccaggctcccctcgccgtcgctgcagctcgtagc

SEQ ID NO: 31082 - DNA, 2300 bp, Homo sapien
cctgcttttattctcttatctggccccacccacatcctgctgattggtagagcccagtggcctgttttgtcagggtgctgattggtgcgtttacaatccctgagctagatacaaaggttctccacgtccccatcagattagttagatacagagtttcgacacacaggttctccaaggccccaccagagcagctagatacagagtgtcgattggtgcattcacaaaccttgagctaaacacagggtgctgactggtgtatttacaatccctgagctagatataaagactctccacgtccccaccagactcaggagcccagctggcttcacctagtggatcccgcaccggggctgcaggtggagctgcctgccagtcctgcgccgccgtgcgctcgcattcctcagctcttgggtggtcgatgggactgggcgccgtggagcagggggtggcgctcatcggggaggcttgggccgcacaggagcccatggagtgggtgggaggttcaggcatggcgggctgcaggtcccgagccctgccccgtgggaaggcagccaaggcccggcgagaaatcgagcgcagcgccggtgggccagcactgctgggggactcagtacaccctccgcagccactggcccgggtgctaagtcccccattgcccggggtcagcagggctggctggctgttccgagtgcggggcccaccaagcccacgcccacccggaactccagctggcccgcaagtgccgcacacagccccagttcccgctcgtgtctctccctccacacctccctgcaagctgagggagtgggctccggccttggccagcccagaaaggggctcccacagtgcagtgggggactgaagggctcctcaaatgccaccaaagtgggagcccaggcaggggaggtgccgagagcaagcgagggttctgaggactgccagcacgctgtcacatctcaatggggggttacaagacatgagccacagcacccagcgtagttaatattttatttagaatttttccactgatacttacatgtgaaattggtctgtcgtgtgtgtgtgcgtgatatctttgttgattttggtatcaaagttatgtttactttttaaaaagagtttggaagacttccatcttttttgtgctctgggacagaattaatagcatttgagtcaattactcatttgtgtggaattttcttgcaagacatggagggcttttgtaacttttaggggtgaaggtgaaggtgaaagtgggccatggtggtagcaaggatagttctttgataaacttctctattttttctgtggtaacggtttgcttaaattttgtctcttccaggatctattttgataaattgtattttcttgtaacatcatccatttcatccagagttttaagttcacttgaagttaagcaaaattagcatcttacaaatctataatttgtttcctgtgtctgtgattttcccctgcttgttttttaaatcatgtcaaatgtgcatttttctctatttctgattagataactattttattttttgtgaacctgtgggtttattagtcctttgacactggtttcctgaattcatttatttattcctttatcttccctaatttctccctcctgctttcctcatgaagcatctacatgtagtgtttacagtttctttattctctagatgttcctcagtttgctctttgacttcctctttttcccaatagtcagttagaatacctgttttaagctcaggtggtttaaagattttcactttagcttatttattttttcatccctgagagcactagagaattgtgtatcctgctgtccatccgcatttggcttcttccccagggttcttctcccagaaggtgacgagagcgaagaaaccccacgggatgcaggaagaaacagtgacaggcaaccaagagggggaggatggagaaaacccttgccttagtcagagcaggccccaggggacgcagaaacaaaggccacacccccacgagcacgtggccagactgcccaatcgtcgctactgaagccgggctctggtctttgattggtgttcgtggagacgccctcacattcttggatcagcccaaaggtaggctcaggctccgacggtggccggcgggggtcacgaggcttcgtagtggaggaacgggtttggcgtgtgggacgcagctgcctctgtactggggagtcacggagtggccgggctccagggacatggcggcggcctctgcggtgtcggtgctgctggtggcggcggagaggaaccggtggcatcgtctcc

SEQ ID NO: 31083 - DNA, 2300 bp, Homo sapien
atggtggtgcacacctgtaatcccagctactcagtaggctgaggcaggagaattgcttgaacctggcaggcggaggttgcagtgaggcaagatagtgccactgcactccagcctgggtgacagagcgagactccatctcaaaaaaaaagagagagagctattgccacgtttgccccaaagccacaagcatcttccacaggcagctcccagacaatgactgagcatgcagggatactaaggtgaaaccattcccgggacacattgtcctcatctgacagctgactttggcttgagaacttctcaactgccagaacttccccagactgcacggcagaaatgcttctgcccagtgctctttccctttctccttcatgcaagttcaagctggcatcatggtctgaaaactctccagcaccttggctccctcaccattttctcccacagacttttcacctgataaagtctggcatggttaatcccatcttggcatctttttctttaaagtcccagactaacgtaagtggtgctgaaagtgccccaagaaaagaggcagtaggaaggggatttggaactggctcacccatcacccagcagatgaggggatactgtcctggttgataggtggacgcagatagttcctggacctgggtggcagctcagttgctaacgatttcattggtggtgacctgagaaaagatgcttttggaggggaatgctgtagcaggtgtgatttcacaagcatttaacaatatgggagaacaatgcctaccaagacagcagaatgggctgtcctactaaattgtgttgatggccctgcaggggaataacagactgagggctgttaacaagcagtgaatcaccaaatatgagagtaggagagccttgggagcagcttacaaaacaggcattatcttccgcagtggcaagacagactcggttttgaacagctggtcaaaaatctaattgcaagctgggcttgatggcgcatgcctgtaataccagcaccttgagtggctcaggtgggaggattgcttgagcccaggagattgagaccagcgtgagcaacatagagagactcctgtctctacaaaaagttaaaaaattagctgggcatggtggtgctcacctgtggtcccagatattcgggaggctgcggtgggaggatagcttgagcccaggagatcaaggctgcagtgagcagtaatctcaccactgcactccagcctgggtgacagggcaagaccctgtttcaaaaaaaaaaaaaaaaattgcaagtctacagagcctcaaagagatttgagtgtctggtgcaggcaggtctggtatacaaagtgcagggccctggtggggaaatccgggatcctgaaccatagctcaggggcactgagatggattccgccagtgatatttgactctgcaaaagcccagagcctctgggatttcagatgtagcccagccttccctacttcgtgctagcacatcagttttctggaagatgctactgaagcctctctcacaaggcaagaggtgacccctcaggagttgcctcacctcttctcctccttgccaggctgagaactagtatgaaaatgcagctgaacacatgctgggcctgattgaggcaggagaatcgggaaattggggttagcagggtttcagcaagtgcagccagtgcgcacgggcaggggaacagtaggtgcagccagtccgcacgggcaggggaacagcaggcgcagtcagtgcgcacgggcagggaaacagcaggcgcagccagtccgcaagggcaggggaatagcaggcgcagccagtccgcacgggcaggggaaaagcaggtgcagccagtcctcacgggcaggggaacagcaggtgcagccagtgcgcacgggtaggggaacagcaggtgcagccagtctgcaccggcaggggaacagcgggtgcagtcagtgcgcatgggcaggggaacagcgggtgcagtcagtgcgcatgagcaggagagccgcaggtgcagcatatagatcacatcctcgctcccatgacaacaagcccctttagccccccattggccgccggccagtccttcatggggtgtggccaattggaggcttctgagggtttcctaggggttttgctgggttctttctagcttaatttaaaaaaaaccctacttgagggggctcttcagcaactgcttgctcgagcccactcccactctgtgaccgtcttcaataaatctgtgcccactccgtggtgttgtgttcaactatttgtccaatacgccaagaacctggacatcacattta

SEQ ID NO: 31084 - DNA, 2300 bp, Homo sapien
gttgactggcacaagttaaccctcacttttcaccataaaaattccattctgaaacacactgcaagctttggttaagtttacttgattagtgtttggagcaacatagtaagacaaaatagttgtagccaaagttatttttcagaaaataatttgaggctaggctgaaagccctcaatctagtgataaggagggtctcctaatatactgcttaaatgtgtattccccactgggactcaagccctgtcaaaacatcgttgttttgacagacaatccaattaatagaggaaggagataagacattaaaaggttgcctgtcagcgttgttgagccgtgggccgtggcttacgcctgtaatcccaatggttggctaacgcaggaggatcatttgaggccaggaactcgagaccagcctgggcaacacagcgagacctcctctctacataaaataaaataaaatagctgggcgtggtggcacgcgcctttggtcccagctactcaggaggctaaggtgggagactcacttgaggccaggaggtcgaagttgcagtgagccgagatcacgccactgcactccagcctgggtgatagagcgagaccctgactccaaaaaaaaaaaaaaaacgatattgtgtgttttttgttccaggattttctggtctgtaaaaccacctggggccaggcacagtggctcacgcttgtaatcccagatctttggaaggccgaggcgggcggatcacctggggtcaggagtttgagaccagcttggccaacacggtgaaacctggtctctactaaaaatacaaaaaattagccggacgtggtggcgcacatctgtaatcccagctactgtggaggctgaggcaggagaatcgcctgaacccaagtttgcagtgagccgagatcacgccattgccctccagcctgggcgacagagtgagaccctgtctcaaaaacaaaaacaaaaacaaacaaacaaaaacaaagaaagaaaaagaaaaaagaaaataaaaaaacacactgggagtgggcattattatgtccgttttacagctgaagaatccaaggctcctagaggttccccgacgccgcacgccggggagtcggcagcgcgagctcccagccagacctagcgcctctgggctgtgctcctgttgcttcccgcaaaccgcggtcctggcgaggcctgggcgtggagcgcggctgccgcagactccctgggaagacatggagtcagggtgcttaggggtttttaggctcctgctcgcctagtggctggctttctcccggctgagaagcgtctctgggttcccagaaaggtacccgagctgttagaaaagaggagaccctgggccgggcgcagtggctcacgcctgtaatcccaacactttgggaggccgaggcgggcggatcacaaggtcaggagatcgagaccagcctggccaacagggtgaaaccccgtctctactaaaatacaaaaattagctgggcgtggtggcgggcgcctgtaaccccagctactcgggaggctgcggcaggagaatcgcttgaaccagggcagtgagccgagatcccgccactgcactccagcctggcgacagagcgagactttgtctcaaaaaacaaaacaaaacaaaacaaaacaaaagaaataaaaagaaaagaaataaaagaggagaccctggccgggctcggtggctcacgtctataatcccagcactttgggaggtcgaggcgggcgaatcacgaggtcaggagctcgagaccagcctggccaatatggtgacaccccgtctctactaaaaatacaaaaattagccgggtgtggtggtgcatgcctgtaatcccagctactcgggaggctgaggcagaagaatcgcttgaacccgggaggcagaggttgtagtgagccgagatcgcgccactgcactccaccctgggcgacagagcgagacttcgtctcaaaaagaaaagaaaaagaaaggaggagacccagggtatgagcggaggaggccggcgctgccgggaccacgcgcgtgcggtaaacggtcccagaggcccgggccccggcggctgcgccgagtccccgcccctccctgctccgtaggggtaggagggggccggcggagtttccctccccgcccagcggccctgggcgggcttttcggctgcttctcataagcaggtggtttcgtttctccggcacaggtaggtttctctggcaccgattcggggcctgcccggacttcgccgcacgctgcagaacctcgcccagcgcccaccatgccccggcagctcagcgc

SEQ ID NO: 31085 - DNA, 2300 bp, Homo sapien
agtgcttccgcatagattaagaaaatattaaaccctgtgactacattgtgctgtagaggacaaaaagagtcagggccagatgcggagcagcaaaggggctagctgttcttcactgcagaacttgagatgttaaaaaaatacattgaataaaccaaaatttttttatgtgtatttaccaggtaacagataaatacagcatgtaggtagcagggagataaaatacctcaagcccatgcaaaagcctttagagctgaaacaatcaccccaatcacatcctaaatgtcactgtggttgtaattggaacattggtctctttaattagttactgcttttccgctgaatgctgagtctttatgttcgggaggtgcagagcgctggcttatctctttggcatctttaatggtggtgcaatgtggggagggccagggacaagtggaggaaggaaggacagagttgggggagattcagtgtggaaatatgatgttatagcttttacatgtaaatcattagtaaatttccacttagcagcctctatggagttctttgtctctataggagtttacaaatgtcctcctctgggatgattttaagtataatttttcccacaggaataaggcttccacattaaatataggaatatgatactcagattgtattctttttctttttcttttttctttttttgtgagacaaggtctcactttgttgcccaggctggagtgcagtggcgcaatcttggctcactgcaaactccacctcccgtgttcaagcaatcctcctgcctcagcctcctgagtagctgggattacaggcacacaccaccacacccagctacttttttttttttttttttttttttttttgagacggggtttcactcttgttacccaggctggagtgcaatgacacaatctgggctcactgcaacctccgcctcctgggttcaagctgttctcctgcctcaacctcccaagtagctgggattacaggcgcccaccaccacactaagctaatttttgtatttttagtagagacggggtttcaccatgttagccaggctgggctcaaactcctgacctcaagtgctctgcctgtctcagcctcccaaagtgctgggattacaggcatgagccacccgcccggccatatggtattttttttttcagtaagccccagggaataggggtataaaagagagagaagcctatttaaaaggagctaggtttttccatgctttaaaaaagctaaattctggccaggcacagtggcttacgcctgtaatcccagcactttaggaggccaaggtgggtggatcacctgaggttaggagtttgagaacagcctggtcaacatggcgaaactccgtctctactaaaaatacaaaaattagccaggcatggtggcgcacacctgtaatcccagctactcgggaggctgagacaggagaattgcttgaatccaggaggcagaggttgcagcgagccgagatcgtgcctctgcactccagcctgggtgacagagtgaaactctctctcgctctcaaaaaaaaaaaaaaaaaaaaaaaaaaaaaaaaaaaatatatatatatatatatatatatatataatatatatacttatattttatataatatataatatataaatatttaatatatataattaatatataaacatataattatatattaatatataaatatttaatatactatataaatatttatataatatatatacacataagaaacatatagaattcagctatatagctgaattctatatgtttcttatgtagcaggaatataatttccatgatttatgaacttcattcgtcactagtacaatgcacagaggtagatgattttgcttgtctctatgccgtatacctaaatcagtaagcatctttagccaccatgctttgggagcagggagacagatcaatatccacccttctcagtcagggttggctggatccctggctcctcatctctgtcctgttttccttcttcactttgcagatggtatacttttgatttccaacaaggcatttgttttccacaggatgggccaaagagaaccaaagattcagcattctcaactgaactacaacaagctttggcagtgatagaggatttgatcaagtcctgtgagttggctgtggacctagcagcagtgactgaatgtccggtatgttccatagtagtgttagagcatctcacacaaaaggcaggtgcaatactacacagtgaggaaatgctctggcaaagtcagagagatcgtctatggtaaaggaattgg

SEQ ID NO: 31086 - DNA, 2300 bp, Homo sapien
acagattcactggacaggttccctatagggcctgtgaggaaatctggtctaacagaatccagaaagacaaatttcgctaaacaggtcaagcctgatactgctgctacacttcagctgtgttaagccactcggttatcagacctgcttctcctttcatgattttagtaacacaggcctcttccttgggcccctgttgctcccaccatctcccaggttctcttgtactcagggtttagtctcccctccccactactaatgatgcatgtgccttactctctgatcatctctcctaaatctgctactcctctgctctttctgtgccttatctatccctgccgagtctaacatgcagattttggtcattccaaagtcatgtatagatctaatcacagggctctctgcttaccagctgctacttggataaggaaagcatgccaacacggtcctccttcttcatgctggccaagtcagcatcattattattacctaagtttatttctaacacatctcaatatcttcatgcactccctcttgataaaagtaactgagcatagcaccatcaataccatcaaatctgtcattctcttcccctctctctgggtgggacaggaagccaggctgctctaggaaatcttccctaacaagcaaaggggacttgcctgtcctctcgcatgtgtgatctgagcttgtgtggatcccagagtgggcattctggactacttgaccttgcctatctctccttcacaccctctcatctctccctcctaccaccaaaaaacttgcatcgtatttccaatctccagacatacttttgaaaccatttatctatctggtgtgtttatctgtatctagtatgatgtgaatatgtgatttgtatgtgtgtctaccactgttttggtcagtttgtatttctcgtgggtacagttctatgtgctcatgtatgtggaacatatgtatactgacacatggacctagctccaaatgatctgaaaggaatataattgtaattgaatatttgcacagatatacaacatacacatgtgatggctgggggaaatgcatgtgggatttcagtcagcattttattagagaaggtatgtcattagtgctgtattaacaatgaatcagcttatttgtgggtcactgtcaatgactcctttgcaaatcacacatgtaaatatttctgtctgtggtctgatgaacatgcagtgccacagtctgggagatgctgagccatgccctgtgtaggcagcatatgaaaagaactgcatgatttaaaagatgctgaccagcttaaggaaagcaatttaaaaacttcctaaaaatctagtttgaatgaacaacagttttcattttgtgtgtgtgttttttcttttagagatggggtcttgctatgttggccacgctggtctctaactcctgggatcaagcaatcctcctgcggctcagcctcccaaagtgatgggattacaggtgtgagccaccgtgtctgctggccccactgttttaaaccctgattcgacaatcatacatttaactcattacctgtcttgttccttttacgacaaactcaaagcttttattttactaaagtatttgggttaatcttttgcttttctgtcatgttctgaaatatgtacaataacagaatcgctcaaaatattatctccgttaaatgttttgtggctttagggagaggtctaacaacatgcgggaaacaagaaatcaagcgcatccaggattcatttataatctctctcgttgagtagaagtccgcatctctcgatattgtctggttacctgcatgaagtattctaaaggaggaaaatagctcaaagaggacattcatgtgcactctggcttccagttggccatttgagtaagtgatcgcaattaactgacgagcggcagggaaacacttcctggaattctcatctacagacaagaacaaactggggcggggcccatcaccttcacctacgcgccgggagggtggcggctggcgggcggggccgggctcgggccgtgacgccgagagtgcggggcgcgcggctgggagcctcgcgcccccgcccgggcccgcccccatcccgcccgcatacagcccgcatcccgccggggaagcgagcccagtccagcgctgcccgtccagtcctcgcccaagatttaaagcccgcaagttttgttcttgagaccagcgactttagctccgatgcgggaaggaaagccgacctccgatttggacatttaaagagctgggcttgaacttcgtgagtttcgctctaaactgcccttgaaat

SEQ ID NO: 31087 - DNA, 2300 bp, Homo sapien
aataccatcaaatctgtcattctcttcccctctctctgggtgggacaggaagccaggctgctctaggaaatcttccctaacaagcaaaggggacttgcctgtcctctcgcatgtgtgatctgagcttgtgtggatcccagagtgggcattctggactacttgaccttgcctatctctccttcacaccctctcatctctccctcctaccaccaaaaaacttgcatcgtatttccaatctccagacatacttttgaaaccatttatctatctggtgtgtttatctgtatctagtatgatgtgaatatgtgatttgtatgtgtgtctaccactgttttggtcagtttgtatttctcgtgggtacagttctatgtgctcatgtatgtggaacatatgtatactgacacatggacctagctccaaatgatctgaaaggaatataattgtaattgaatatttgcacagatatacaacatacacatgtgatggctgggggaaatgcatgtgggatttcagtcagcattttattagagaaggtatgtcattagtgctgtattaacaatgaatcagcttatttgtgggtcactgtcaatgactcctttgcaaatcacacatgtaaatatttctgtctgtggtctgatgaacatgcagtgccacagtctgggagatgctgagccatgccctgtgtaggcagcatatgaaaagaactgcatgatttaaaagatgctgaccagcttaaggaaagcaatttaaaaacttcctaaaaatctagtttgaatgaacaacagttttcattttgtgtgtgtgttttttcttttagagatggggtcttgctatgttggccacgctggtctctaactcctgggatcaagcaatcctcctgcggctcagcctcccaaagtgatgggattacaggtgtgagccaccgtgtctgctggccccactgttttaaaccctgattcgacaatcatacatttaactcattacctgtcttgttccttttacgacaaactcaaagcttttattttactaaagtatttgggttaatcttttgcttttctgtcatgttctgaaatatgtacaataacagaatcgctcaaaatattatctccgttaaatgttttgtggctttagggagaggtctaacaacatgcgggaaacaagaaatcaagcgcatccaggattcatttataatctctctcgttgagtagaagtccgcatctctcgatattgtctggttacctgcatgaagtattctaaaggaggaaaatagctcaaagaggacattcatgtgcactctggcttccagttggccatttgagtaagtgatcgcaattaactgacgagcggcagggaaacacttcctggaattctcatctacagacaagaacaaactggggcggggcccatcaccttcacctacgcgccgggagggtggcggctggcgggcggggccgggctcgggccgtgacgccgagagtgcggggcgcgcggctgggagcctcgcgcccccgcccgggcccgcccccatcccgcccgcatacagcccgcatcccgccggggaagcgagcccagtccagcgctgcccgtccagtcctcgcccaagatttaaagcccgcaagttttgttcttgagaccagcgactttagctccgatgcgggaaggaaagccgacctccgatttggacatttaaagagctgggcttgaacttcgtgagtttcgctctaaactgcccttgaaatgaagctggacttggaggtaaagtcactgggaagctggcctggggcggggtttccccctcttctcgtattttagaaacggacagcggcagtgcagccctagtttgctgtaagtttccttactttgttactgaggcccccagagctccacgcataagtggtgtgaccagaaaccttttaacaagacccgcctgagcctgcgttagagctcccgctcggaaagtaaaagaccatcctaatccgcggcgctgcggaaccggtgtcccgtgtgggaggaaccgcggcgttccctgggcgtagggcccgcgaggccagcacagtccgcctcttggcggagcgccctgggccggtggttccgcgcggagttagtctgtggtcagttacgtggtgaaaacacggctgtgccgcggccgcatctttccgcggccgaggcctctctgggtgggagtgttggcttcctttccggatcgctaaatggggaaagttctggccgctcggcgggatacgtctccaggccacggatggttcgttctccgtgccgcggccccgagctgggctccctgg

SEQ ID NO: 31088 - DNA, 2300 bp, Homo sapien
tcacatgatcaaaatggtatacacaccataaggtgtccttagacttgagtgtggtgtaagtctactgaataaaatgcagaaatacagttcactgttgcttttcttcctggaaattgccctccccaacctcaaaccagcccccaagtggggcagggtccatctttagaccctcctgtagcacccagcacaaccctaactatatggtcaatgtctctcttccccacttagagctccaagaccagggccttgtttgtcctgcttacccactctacccatttgttaaccccatcttaattttctgatgaatgagcccttttttcattgactcctcctttctctccttctccggagtttatttttcctccaggcccattgctgtctctccacctagagagcttatccacattcatgaaattagtcatcttcatgctcagagtacccacctggatctctccagtcctgtctaactcgtcttagattattaccccctggacatctgtaccttcttgtctctccatcgcctcgaactcaatgcgagtctaaaatcaaatactccttcactcctaactcaggaaaccagttttccctcccttgttggtaatgcttgaaattagctcttacttctcttcttcctcctttactcgccatcccaggtcattcatcaggtcctgctaggtctttgattttcttgaaagggccttctttatgccttccttccgtccccatttccaccaccctcgactaggccttcctcacctcatccggcatcagtgtgagcccttgagaaaccagcgtcctgatcttcaggcattctgcatttcaccccataccaccattagccagtttaatccctcttgctcaaacttaataaatactgagcaagggagttactataacaaacaaaaccagaaatttctatgacttcctgctgctttctgtacccccctaagactcctctacctgattttcaaggttctccataagcaggttcccacctctctgctttcaaatcttctatctgccatacacagttcttgtctaaaacaaagattgttcctactcctgcagccacctaaatcctagtcgtcctcaggccctcctaaaatcctgactaatccaacccccaccgatttctctactagtcccagagacttccctcttgtgcctggggttggtgtcatgcagacacactgtaccttaccaggatttgcccattgttgtctgtgggaactatgctttcatgtgggaactacgagtcttgtcacaaatagagtgtaaatgctttgagattggagactgtaaaatacttcttcatgatctcccactgtgtctggtataagaacccgcagagtaaatactcatatacttgtaggattaattgaaacaactggagactgaggttgtttaacttgtacttagaagtgtggacctccccatcttgattaaaacttcaaaacggatagcaggtttcacatattatctcagcatcacaaaagtagactcaacaaagaaatgagttgacagcaggggtaaggtttacaacaatcagggattattgcagggaaacttgtagcctttgggtgttctaactagttttttcccaaaaagtttaaagagctctcttgtgaaagaatattcttatgagtaactgaggggcacggctcctagactgaaaagtatttgggatctgtcacctcttttctgatgttcctacttctattctttattcttctgactacctctattagaaaagataatactaagaatacctgtcccttcttctcagtccaaatagaagcaaacccaggttgtatctgagatatctgcatattttcttctaagcaattctttgtcctcttctctcccatgctttttctatttcctattttcagcaggctctgaagtcatttataatttttactgcccctcggtgacattacatggatattcatccctgatttgcagattaaagcaccgaatcagagtgaggtgagggttgcccaaggttacacaataaatctggccccaaacaggggtaacccttgagtttctagtctgttgattggccactgacccgtgctgcaggcacacaaaggaagctgcacccacagcagtctgttgtggatggttgctgagctgcgcattcggcattgggcttgctttgtttcctgccaggcccagcattttcttctaccagatcggcaggcttgtgggcttcttcctaggtccctcccctgcactctgaataggaaagctggaagctgtgctttagagaagctttaagacgccgaaagaaacca

SEQ ID NO: 31089 - DNA, 2300 bp, Homo sapien
aagttaggtagttaagtaagctgccagattagtaaacagctagtttcaaatcccagctccaacatttactagttgtatgacccttggggaaactcaacctctgagtctcatggcactgctgataaaacggaaaacatcatcctcacaaggttctgaggactagggatggactcaggtacacacagcacccagtacaatgtctggccttcagccagtgatagcaacccttcactcacctctccattcccttccagcccctgcattcaaaaacttttatttatttatttttttaatttaggaggctctttgctcagaatcctgaaaaggcttttgttactttattttttcttttttttcatcttctgggagcacagaataggcttctgctcctttaaataactttaacaggcaccaaaggaacactgctagctctttcttaattctgtaggtccacatttaggaaaaagaaattgtcagcctctgacttatttccagcttacaaaaaggctgtgatgttggcagcccggggaaagcagttcccgtgagtcatgctttcacctttcagccagtgaagaacaggaaatagtcacatcactattgccaacaagcacagcgaatcgcttccaccaccgggctttcccagatgacgtcagtgagccaagtgcagggcatcacccttgccagatggccccggaagagtctcagctgccctgtcaagtttagcttctcaagctccccagaaccagcatggcaaggatcacccctccagaaaaggaaatgatttctctgatcatgatcaaaccatgtcataattttagctgtaggtggtgagtatcagtgactgtattatagatggttttggttcacagctattttttttctcggtatatttactctcaagggcaaaggggtggcatttatcacaatgctatgattcactctactagactggctgggtttcatttcatctttgagttctagacctaaggccaaaaggatgtcagaatcgccacccagagctagatgcatgctcaatgcaacctggccatctctctcggacagtggccactaaacacaagctgcaatgattattgttgatgttagtcaattgatttgtcccccttttaataatccatgatccacacagacatgaatctaaaccttttttttgaacctatctttttcttactagttttcttacatattttggaataacaatttccctggttataatacacaatgtgtgaaacactaattgcatttattggtcctaaattcattcccaagtctaggatttggggatttagtgcacaaatccactttcttcctgctcatgttgttcatgactttatggattctgcttacatttcctcccaaagccttggtctttctaagcagaaatctgaccagcctctgttcctactctgcttcctccaccaccttgactgttaacatacactgttgtgggagaagcttttcattaaatacgcaaacaaatcaacaataaggaagaaaacaactgaagcacagaaggatgattgtaacatggacttgtgcttgtttaacagtacccatactgtttggtgagttgcctaaatacagagggagatggcaacttaacaggatgggtttggagtctgaattaaataaacaacatggcaaaagaaggaagaaaccaaaagttgggtgactagggcttcttggattctactcaacactttccacacctacaggcctctgattctatccccaccgctgctcctacactgtctatgtttctcttttacaacaacaacaaaaaaatagcacttgtttactgttcacaattattgaaataaatcactctaatttggattcctttatatgagaacttccatatgcttaaaactcccgtagcatttttatagtgtacaggtcataaacatgttgtctgaagatgggcaaagtaggtcgtagagataggaagtgagttcacatcacggcgtgagtcaaggcagcagcatatgagctcaggggccaaatctgagctgtgatcatgtgacacagtcctcaccttcagagatgacattctcccagaagtccagggtgcagaaatggataggctgatgttcacttttgaagaggaccacaatgaaacccttttaatattactcaatgattccacagacctcctgggtgttaaatcaggtgaatctatttttaaaaattgctatttacttttttaggtggctgatcaggacagtatgaaatttcatacagtttcctaacttgagaaaacatggtgatgcaattcctccaac

SEQ ID NO: 31090 - DNA, 2300 bp, Homo sapien
aaaaccttttttttgagacatggtctccttatgttgcccaggcttgtctcgaactcctgggctaaagcgatctcctgcctcagcctctcaatgtgctaggattacaggtgtgagccactgtgcctggccaaaaaaccattttcttaacccttctaccctctagccttttatattcttttttttttttttttttttttgatggagtctcgctctgtagcccaggctggaatgcagtggcgtgatctcggctcactgcaagctccgcctcccgaggtcacgccattctcctgcctcaacctcccgagtagctgggactacaggcacccgggaaaaacccaccacgcccggctaatttttttttgcatttttagtagagacggggtttcaccatgttagccaggatggtcttgatctcctgacctcgtgatctgcctgcctcggcctcccaaagtgctgggactacaggcatgagccaccgtgcccggcctatattctttcaaataaacttgataatcatttcattaattccccccatccccacaaacttactgtacttttaacaacaacaaagaactagctctaattactcaacagagtagtctctaatcttgaagtgctttctagtacaactgctttgggaaaagatttgacagtttcttataagttaaatatacacctaccctttgactcatcaataccatttctagatatttgtctgagagaaaggtaaacatgtctacacacaggcctttacatgaagattcacagcaacttcatttaaaacagcccaagttggggaagaacctgaatgtccatcagtaggagaatgaacaagcagtagctgtccatacaatgacatgaaactcagcaatgaaaatgaatgaactactgatacctactgtggatgaatctcaaatgcgttatcctgagagaagctagacacaaaagaatcaatactgtattattaacaccatatgatgttttggaacaggcaatactagtctctatcgaaaaaagtcacagtggtggttgcctgggaaccagggttgactgggaagggacttgaaggtatcttctggggttatggaaatgttctgcatcttgaaagagggatgggttacatggatgtattcttttgtcaaagctcaccgaaatgtatagtttcatatttgtacatttttatccctccccccaaattaagttaaaaacctttaaaaaaattttttttttaaaaaagtcttccagtttcttgttggccaatggcaaggcttactctgaaattttagcttgaatgatacaaagatgagaagcttgtgtaaaaacatttattacttgctgattggctatttcacattgtgctctttctttaactatggaaacacattattaataaataccattaagcatgaggaaccaaaataaaatgcatcaggaaaaggcagcctctctctgagtatatcatcctctctgcacggcagtttgaaaggtgaactcactttccccaagtggtagtgagtaggctcttgatcacatcatgacaggcaaagaatatccttgtttgagaatcagactatacttgcacctgatcttcaggagtcgttcaggaggcgctctacatcctgtctcaggatctgaacctttaccgtttgccgtgtcaatttaaggtgcctgctcagatagtgaatcttactggctgcagcgttaagcctctggattttattactggcagcctagagaggttagaagagaaggagggtagaattgtggcctggaataagtttttattttttttttaaatcatcctttacaaagtttatccctatcgttttattttaagtatctggtggcctgatttgtgtcttgtgatgatgtgatacttctaaaaaaaaaaaattctgattctcattgaggctaggatgtccctcgctgtcatcccccagttttccttttgtttctaaatgagtacgtctgataatctgctggggctgtaatcctgtgagcactcaccaatcaaaaggatcaactctcggccacgaaatgacctcgagtgaacttcagggagattaaccgggagaaaggattgaacatttctgtgtgagtgcagtgcctagagagaaatggagagcgagcgaggtggcgccgtttcctggaatccagtcgtggtctggtgcatgaagtgtgagcagcaagatcctagatactcaccttacaccttggtgcggataacagaggcagagatgagggcctatcaccgtttagtaggaagttgcatcaggctggaatatatggcaaaaaaaggt

SEQ ID NO: 31091 - DNA, 2300 bp, Homo sapien
attctcctgcctcagcctcccgagtagctgggattacaggtgcgtgacatcatacccagctaatttttgtatttttagtaaaatggggtttcactatgttggccaggctggtcttgaatgcctgaccttgtgatccgctcgccttggtctcccaaagtgctgggattacaggcgtgggccactacgcccggccttttaacccttttttgaatctcttgcaaaaggtggttgtgaaaatggttgctcagtggccgggcatgatcacttgagtccatgtgtttgagaccagcctgggcaatatggtgaaactccatctctaaaaacgaaaaaaaaaaaaaagaaagaaaagaaaaagaaaatccttgctctgttttgcaggcagagtgcaaagtgcccaaacttcacagggggaagaacctctccacaaatctcatgacacaggtgaactgacctcgcttctcaatcacagcccacaattgttagagaaagcattaaaaagggctgggcgcggtggctcacgcctgtaatcccagcactttgggaggccaaggtgggcggatcacgaggtcaggagatcgagaccatccttggctaacacggtgaaacaaaccccatctctactaaaaaatacaaaaaattagccgggcgtggtggcgggcgcctgtagtcccagctactcgggaggctgaggcaggagaatggcgtgaacccgggaggcggagcttgcagtgagctgagatcgcgccattgcactccagcctgggcgacagagccagactcagtctccaaaaaaaagaagaaaagagaaagcattaaaaaaataccctcagccccctgtgatgggtggctactcctagaatttggatccagggtgtttgcggcttggctttttacatatcgaagaggaaagagatggctgagaacatccgcctgggtggtcccgccattccgcctgctgagtattcagggactcccgctgtagaaaggattgggggacaacctgaccgaattcgcatttgctcaggcgtttcccgtagcgctctgctgaactggggttagtcttttgctgccagtcagaaagtgtctgggcccaactagggaaaccacgggataatgggctgatggggaggaggaccagcatggaggatgtgccacagcccctccagaaggtagcactggcgtgcctgacaggtgacagacggagcagaggcaagggcgcagctgcacgaaggaaaacgcccacatagggggtgagcgcgcccacgcgtgctcagccttgtcggagcgcagcccgggcgccgggctcccagtgcaggtgtggccagcggaggtcaagaactgcgtggaacaaccccaagtgggggaaaacacacgccagccgcccccggggtcaggaggtggggcaagcagcggcgcctcacccagcctcccgctccgggtcctgccggatggcggcagctctccgggccagcccccttctctccgcggctcctccgcagacacccggcgcggaagaaggaggggcggagacctggccggcgcgcgtctgatgatccggaccccggtgcgactggagcgcctcagtcactgtctccccgccccacggttccgagtaaggaccggagctccactccgggggtggagcgcgggctccccgcagggaaaggtgcgcagcgttcccgaccccaaaacgagcggcgcttgggagcgtgcgtgcctccccgagagccccgggcgccacccgtgggctggacgaggtgggcgctggggcgtggggccggcggcgcagagaagccacggccacctgccgcctcccctgcacctggcggagcatccctcactctacagtccctggaggcggcgccggaaacctggcggccgggaccgcgattctggaagccccggagctcgcccggccggaggagccggggcgcggttccggcgagattggcgacttgcttccttttgcagaacggccgctcctctctcggtccagctgcgacgctgggaaagcgccagacttggtctgtcacgggagcccccgcggggcgtggcgagggagagctggcctaggctgcgagggactctcgtttcttgcctggagagccaggaagagggcgagggcagagcatccttgggcggagatgcctttaaaaaatcatccaccgcagcggtagaaacagttttgtttggctttatttatacggaatggtttttcagtgaaatgctgtcttgcttaaaagaagagatgcctccccaggagctcacccggcgactggccacagtgatcactcatgtcg

SEQ ID NO: 31092 - DNA, 2300 bp, Homo sapien
tttttttaaaaatcaagaatgtatgttgaattttaacaaataccttttttgcattttggagatgacaaatttttctttttctttataacgatgtttagagatgggaggtctcactacattgcccaggctggcctagagctcctgggctcaagggatcctcccacttcagcctcacaagtagctgggactacaggcacaagccactgtacccagctatttctagtaaaatagaaatactttattataatttttatttgatttaggatttttccagtaatattcatgagtatgaatttttttttttttaattttttagagatggagtcttgctctgtctcccaggctggagtgcagtggtgtgatcttggctcactgcagcctccacctcccgagttccagcgattctcctgcttcagcctcctgggtagctgagattacaggcacacaccaccaagcctggctaatttttgtatttttagtagagacagggtttcaccatgttggccaagctagtcttgaactcctgacctcaggtgatctgtctgccttggcctcccaaagtgctaggatacaggcgtgagccaccgcgcccggccatgagtaagaatttctatggtcaatgtatacgtatatgctgtatgggtgttttatgagactttggtataaatgttatgctcacttcatgaatagaatttgaaatgcttcctcttttttctgtgcttaaggcagaatcaacagcaaccaactctctgttccttaagttttcacagaattatcctatgaaataatttgggcctggtgcttctgtggattcagctatggagaaatgcagttctctaataacatctatttctttttttcctttattttgagaccgagtttcgctcttgttgcccaggctggagtgcaatggcacaatctcggctcaccgcaacctccgcctcccgggttcaagcaattctgcctcagcctcccgagtagctgggattacaggcatgtgccaccacgcccggctaattttgtatttttagtagagacagggtttctccatgttggtcaggctggtttcaaactcctgacctcgggtgatctgcccgcctcggcctctcaaagtgctgggattacaggcgtgagccaccgcgcccggccaacatctatttcttctatggtaattggtctacttagaatttctatctctggaatgttttggtaaattatattttcttggaatcttgtccatttcattcaagttttcaaatttattatgtagaactgactgatcatgcaatgcttttaagttttcctgtatctatggttatttcccctttatcattttgtattttgatgtgctcctctttctttcttgagccaaccaccctattgttgcctttttcaaatctcttattagtattcccatttccatttctattttttattttcttcttttattcttacgaattccttctttcggcttttcttaggtttaccttgctattttttctgaattatttaatttacttttattttgaatttttaaaagcactgtattggtatatcccacaggtactaatatgcagagcttgctcttttttttttcatttttaagatattcagtaatctcagttttgagatggttaagaggatttcttaatcagtttttttttttttttacattttgaaaatgttatacaattttgcattgttttattctccactcctttgtatcctacgacagtctcccgccccgtttcttcacctcagttctctaaagattgaaggtcaagaggagggtttcttgccctggagcctgcgatagggtgggcccttgcggttcttgggcggaaacggcgatagggacacccagggcctaaggaggctggggacagagcagatcctcccagcccccaacatcaccccggagtagatgcagacccccagggtcccggaggccgagaccacaccccgcgggcacgagcccgattggcagattgtagccgagtggtttcaacggtgacgccccccacccgaatgcctcgctgggattggctcatttcttggttcagacctggacggtggccagaggaggacaagaggcttttacaccgaacggaggtgatgtggacgacaacggagacgcagccgcacttcaccaagcggccggtccgaggggacatggcggcaacctctgcagcgtcagtgctgctggcgggtgcaagaaactggtggcgacactgcctgagcccgctgctgttgccaaggtgacgaggcataaagccgcggtggatcggtgcgtgggggcg

SEQ ID NO: 31093 - DNA, 2300 bp, Homo sapien
tgatgaatgacagtgctcattttctatatccttgctaacgatttttattattagtcatttaaatttttaatagactagaatggtaaatatatatttaccagataattgtatttatttttaaaaattatctgttcatactctttgacacttcctatcagtttttgtcttgttcttactaattttttggaactcttcttatatatcctttgctatttgtgttgcaaatattttctcctagactgtggttgttttttacctttatatacttgttttctgtcctatacaattctacattcatgtcatgcttagaaaacccctcctaaccccaaggtcattaacataatatcctatacattttccagttacttctgtagcagtaacatttgaattttattttaaatgtaatgtaaaataagtatctaacttaatctttatccaaatgaataaccaattgttctaataacatttatttaatgatctgtatatattttagtccgtttctgtgctcttgtttttaactgatcagtttgtctagtactgcactgtttgtattaggatagctttatagtatattttaatatttgataaggaaagcctccttcttcccttttctttttcaaaagtttcttagaaatttttccaaacttactcttcccagtgaaatttagaattatctcatcaagttcccctcaaaagtcttgaaggcactgagtatatagattaacctagggagggttgacatcttcacaataaggtgtcttctgatttatgcacacaatatgctttctcagggttttttttttttgtcctaaaataaaatcataggttttaataaaggttgcatacatttctttgaaaatttacatttattttatactttttgatgctacctaaatgggatcaatgttttgaataaatggagacctctgaaaggtaccccacccaaaggaaaatagccaaactatatgaacaaaagattcaaggaagaggaagctcagcttccctcatagtaagcgaaaaccaaactgacatagtttttttccgtcagacttcaaaaaaataaataaataaaagaaagaaaacaaaaccaccaccaccaacaaaaagtgggtatgaggaaaagtcaaccaccacagctgcggaggatgccttggctgcacctataaaaattcagggtgcacatggctttgacttagtaaacccacttctgggttccatgctagagaaacacccctgacacagaatgtggtcagtaatgttcatttctccactattgcacacatgtaagtctgaaaagtaaatctttgctttaagtagttggtggtagtctatgctgatgggaaaatggaaacacaaagctgttaaatatttgattaaaatcacccaaaaagtcagttctcctttgtctttgtctctttccccagctgctgaattttgtattttctgttttttaagagagttgccttcaagaaaatgtttaccagatcactctcaaatgatctattgtgagcatctcatacttttataacaaaaattatttagaaataggataaatcccactgattgttttaaacagatcagagcgacaaaccaggagaatgttgtaggatttcttagtgatttttccaggtctgtatctttgctttttggtttaaataaaaagtaaacatagaatttaagctgccatgtaatttgccttctgcacaaaccccactgtccccgcccagccttgcttcctgctccctgtgagggcaaacactgagtccaggctccctctggtccctacccacccaggctggcttgggtcctgccccctgaagccttctcagggcactgctcacttagccacctcttctctgaactctcgcagcactgaggtggacatgacacagtgtggcacatcatccattctgtctctccctgttcccctgcatttgcctcatctcccctgccagacatcacacacctgctgggtttcttgtatctcccctcagggtagggctggcctggggacctggcacttttggacatgtgggatattatgggagaagctgtatttctgacacatctgatggtttcttaaatgctttgtatctcttgcaggtggcaaagaaacacagcatgatgtttggaaatataattcttcgatcaacaagtggattcagattgagtatttaaacataggccgctggaggcataagatggtggtgttgggtggcaaggtctatgtgatcggaggctttgacggcttacagagaatcaacaatgtggagacctacgacccctttcacaactgctgg

SEQ ID NO: 31094 - DNA, 2300 bp, Homo sapien
ggactcgccacttgttggctgtgtaaatcttggaggaattgcttggctcctctgaggctcaacgccgatgtctacaatagagcgaggctaacaatttacgtctaccgatcccagcaagttgtgaaacgcgaatagtaaaatggattcatttattaatttatttgccccaacactttatgcgtggtaataagtcagatttcttggttctgagaaacagaaatcaactctggcttattcgagaagaggaatttatgtaaatgatagtaggaactcataaaatccccaaagaagtttggagaaccaaacccagaagacaaacaggtgcaagggaggctagacaggggccaggaccgcagcccgaagccacccaggactcctgtggggaggacttccctgctgctgtacaatgctggggccacagctgcacagctgcagccactggcactgctgtcagggctgtctctggaagctggaggctgctgctgcttgtcctgcctccacccaagcaggctttcctccgactgggcttgttgatatcaacggcttccaattcaaaactatttgctaggcctgcaatatatgcagaatagatgttaaagtatcatgaaaactacacagttatgaggggattccgtgacccttgtcacataggcatcagagatatggatcctgagacccaaatatgcaagaaggtaattattagcacgttcactcctctgctccctgcaaaactgtgaggagccctggatacacttgtagggatgtgtggcatgaaggcatcatccatcatgggtggactaaaagcaggttgaaaatgcaagccatgtgaaggcagtgaccaccttattcttctcctcgatgccattgcaatggctgacactcagcagacatcctgtaaatgcgtgaagtgaacgaacgcttggatcttcctcctgcaggtccagtcactgattaagtagcatcctggccagagcaggaagtcctcacagagttgtgtgggaagctattgggcaactttagaaaagggaaagatgataaaatgtggctatcacaggaaaaatgggaaggaacagttccaaaatccaaaatgcctcagaatattatggattgaaccggtcgctcatgtgaccacctgcatacagatgtgccatgcatacaatgtgactcttgcagttcttttgtttttttgcactgggagtggggagaggggttctgcaccagggcagaagtgccattaggtcctttgatttttcaaggaagtgtcatctctgtcacccctacccatgatgtctaaactgaaaacaggcctcttcatagagagatccacagcatgtggatattattccaatcaagattagaaaatctattcttcaattttagataatcttccatgcagctcccaactaaaacacaacagagaaatattttcatcattcatagctcaagttgtgagctttatccctgcatcaaacccatggatatgcaactgtccctccatgaaaatgttttttcaggacaagggtctaacatggtaagcaccaaacagtccacgaaaagagctggccacatgcagagcctttgtgtttttggtaaaactgccatgagcgcaacatccatttgcgctgcctcatattcctttattggtgagcattttttggtttcgagggataggaaatcaagtcaatcagcttaggcaaagagaaaggtatttggtcacattatcaaatcataggaagggctgggatgcagcagagcccagggagaagaggaaccaggccctttcgtgcagcctgcgtgctctttctccacccctcacttggcttctctcaggttgggtttctcaggctgacttctgccacacggttgggagtttgcctattggctgctatgagactcctagccttggctctggagggaaaatgagggactttctctacctgtggcttgaaaaacccctgggaaagactctgattggctcagccccattcagttacccaatcctaggccaatcactgtgccagggaggtggggcacaatgatcagcccagcctaggttaggagtccacccttggctaaagagctgtgcgtgtgtgtgtgtgtgtgtgtgtgtgtgtgtgtgtgtgtgtgtgtgtgtgtttgagagacagagagagagacagaagatagaaaggcggagaggcctgtaatgacgtgagagctcccgcctgaatcacatgatttgagtggggcctggatggggagaagagcatttcccgatatggagagatgctggacaaaaggaaaaataaagtccgctaaag

SEQ ID NO: 31095 - DNA, 2300 bp, Homo sapien
cataaaggaacttggtatatttatttaagttttctttcgaaactcttagtaaagtttgttagttttctttatgttgctggttgctgttattgctaggcatttacatatgttttattaccattgtgaatggcattatttttccatgactttttttttttttttgaggcagagtttcgctcttattgcccaggctggagtgcaatggcacaatctcagctcactgcaacctccacctcccgggttcaagcgattctccttcctcagcctcccaagtagctgggattacaggtgtacgccaccgcgactggctaatttttgtatttttagtagagatgggggtttcaccatgttgctcaggctggtcttgagctcctgaccttgtgatccccctgccttggtctcccaaagtgctgggattacaggcatgagccaccacgcccggccgtcaggtttctttatatgctccattataatcttttgggaccacaattgtatattcagtccatcatcgattgaaatgtcattgtgctgggcatgactgtacttgtgaccgttaattttagatgtcaagtttactgggctaagaaatacctagcaacctgttaaagcattaccatggggcgtgtctgtgaggttgtttccaggagagattagtgagtctgagtggactcggtagagaagatacactctcagtgtgggtgggcaccatccaatcagccaggggcccagagaaaacaaaaacagaagaaaggtcgatgtctctatctcctgaggctgggatacagtcatctcctgccttgaacaacaggactccaggatcccctgcctttggacttcaggacttacaccagtctccccaccccctggattctcaggcctttggctttggactgagagttataccatcttctctggttctgaggcctttggacttgaactgagctctcagcagtctgtcatgcgacttctcagtctccataatcacgtgagccaattcccctaataatttccctctgctatgcctctctaggtatccttttggttctgtctctctggagtccatcatcgactgaaatatcattatgctgggtatgactgtaattgtaatggttaattttagatgtcaagtttgctgggctaagaaatacctagcaacctggtaaagcattactgttgggcgtgagagaacgctaactgatacgctcctataacttccccaggatatcatgggattttaataatgacagttattactacttaactgagacatgcagaggtaatgaaaatacttcaggatccaccgttagatgcacggtcagtagatgttgggctaatctgagacgtgctatggcaattcggtgtagacccaccctgactcatcctctgagaagatgctgttgatggagttttggaaaccatttcttctgtgcccccaaagcatattcgaaacaatagacattttttttggtgggggaagacatgaaagtttgccatgacgttgttttcccctgggtagggaggaggatgaagatagacgatctgcagtgccgccagaaatgagaatgtcagggataagtggggtttccatggtttacaaagcacggttgttggatcattgtggggtctcagactcctgggaggaggaagtgggaggatcatagactgtctcctgtccatcccctcgctgacgacttgggttattgagccactaggagtacaaatgtgaagcaggaggattatagactgtctcctgtccatcccctcattgacgacttgggttattgatagcattaggagtacaaatgtaacagccaccaccggaggcttcctgctcacggatatgaggtgggagatgcaccaaaataaacacacagcactcacagtggactctgagaggacactcctcttccagaaccccctcccacacacctattctaagtaatttctaaccctgtgattactcacagaaagaagaagaatagaagttgctggcatttgtagtaacaggatgagaaagtgcgagacttcctgttatgtgtgtgtgacagctggtgataagtggagggccctgcacaggaaatccgctcagctcctgcaatggggcctgcctgacacttgggcgctccttcagtctcgatgttgatggcaggacaaaggggcgcctggaccatgggtgatgtggtcgagaagagtttggaagggcccctggcaccttctacagatgagccctcccagaaaacaggagacttggtcgagatcttaaatggggaaaaggtcaaatttgacgacgcgggactctc

SEQ ID NO: 31096 - DNA, 2300 bp, Homo sapien
agagtgagacgtcacacacacacaaaaaaagttccaaagtccagaaattgtcttaaatcacaaggaataacaaaactgaagaaggctaatccgtgagcctggggtgctcataaggagctgctaagagaagaccacgtgaacctattcagcagctacctcctgaggagcgggaattattaagcatacatcaacaaatataaaaaatcagtgtaagaacagcattgtacttctcgacagcaataccagaatctaggtgttaataaagcagtatcttcgaaatcccgaataaatataatttataatctagattgtatgattaggcaacatcatcattcaaaggtaaaatagagtgatgatatttttagacatgaaaagttcaaaaatatttacttctcatggaccttttcttaggaagctatttaagaggaatgtgctctaccaaaatatgaggcaatgctcgaaatcacagaagaaaatgctaggatgctggagaagggaagacccaagacagagaagcaagcttcccaaacagtcattggaactgcggaccaatgactctaagaaaaaagtacagatacacacacacacacacacacacacacacacacacacacacatacacacacgatggattatctgatgggtttgattatatggagttgtattgaaagcattttatcgttttagaaaaactaagaggacattgtgatagatccataataaaataagcaaagaaagaggataattattaaaactccaaggaaaaccaaaagccatacaagatgggaaattgtatacgatttgtctcaacaatgaataataaatacatggtctcattagcgtaaacattaatgatttaaccagattatgagaaggatagcttccttaataggaaatagtcatacattatttggaaatatataaataccagaagaaatagctcaaataattgaataagagatggaaaagaggcctaaaaagtatgtttaaaaggcctgtatataggccttccatattatttccgcctctggtcatcagaacacaacgcctaatttaatagaggcatgacggtattcatgacatgtagaagatagagatttttaaatttggtatcagaaaccaaaaactagttaaatggttgcaatcatcctttaaaagaatacctgcaggcggggcgcagtggctcatgcctgtaatcctagcactgtgggaggccaaggcaggcggatcacttgaggccagaagttcgagaccagcctggctaacacagcctctactaaaaatacaaaacattacctgggcgtggtggcgggcacctgtagtctcagctactcgggaggctaaggcgggagaatcgcctgaacccgggaggcagaggttgcagtgggccgagattgcgccactgcactccaccctgagtggcagagcgaaactctgtctcaaaacgaaacaaaacaaaaagcttgcagacacaaaacgacaacacaatgtcctttaggaactccatctaccttggaaaacagggatttgtgacagctttggtcgacgtgcatgtgcgtttaaaataaaaaggtaacctaggatttgataccagggacagtaacagctttatcaaaaaaaaagaggtggttttccttgctccttctaaggactggggttttagtctcgtccaccctgcaggccctcaggcctgatttccgattgtctatcaaagggtcaaataaaaagctctctaagcttcgacccaagctttaaagtcgaagggctgatcgcgggctttttccttgggacgtggcaggggcctttgagggaaggaaagaaacgactctggcttctcactcggctccttacacaagaggcatttttttaactgtctctgcttaaaacaaggtgtttttgagtcagcagccctttgggtgggtctcgtcctcttgggcacccgacacccaccccacggcgggagccccaggtggccccggaggccaccgggaagcgtgaactacatctcccagggttccccggggcggaggacgcccacccggattggccagggttcgctgacgctcagtgttttggcccggacggtcacatgtttcctttgttgtgagctgcggcagagactggtggctggaggagacgccggcgctggagagtgcgctgcgccgcccgccgctgagggaccgcggggttagccactgctggctgcttccagtgttcgccgagaggtaccgggggtgacagctccgggaccggccgaaaggcgaggaaccggtcagagtctgagtcctcgggggcggagg

SEQ ID NO: 31097 - DNA, 2300 bp, Homo sapien
ctgcggaccaatgactctaagaaaaaagtacagatacacacacacacacacacacacacacacacacacacacacatacacacacgatggattatctgatgggtttgattatatggagttgtattgaaagcattttatcgttttagaaaaactaagaggacattgtgatagatccataataaaataagcaaagaaagaggataattattaaaactccaaggaaaaccaaaagccatacaagatgggaaattgtatacgatttgtctcaacaatgaataataaatacatggtctcattagcgtaaacattaatgatttaaccagattatgagaaggatagcttccttaataggaaatagtcatacattatttggaaatatataaataccagaagaaatagctcaaataattgaataagagatggaaaagaggcctaaaaagtatgtttaaaaggcctgtatataggccttccatattatttccgcctctggtcatcagaacacaacgcctaatttaatagaggcatgacggtattcatgacatgtagaagatagagatttttaaatttggtatcagaaaccaaaaactagttaaatggttgcaatcatcctttaaaagaatacctgcaggcggggcgcagtggctcatgcctgtaatcctagcactgtgggaggccaaggcaggcggatcacttgaggccagaagttcgagaccagcctggctaacacagcctctactaaaaatacaaaacattacctgggcgtggtggcgggcacctgtagtctcagctactcgggaggctaaggcgggagaatcgcctgaacccgggaggcagaggttgcagtgggccgagattgcgccactgcactccaccctgagtggcagagcgaaactctgtctcaaaacgaaacaaaacaaaaagcttgcagacacaaaacgacaacacaatgtcctttaggaactccatctaccttggaaaacagggatttgtgacagctttggtcgacgtgcatgtgcgtttaaaataaaaaggtaacctaggatttgataccagggacagtaacagctttatcaaaaaaaaagaggtggttttccttgctccttctaaggactggggttttagtctcgtccaccctgcaggccctcaggcctgatttccgattgtctatcaaagggtcaaataaaaagctctctaagcttcgacccaagctttaaagtcgaagggctgatcgcgggctttttccttgggacgtggcaggggcctttgagggaaggaaagaaacgactctggcttctcactcggctccttacacaagaggcatttttttaactgtctctgcttaaaacaaggtgtttttgagtcagcagccctttgggtgggtctcgtcctcttgggcacccgacacccaccccacggcgggagccccaggtggccccggaggccaccgggaagcgtgaactacatctcccagggttccccggggcggaggacgcccacccggattggccagggttcgctgacgctcagtgttttggcccggacggtcacatgtttcctttgttgtgagctgcggcagagactggtggctggaggagacgccggcgctggagagtgcgctgcgccgcccgccgctgagggaccgcggggttagccactgctggctgcttccagtgttcgccgagaggtaccgggggtgacagctccgggaccggccgaaaggcgaggaaccggtcagagtctgagtcctcgggggcggaggggcgacggcggtcctgaccaccggggtgtctgcgggagggcagccagcggcggccggcctctcagagccagactggcggtctgcggagaggctgcagctgggctacagggcccctttctgaggcgaggggcctccagggttcacctggggggtcttcctcccccgcttggtagctacagccctgagggagggcgcgcgcgcctcctggcactacggcccggaaccgcggcgcggctggtgcggcctggctagggcggggtggttgccgggactgggggtagccgcaggtgcggtaggctagtcgccgcggggccgggcgccgccgggggaggcggctgggcagacgggtgctgcttgttgccgatgggctgcgaacggggcgctgctttttatttcaggaagcccgggggagtgcgaccgcctcaaatccagccttcttgtttggtgggacgaccgtcggttctgtccgggaggaatgacggggtcaaggtggggtccccagggccgcgggcccgtgaagccccattaaagcgattgcgaa

SEQ ID NO: 31098 - DNA, 2300 bp, Homo sapien
attctgagagtatggcaatagatgaggtaccctgagtgatcttaaaccaattactaatacactttgaatcatgtatcagcttctgaagatgtggaaagggagtagaagaatcgccttaaaattaaccttaaagagaattgggctgggcaccatgcctcatacctataattccagcactttgggaggccaaggtgggcagatcccttgaggccaggagttcaagaccagcctgggcaacatggcaaaaccccttctctaccaaaaatacaaaaattagccgggtgtggtgggtacgtgcctgtagtcccagctactcgggaggctgaggtagcagaatcccttgaacctaggaggtggagattgcagtgagtcaagatcgcgccattgcacttcagcctgggtgacagaatgagaccttgtttccaaaaaaaaaaagagacacagagagagaattgatggctatagccaagtgcctcaatccatcagttacttactgaaagtcatttctgagggggttttgggatgtttcttattagtgaaagggaacaagacctagataacatgcatgaaatttttttaaatgaatattaaattttataatagaaattttggtagaaaatagagaagataaataaaacattttagcatatgtacatcctatccctagattcacagatacattattttttctgttggcatatgttttgtgatctactttttcacttactgtgtggttactacttccccatgtcgttaaatagtcatatataatttttaatggttgcatagactttgttctagccagaagatgtactgtggtttgaccaatcccctcttatagggcatttaggttattttgagtattttctatcaatacagcattggacatctgcatagataaatctgtcgacataattctgattatttccttaggagagagtgctaaaaaaaaaaaaaggacttgctggtcaaacaatgtacatatttttaaaggctattgatagatatagctaaattcctctctaggaattctatattaagataataattatttcaccaggcatggtggctcatgcctgtaatcccagtactttgagaggctgaggtgagaggatcgcttgaggccaggagttcaagatcccatctctacaaaaagtaaaaaaaaaaatagccaggcatggtggtacgcacacatagtcacagctactcaggaggctgaggcaggaagatcgcttgagcctaggagtttgaggttacagtgagctatgatcatgtcactttactccaaacttggtgacagagtgagaccctgtctcaaaataaaaaagattcttaaaaagaaagataactgttagaattctaactgtagtcaaattgtgtcttacaccattctgacttaactctacagtcaatagtatgaaactcagctctgtaaatggggaggaaacggaaggttattagtaactcacgaagtacatagtatcctttcagctagaaaaggggagcttaaggagtactattgcaaattaccccaatgttctaattgttcaaatgcaaatttttgttgattagtttttattaacatgagatagtgctgtgtaccctatatgaaatatattatgtgattttgttgtagtgtttatattaaaatgaaattatgtgatttgaatactgaattttttgcatattgaaatgttttcctttttttacttttagccacataaagaagatccctaatagtcatttctcaacaattatatagtcaactgatgtaacaatggtactaatattgggacgcagactaaacagagaggatcttggggtgcgtgattccccagcaactaagcgaaaagtttttgaaatggaccccaaatctctgacaggtcatgagttttttgacttctcttcaggatcatcccatgccgaaaacatactccagatatttaatgaatttcgtgatagccgcttattcacagatgttatcatttgtgtggaaggaaaagaatttccttgccatagagctgtgctctcagcctgtagcagctacttcagagctatgttttgtaatgaccacagggaaagccgagaaatgttggttgagatcaatggtattttagctgaagctatggaatgttttttgcagtatgtttatactggaaaggtgaagatcactacagagaatgtacagtatctctttgagacatcaagcctctttcagattagtgttctccgtgatgcatgtgccaagttcttggaggagcaacttgatccttgtaattgcttaggaatccagcgctttg

SEQ ID NO: 31099 - DNA, 2300 bp, Homo sapien
tgtctctggtgacttctggtctccactgccctgcaggcatcagctgctgaggtggttggttggcaagctcatgacctgttgctttagcaccttcagagtttgatgtctcatctttcatccccactcctccatccccgctcctctcaccagctgacttaggggtgcttcagctccactggtatcttcagtactgcctatccttggggtcttagctacgttctgtagccattccctggccatcagcccaccacaaggcctctgctttaggaaacctgccccctggcacagtgcctattggtctgtccatggctcttaaccatgctactttctgcatgccaggcagggagcaacaagagaagtctggaattctgacatacctaaatgtgcaagctgcagcgctccagcagcactattgcagactcctcccaacgccatggcctgctcccaagccctactgtgtgagccttctcacagacttggacagccttccaagctacaccaagggaagtcagcttctagctttcttggcacttatctgggtatttctatgctttccacctcactgttaaaccctaagagtaggggaacaccaacacactcatcctgacctgtgacctcacccccttctccatgaaatttgtttatctccccagttcctattatctcttgagtcttagcttaaggttcaaggaagcctttcttagttttttttttttttgagatggagtttcacttttgttgcccatgttggagtgcaatggctcactgcaacctccacctcccgagttcaagtgactgtcctgcctcagcttcccaagtagttaggattacaggcatgcccaaatacacctggctaatttttgtatttttagtagagacggggtttcaccatgttggccaggttggtcttgaactcctgacctcaggtgatccgcccgcctcagcctcccaaagtgctgggattacaggcatgagccaccgtgcccagccaggaggatctctcgagcccggaagtgtgagactagctgtggtgatagtgagacctgtctaaaaaaaccaaaattagcctgggggtggtggttcacgcctgtaatcccagcactttgggaggctgaggcgggtggatcacctaaggtcaggagttcgagagcagcctggccaacatggtgaaaccctgtctctactaaaaatacaaaaatcagccaggcgtggtggcgcgcgccttgtaatcccagctacttgggaggctgaggcaggagaatcgcttgaacccgggaggcggaggctgcagtgagccaagatcatgccactgcactccagcctggcaacagagggagactctatctcaaaaaaaaaaaaaaacacaaaaaacaaaacaccacttatatttattatgcgttgataaaaacattaaatacattaaaaatttggtaacatgtatgtaaagtataaaaaaaaaagtgaacttcctaaacccaccactcagctccagtagtaaatcgttatacagtgagaagggattgaaggggaacagaagttccccaagaccagttgggaggctattcatagtcttgggcagagagattacagggtcttgggtagggtggtagagttacaacgaaagagaatgttggcctcaagtgatatttaggtggaaaactggacttggattgtcactagctagtgtgactgagataagtctcaagccttccctgcctcagtttcttcatctgtaaaatgggctagaaataactactgttattttgtatacccagcacttagcacatgggttggcacaaagatggcacacacaaacatcatagtcactattgtgattaatagggaagctcatacacgccggcagaatgaatattctgtcaaacttggggttgaaattcgccatcttctggggcaggaaagtgatggacgactgtgcctttgcaagaatcgacgcccacactgcccaggaagtgccctcgcgggccggggtcccagcccggaccagccccgccccgccccgccccgccctcatccctgggagctccgccccgaggccgcgcgcgccgccgcgcgcgccccgacgcgcccagctgctgacgtgcggggcggaacgcgccgggcgggctccaccgcgccgtgtgcttccgcaggttgcgggggtcgctggggccttgtggcggggcagctccgcggggcttcgcccgctctctcacctcgccgtgctctctcgcggcggccggcggggcccgcgctgcagccggagacccggagaaagggtgagtgttggcgggcgcaggaag

SEQ ID NO: 31100 - DNA, 2300 bp, Homo sapien
cctgtacaggccgctaatacaaattaagatgtcctgtaagtgtaaaatacacaccagattttaaaaacttggtaaaaatataacgtaaaatctaattgctgatttatttatatcaattacattgttggggtgataatattttagatatattggttaggtaaaatatattgttaaaattggtttcacccatttcacttccctttttcaaacgtggctgtggctgggcacggtggctcacacctgtaatcccagaactttgggaggccaaggcaggtggatcatgaggtcaggagtttgagactagcctggccaacaaggtgaaaccttgtctatacagaaattacagaaatgagctgggtgtggtggtgcatgcctgtaatcttagctactcaggaggctgaggcaggagaattgcttgaacccgggaggcggaggctgcagtgagccgagattgcaccactgcactccagcctgggcaatagagtgagactccgtctcaatcaatcaatcaatcaataagaaacctggcagctagaaaatttaaattctgtacgtggctcatgttatatttttattggacagcactggtctggatgatatttctgaaactgactcatgaaatatgtatcattgcttaatgaagcactttggaagaggagcactgtccaataaactcgtgcagtgatgtgaatgtttcgtatctacactgaacaatgtagttgctactagctacggtgactctcgagcactaatttttttgagacggagtattgctctgtcgcccacactggcgtgcagtggcacgatctcggctcactgcaaccgctgcctcccgggttcaagcaattctcctgcctcagctcctgagtagctgggactgcaggtgcccaccattatgcccagctaatttttgtagttttagtagagatggggtttcaccatactggccaggctggtctcgaactcctgacctcgtgatccatccacctttgcttcccaaagtgctgggattacaggcatgagcgaccacacccggcccataattttaaatttttttaaattttaatttaaacagccacataaggctagtggttaatgtactgagacagtaaaggtctagaggatttatgggattttttttttttttttgagatggagtctcgctctgtctcccaggctggagtgcagtggcgcgatctcagctcactgcaagctctgcctcctgggttcacgccattttcctgcctcaatctcccgagtagctgggactacaggtgcctgccaccatgcccgtcttttttttttgtatttttagtagagacgggttttcaccgtgttatccaggatggtctcaatctcctgacctcgtgatccgcccacctcggcctcccaaagtgctgggattacaggcgtgagccaccgtgcccggccgggattttttttttaatgggattgttttattcaaagacttgtgtatgtggggcttgtttaccgtattgcagacttgttaattagtttaatataagtctatagatttgtgtttattgtaataatgatcagtaatagtgatacctgctaagtaccagagaaaggatctgtataatcaattatttattgagcctttaactatgttgcttatattttctaatatgctgaatgcttagtgaattctaagacactgtgtgggctaaccatgttttcatcaaagtctggttcctttcctttccttatgagggctcttccatgaaagccaggctccttttgaaaagtctgaacaatgtgctactttgttcaaggatttttctcttgaaagggaaacccatgcttgttaacagatgattatgatttcttttttttttttggtggaaacttttaaacttaggcttttggccttaaaagaaatatgtatatgtgtgtatatacacatacccacagacttgcaagtaccagtattaatgtaatatttatttatttattttgtttgtacacatatatttgtaagtactggtatgcagtgttactacaacccaactatttaactgaataattaaaaattattaatttatcattgcttcacagtgaagaactgaatgtcatcatgtctggaatcaagcgaaccatcaaagaaaccgaccctgattacgaggatgtatctgtggcccttccaaataagcggcataaagcaattgagaattcaggtagaaatcctgccttaggaaattatttctttattgacatatgcctccgctagaaaacttacaggaactagaatgaaatgaatttccactgttatgtataat

SEQ ID NO: 31101 - DNA, 2300 bp, Homo sapien
atgtctgaattatagtaatcttgaaagtcttaactctgctggtttaatttttattgtttgttggtgatcattttactttacagccaagaagtgttcttcgtttccaaattttgacagattacctctgagatttgcattttgtgtttgagaattaaagagaaactacagaatttttttttttttttttttttttttgagacagagtttcgctctcgttgccaaggctggagtgcagtggcgcaatcttggctcactgcaacctcctgcctcctgagttcaagcgattctgcggtctcagtctcctgagtagctggggttacagggcatgcgccccacgcccggataattttgtatttttagtagagacggggtttctccacgttggtcaggctggtctcgaactcctgatctcaggtaatctgcccgcctcagcctcccaaagtgctgggattacaggcgtgagccgctgcgcctggccagaactacagaagttttgaatgttgactttcgttgtctttgcctgtgccaaattattcaagttttttgtttgtttgcttgttttttaagtttttattgaaaatttttcctttgtattctgggtgttcattgagtaaattttgcaaatcagttgtgagtactattaaaagagagtatatactgaaacattgcagctgcctgtttctttcatttatttatttagtgcctaggctccagggatataaaattaaatacagtccctgtcctttagtggtttaccaactatcggggaagaccaataaagtcagccaaatgttaggggtagtaagttagaagtctttccagtgtacagcaggacacagatgagtagattcttgccaagttacagcttttctttgcatttgttttctaaaacaatattaaaatgcaggtgtagaggcttggaagaccccaaggaattttaggtttttttctttcttttttttttacggagttttgctcttgtcacccaggctggagtgcagtggcgtgatctcggctcaccacaacctctgcctccctggttcaagtgattctactgcctcagcctcccaagtagctgggattacaggcacccgccaccacacccggctaattttgtatatttagtagagacagggtttctccgtgttggtcaggctggtcttgatctcccgacctcaggcgatccacccacctctgcctcccaaagtgctgggagtacaggcgtgagctaccgcacccagccagtctttttatttctttatattgctagagaatgtcacaggtttgtattaaatataagtgactagatatctgaaatcacccatttctcctgattgtaaaatatgtatttttacacacacagcaggaggattctttgtttgcatctatgccacctctttgcccaattgggagtcaccctaaggttcaaagccccaaacctataacaggaggacttggagctttcacaaaagtgagtatgtattagggcattgtcccacaagtcataatactttttgtggcatgttggagttcattgccactacccctacaacatgttactttttagtgggtctcaactcctcattctgagacgtgcttccatgtatttaatgatgtcctcagggcagcccttggagtccagcaagatggggattcatggagcacagtgtgtttgtttctctctgctgtcatttgccacagtctctaaaacaagtgactgtgttattacaggagcacaggatcaagttcagatcctacttttggtccctttaatagctggtatggactgtatttaagcagtatgtatatttacccttctggtggagtcattctttacgtatcaagtttcatcaattcattaatccctgcaaacggagaagagtcagatattagcagctttataaaatgggatgtttatggatgtttattcagtgtcattatgtttgttgcaaggtgatcatcaaacaggaacctggtgaagcccctcacgtgcccgcaacaggagctgccagccagtcaccactcccgcagtatgtgactgtgaaagggggtcacatgatagctgtgtcccctcaaaaacaggtcataactcctggagaagggattgcccagtcagcaaaggttcagccctccaaggtttgtgttgggtagagatgggaaatttcacatgtaaatgatgttgtttgcctaaataattgacaagtgctgaaaagattcacggtgacagggttgatgatcccataagaacctgtgggtgaaagcctagttggaaaaacaagtctgttggtgtgaaactcttc

SEQ ID NO: 31102 - DNA, 2300 bp, Homo sapien
acatacgataatttaactagaagtgggtttgctcctcagcgtttgcaatcagagatgaatcactctggagagagatggctggtgaggctgttgggagaaagctgtctacatgaaccatgaatgaagtggtgtctgaaaattatctggtgatacctgagggaagatccatctacttatagaagctggaagtctgtttttggggataggttggcataggattggaatcgagtgtgtctgtttgacttcatttagatcaggggtccccaacccctgggccgcacagcagaagttgagcatggacgaagaagcattactgcctgagctccgcctcctgtcagatcagcagtggcatcagattctcacaggagcgcgaaccctgttgagaactgtgcatgcgagggatctaggttgtgtgctccttatgagaatctaatgcctgatgatctgaggtggaacaatttcttccccaaaccaccccccgcctcctgtcccaattcatggaaaagttgtcttccatgaaactggtccctggtgccacaaagcttggggacagctggtttggatgtattccttacttctgctaggtttggagatggaaagagaaatacagactctacctaggtttgtaagtcttaaagccccatggaaatgaggcagtttatctgcagttaaagaaacttttgctttgacatatagagaaaaaccgtttgggcagtgttgaaaaggataggataaaaggaaattatttccctctgaatcagaagtagaagggtacagcattcagggtcattggaagttaaccgcccttgccaaaatgcagtgtgtcagctcatcatccttgcgttcattgaccatgatgtgtcagttccactctcacttggtgttttttcctcatacctaagcagtggtatgtccaaaagttaaatgtgtaagaaaaggacaatgtaaatatttcagaagtcatccagggagctacttagattcttgtgatatccttggtgcaaaaataaaccattgggaaggaagctattccaataatcactggaatgaaggtggagaaggaaattggaagttagtatttgttgagtgaatattcatagtccaggtagttcaaatgcattatctcaccaaaagagaagtaaaaagacttcaaggctttgaagtgggatttgaaaggcaaagaagaatggggtcctggagtcattgtaaatgaaggaaagtcttcatttttcctgagacagggagacaacatcgagcactgtaaagttacactaaattccagcaattccctgacattgaatcagatgcccaaaagttgggaagcacctagctgagcacatttaagtgttgattaaaatacttggctagaggctgggtgcagtggctcacacctgcaatcccagcactttggagggccaaggcgggcggatcatgaggtcaggagatcgagaccatcctgtccaacatggtgaaaccccctctctactaaaaatacaaaattagctgggcatggtggcacacgcctgtagtcccagctccttgggaggctgaggcaggagaatcgcttgaacccgggaggcagaggttgcagtgagccaagatcttgccattgcactccagcctggcgacagagtgagactccgtctcaaaaaaatacttggctagaaaatgtcagtagcaagccttctcttgatctcccacgaccacgtcaaagtatcttcattgtactcagagccgaaatacagtcagttgtcatgcagttgaaaggaaatagattttgatctaaaatctaggaagttctcctcactcttgtcacagggtaggtagattacagaaaagacggaggaaaatgggaaagaagaaggaatggcactaaaagggaaacatctctctgggctcatttgttttttatgctaaagctttgcttgatactttttatgatgttgctgtcattcattgtatttttagatctccagtctggctcagctgccagtggtgggagtggtgccggaggaggaggaggaggaggaggaggaggcggcagtggcagcggtggaggcggcagcacaggaggaggaggaggaacagcaggaggaggaactcaaagtactgctggccctggagggatatctcagcacctgacttacacatcttacatcctcaagcaaactccccaggtctggttctctgtaactgatattttaaatcatttagctattggataactatgcttaattataattgatttacctttacggctctgggatcagggttcaatactaacaccttaaccgtgttat

SEQ ID NO: 31103 - DNA, 2300 bp, Homo sapien
ttttttccctttagtggttcagtcattttctaccagcaagccacctgccattctgcctgtagctgccccaactccagttgtccccagctctgctccagcagctgttgcaaaaggtacgtaggatctcacagagttctcgtccagaagttttgttacttttttattgtcgttcacgttctctcctgatgtccagaagctttatgcgggacattaccataatctgaatcttttgaattttcagcatttgtgaatcagtcacttggcaaatatgtcctaaatgctcatatggtagacttaacattgagggaaacacagagatgtataaaggatcatttctgcccttcagtaatttataatcaggttgaaaacaattgctgtagatagcaagcaatcattgataaacacaagacatttggccagggaaatgattgctgaaatattgcagcttgggatgtctgatcagggttgacggggtgtggagaagggcaagactttgtactgagtatggattataacctggactttaaaagagtagaggttttttagctgtggggagtcaaggggtaggccagattaagggcacaggagagacagactcagcttcccctttggggaagtggctagccagttagagggactcatttggggagtatactcatggtaaaggaggtttaggtaggggccagactttggcgagctgtcagtgggagacatgcctgcccacaagagtagatcaggatagcacggtggattagagcaacacgtgtgacattgataacaccagtgtccaagcataggggatctgatttttgctttctgccttgtgtctcagaacactaagataatgctgaaagttgataaactagctggagagatgatattgaaacggtcccagtattagaacgtagaacaaaccagcattgtactttagagtagcattgttttttttttttttctttttttttttttgttttgagatggagtctcactctgtcacccaggctggagtgcagtggcacagtctcggctcaatgcaacctctgcctcccaggttcacgccattctcctgcctcagcctcctgagtagctgggactacaggcgcccgccaccacgcccggctaattttttgtatttttagtagagatggggtttcaccatgttagccaggatggtcttgatctcctgacctcgtgatccgcccacctcggcctcccaaagtgctgggattacaggcgtgagccaccgcgcccggcccagagtagcattgttaaatcacatgtgtggggaggggagtgaggaatcttacatagcagtgtgggtggccctttaagaaatatctaaggagccactttattgcagccgccctgtcatgaggctggagttgtcctgagacccaggctaacagttcttcccttgtctgatgaccctgggatgataggagccatctcagtcccctggctgtgtccccacaacagctggagtggcagtttccttactgagcttcactgtaagagctttgtttgtgcctgcacgtgtccttccaccactgacccctaacagctgcctctttgttgctcttcccttgtagtgaagactgaaccagaaacacctggaccgagttgcctctctcaggagggtcagacagcagtgaaaacagaagaaagttctgagctgggaaactatgtcattaagtaattcttccaatctttcctaaaggaattccgcttcgggtgtttgtcacgcctgtgacagctgagtatgtgcagagttgtgtgtgtgtagctctaagcccttgacgggaggaactgtctgtccccgtgcagtggacaagtgttaccacttgatgcacagctgagggtcatcattttatacagtgatgtgactagaggtggcacttgatttgtagccttagaagcctcaggtgggattagacctcccttcagttgaagttgccaacatgggctttctctgctgagcccgtaggcacaaaatttctcctgttgccatcactcaggtgtgtacacgctttgtgactgggtgtccacacacctgcctcatcttagctgcctcttcatgggctatatacactctttgctgcttctaaaaatgcttcctgaggtttcctaatttctaaatcaggaagccacttctgaccagctacttttaagtatctcagactgctggggacaatagaaacttagccactctaacatggtagatggaggcgtgaactgtaataaccctaagatgggtatacagaatttttctcccctagtagcagtcacattgcaaaaagatt

SEQ ID NO: 31104 - DNA, 2300 bp, Homo sapien
agagatggggtttcaccatgttggccaggctggtctccaactcctgattgcaaatgatccacccgcctcggcctcccaaagtgctgagattacaggcatgagccaccgcgcccagccctagacattgtatttaaggaaagcagttgttacggaggtatccctattcttggagaggatccacgaggaaaggaactgctgagctaggatcaggctggggaaggaggctgcggcattttcgtccccttgccagggtcaggacagttggggctgtttgctgttgtgacgtgtacagaaaaccataggctttgtctctgccacctcctaaagcaacgagcacactgaccaccacccccagaatacgtcttaggaggcacctgaaaccacatgactcagaggaaacataacttagtccatttaaaaatcagaaggaaaaaaaacaaaaaaacaaaaagagagaacttaagcccaaataagacgagacattttaaagcctgttatctttgttccttttctgtccttgccccttactccaaaccgcctgggatgcaaccatccttcctggctggcggcccctgcaggcacccaccttcaggatcatgtcctccaccacggacgcatacacgttcctgtggagtgccacgggctgcagggtgatcccaatctggaaaagcagaagaaagccgtttgttcgtatcgctgctttagaaacagcctctctccaaacaagcatacctccctgacatgcaaagcgatgcctggttggaaggaggactctgcaaacatattgggcaaaattcacgggaaaggaacacggaatataacatctagaagaatgttatcttgtttttccacatttctggctgatatttaaaatatgactataatcctattaaaatctctcaaatctccttcgtgggagaacatggttgggatctgcctgggttctgatacgcaatcaacactttgaaaggtctggaatcagactccaacgtcctgtttgcacttggaaactgcatcttgcccattcttcatggcatccaatgaaagcacactgtctttcaccttgggccctgagcaactggcagatgctgaagagctgttaggctccagcagggtggataaatacctctctcctgtatagtaaggcaggtgcacgccatctgcaccacaggcggggcactcaggagctatcaacacatcaggggaggattacgcgctgacgtgcaactcagaaagagtacgacgtgcctcatgagggaaaggtgcttctactgaggcagatgagaaaaacaagatgaagagtaatcaaccatttctatctagccagctttgcttcacgtctgcgttcaacaagcaatgttttcacatgtaattagcatttctgcccaagggctctgatgtgggacggtgggagccctgagagcacacctgggtcaaccaggcagaaggaagtcaagcatctacggcaccagaagagtctgggtctgagtctgtgtctgtgaggctgaacacctgggtctgggtctgtgaagctgaacgtctgaacatctagctctgagctggtctgctgcatgaactattaacaccacaacccctaccttctgtgtgacatccccaataaattcagaccctggggttggtggcaggtagaacttgacttcctcttgtttctcttcctgctccttcttgatgtttatcttcactggctcggagaggctgaggatgtccacctcctcctcattctcgggttcccttttctggaactgttgcaggtcctccagtttgcggcagaggttgtcagcagaggagaatgatgatgggcactctaaatgacaggcaagcagtgttacaacagctgtggggccaacggaagaggactttccgtctccaagagacccatggtctgaggaagggggataagcatcaggggagctgaccttctttccagttctaacattctatggatctataatgatgagaactagtaattcacgagggagaaaggcataaacacaggcatcttgtgtgtgatctatgtaaggtaactgccatctaagatgaaagagtaggaattctcacttctgccaccaaaaaccaggtcatccccctccctctgagtattaaggactgacctgatttttcctcatctcaaatctggaaaatttagaaatgcagagtgaagaaaataaaaagaatcacccctattctcactgctcagagagcaggactgttaacatttcaatgtatattatgggtccagtctctaataaggtgatttatacaaaacctaatcaggagtg

SEQ ID NO: 31105 - DNA, 2300 bp, Homo sapien
gagccattcgagatctccctctctcgcctcttatttctagaattcagcccctcagccttcccagtgcctgtgactccgtggtggtcctcacttcttagtccctggactgttgagcctgttcttccagctggtctccaaagcaaccctgtgcttctccatatgcctgccagagtgctaaaaacatgtctgtcattcctttgttgtcacctgtgaaaaacttttatttatttgagacagggtctctctctctctctctcgtccaggctggagttcagtggtgcaatcatagctcactgtagccttgaagtcctgggctcaagcctcagcctccaagtagctggcactgcaggcacacactaccacgcctggctaatttttaaaagttttttgtagagacagggtctcactgtgttgcccaggcagttctcaaactcctgggctcaagcagtcctcttgcctcagcctcccaaagtgctgggattccacgcatgagccatctgcacccggccatatgaaaagctaaaattccttagtgtggccaccaagaccctccatggtctgctacctcagctgaaccctcctcccccgtgacctacattcccacctggcccaaccaccctccctcacaacaggtggcgagtccagctttccccagcctgcctccctctcatgctgacctggccttgtcagttcaattacacttccttccgtccctcactaccacactaaacctcctgaaggcacccagaattattcctagcacatagcaactgctctttgactgttgtttgatcaatgaagtaataaaaagagagctgctctcttttcctgcgagatggagaattttagtcccaagcgccatctgccaggctggctaacccagggccgtggcggacagtccacaaagagttcactctgacccggcccctgtgtgtcattttccaggatctccctctacacctggcgcctcgcctgctgcctgctgggacatggcctggcctgctcagctgacctgctgccacttctaggcagccgtcatgtcactttgctacaacttcaagctaagacaggcaatgttttgggagatgaatctgttttctgactggccagggatgtgctgcagtcccctcccaggcgcagactggataccttccaagtacaaccttgaaatggagctctgggtaattaatgctgtctcagtagtgttattagtaattggtctgcagtgtataccgagagcatgtgtcaaatattcagaaaagcgtttgtgggtggtcagggagttgtttgagacggtgtcctgcattgaacagacctgcctttacgctggaggatccctcaacagctctgcctgaaaacagccatgcatgcacaggaggaaaggaacttgatagccttgtggccagttctgtggccgctttatcaaactaaagcttttgcaaatggccatgctttaaaattaggaatttcagaacccagggaaaggtcgattggtggctaatgccaattctaatgaaaagtggattggttgtcacaaatgtagactagcatcctaaaggcaaataggcggcgactcacaggctgactgaaacacgtgttctccgggaagcagggccccgagtcttctctgacaccctcattgctgcacctgcccctgtgcccgcggagtccatgcggtgcagcctggcacaaatgcagcagtcgctgggcgtcccgaggccacatggagaacctcccggctggcggactgctcccagctgcgaccatcgggcccttggcctctgcgaagccggggccatttataagatgacactgagggaactttggattcaattctgaggcattcttcgagatggacacttgtaaatgaatgcaggcggtttccggtgccccctggcgacggtgcagcctttcccccatccgcgctccctccagctccagccgtgcgcagccggccccggccaagtggggctgccgccgagtgcgccccctcccgggacgcccaccctcgtgccggggggcggtgctgcggcggcgcggggcgggccgcgggggcggggacgctgggcgcaggaggcgcggccgggagcgccgcgcgccgggagcggggcggcgggcgccggggctggcatggcgtggccctgtatcagccgcctgtgctgcctggcgcggcgctggaaccagctggaccgctccgacgtggcggtgccgctcactctgcacggctactcggacctcgacagcgaggagccgggcacgggcggcgccgcctcgcgcaggggccagcctcccgcgggcgc

SEQ ID NO: 31106 - DNA, 2300 bp, Homo sapien
attagccaggcgtggtagtgtgtgcctgcagtgccagctacttggaggctgaggcttgagcccaggacttcaaggctacagtgagctatgattgcaccactgaactccagcctggacgagagagagagagagagaccctgtctcaaataaataaaagtttttcacaggtgacaacaaaggaatgacagacatgtttttagcactctggcaggcatatggagaagcacagggttgctttggagaccagctggaagaacaggctcaacagtccagggactaagaagtgaggaccaccacggagtcacaggcactgggaaggctgaggggctgaattctagaaataagaggcgagagagggagatctcgaatggctccgggtttcagacttcaccgattgctcgtgtcactccttaagccgagtgctatttgaggggcctgtgcagggcgggggggtggtcccagagcctggaaccatgcgtgtgttgcagtagacacatttactaagagtacagagagattctgtgggtctggagctcagaatcctcacagataactgaggcttcagcaagtgcacccactcaagaagtgtatggaatgagggagacggcagccacggcatgttcctaggtaccccacacttcagatgccagtggaggcggcacagcccaagaggcccacgggccagggagtgcatggccttgaaggcagtgatcgcgggtccccagagaagccaagaggagaaagtgaagcaccctcgtgggcaatcaggagggagctgtggacagcaaggcttctccggccacagccaggttctggcctccccaggccatgcacagaggctccagcattgaggggttttagggaccaggagatgctacagggacttctaactttttcccagtcacaaagcagggacacagagatgtcttcattgcctctttgcctggtctgcccaaagcacgatgtgaattaatgttgggctctagagggaatgtccctatgaactcagcctcctatcccatctctggaaaacgcatcttgcctcatctgtgttgcagagttgttagcagatgtcagagcaaagcattgtgaccttgggcagtgcccctacaccacgtgtgccgtttcctcgctggcaaaatgatggctaagataactctctcccctagaagtgatacgagtttagaacagaatcctgtgcctgggaagaataactgtaaatcatagtagaaacaagtccagcctgatggaagaaggatatgaaggactgccaaatactggacaatttctatgtgctgggcgcgtgctgccatgcagttctcacttgcctggtgaggtgggcaccactcccactccttttccaaagccgccattcccatcccccacggcacacaacctgagtccgatcggccacaggaggctgaaatcagggccttcgatcctcccaggacaaagctgcaagacttggtataacattttgaagccatcaaaagactaaaaattctcctgtaaatgacttcaagaagaacatactctcaaactgcatttcctagatgtcattctcagtcacgagggtaacatgaattccacaacagtgaggctgtgacgacgacagccactatctgctatttcagtgagacgcttcaattagaacactttcaaacagaagataaaattcggctcagattcaagtctgaatttacccaaatcacttctttctacctcttaatttatctacaaattgaacctagaaagcaaaacctgaaaatagctttttgtatatgccactcactgccagaaaacactacctttcctgaaaattgagaaaatactgcagctgttatttcagattgtgctggagaggggatactctcgacttttatgtgcagccaacccaggggagggggaggcaaggaagagtgaaggctaagcagaggcactggagggtccaaagacaggcaaccagcgccttcatgttctgatcaggcctttcagggtgcactctccccaggtcctgtcaatgcaacaaccaaagcaaaatgccagagccgtgtcggccccttaaagagagaacacacacatctgcttacaaactagatagaaacctttatttcacaactttatcatcattcacattctaaaaagacacggactgggggacacagctgaaaacagtgggaggccagatgctggcatcttccagacgggagcatagccatggtcactctagccgatgtctcctggggctctcaggcggcaaggaccagatgcaccactactgtccaatcccagttttactt

SEQ ID NO: 31107 - DNA, 2300 bp, Homo sapien
tcttctctaaactcccccagggactactaagtagcaggtgtttttccttgacatgctaccgctagaccacagtctgcttggcaacgggcatcttcccagacgctggcattacccctagaccaaggagccctctggtggccctgtctgggcataatagaaggctcgcactcttgtcttttggtcactcctcactatgtcccctcagctcctgcctctgtatggcccggtttttcctaggttatgattatagagcgaggattattataatattggaataaagaataattgctacaaactgatgattaatgatattcatatataatcacgtctatgatctagatctagtataactcttgttgttttatatattttattatactggaacagctcgtgcccttggtctcttgcctcggcacctggatggcttgccgcccacagagaatctagaacaatgccgtatgggcccctctctgggttgtgtggaaaaggcgtgaatttattttagtttttcaaacaagtcgtgcgctgggagacatcacaaatgctattctttctgaggaacacttcaatcctcttctcttggtgacctctatcagtttctctgggaagccttctccctgagcctcccatgccccttccttcaattgggctatatcccccctctctagactcctacagagccttctcccccaatacaatagaatctttgtgaggtcagatatagtgtcttctcaattgtatccccaggtttaacatatcacctgacacactgtaggtgcttaataagagcttatggaatgaatgaagtgctattgcagagataagcataaagcggtatgtgagtacaaaggaagggaatctaaattggagtggaggtctgggaaaggcctcctggaagaggtgacacttgaggctgacctgaaggacaagtcggttagatgtttcaagtggtgagaacggtagcatgaatgctcagcagtgggaacgcggatggtgcctttgagtaatggccaatgactgtatggctgcagctagggtcggggggaatggaatggcagggaatcaagctaactgacaggtagttgagggatggattatgaaaaagtgaaagcccgcttttcatttcaggcttggattttgtgtttatttacttatttatttatgagaaagggtctcactctgttgcccaggctggcacgatatcggctcactgcaacctcccgagttcaagtgattctcccacctcagcctctcgagtagctgggattacaggtttgcgccaccacgcccagctaatttttgtatttgtatttgtaatttttttgagacggatctcgctctgtcacctaggctggagtgcagtggtccaatctcggctcactgcaacctccgcctcccaggttcaagcaatactcctgcctcagccaactgagtagctgggattacaggcccctgccaccatgcccggctaatttttgtatttttagtagagacggggtttcaccatgttggccgggctggtatcgaactcctgacctcaggtgatccgccggcctcggcctcccaaagtgctgggattaaaggggtgagccaccccgcccgataggcttggactttgttaaaggcatacagaataacacgaagtggtgagatgcagaaaaaagtagtaatttaagaaaacttggcttgccacgttggttcctctagggaccagccctgcaactccgggcaagtcctatcccctctgaccagaggcaaagtgaaacagtgatgacatctacctctagcagtgctgtgacgattaaatgcgatcttaggcaaagcgcctggtatgtgccgttactcgaaaaaatgacagttgtccctcttcgctctggccccatcctcctcatctgcaaatgccgggaggccgggccactctcgcaggtcgctcccggagccagctgagcagtgggaggggaagcggtgggacagaagggcgccagccagtcgtccgggcaccgtggctggttcggctgccgctcagccgcgcgggggcgctctagactgctcctcgtgctctatggtgttgccttcgccccggaagtagttgcgcagctggggttggtaaggtcgggccatggtggggcagaggttgggaagatggcgtggcgaggctgggcgcagagaggctggggctgcggccaggcgtggggtgcgtcggtgggcggccgcagctgcgaggagctcactgcggtcctaaccccgccgcagctcctcggacgcaggtaatagccgccgcgctctggtcttctcgcctc

SEQ ID NO: 31108 - DNA, 2300 bp, Homo sapien
ggctggcctggggatccatccttgcttgcttgcttgcttcagactggggctttgtttctttccaaacctgtcaggattcccagctcttcgccggcctccacgtggggtgccctcttttatgttccagatacacagacgatggtgtccttatgttcaaggccacagacagtaactttgtgcctactttgggcctgcctgctctcctgattgtgcctctttttccaggaaagtagagatgagtgtgttagagataatggaacactgttccccacacccttcatacatagaataacttagtcccttaggatagtttagcagtgtctaccacagcagtcactgtaggcacaaaacagtcattatttgtgtcataacagggaagtcgttttgtccctgcctctctctgctcctgtgctccactgattctacttcatcctttgaaataaaagtggttgaaagaatctttggttatcatgggtgcttagataattaagattatgttcgtgttcttcttgatgtggcatttcatattgtggatgagttccagtgacctcctctgtttcaaactgctcaccgccccaacccccaccttttaaaaaggtagtactaatcttttcctcttccagataatcagctaagctagggaacccttgaaggggaaggttagaatttcgtgattcccgtaagaaggttactctgatctacagctacagctcaacactggggacactggcagatgccaggtctgtttatagtttagccttaatgaggtctcaatgacgtgattgctgcactctggcttggtgagccgctgttctttatggtgtagtttgtcattggacaaggtgactttttttttttttttaaagataagtaacagctatatcaacttagggtacttgaaccagaattctgaaaggcaagaaatcaagctttctttggactggaaacctgtctttgcataggagatttagtcctttttattcagaggattagtaagtgttctctttttatctgacactttaaaaattgcattataatggttagaattttgtgctgcagaagtagtagttttaagtcacagcgatagccagggatttatggaatccagaaggcgacacggctacacgtctttaatttccgttggaggctagtatgaaaggtgttttctcagcttgtctctgggaggctgtgacccttcttagaggggggaaacattttggagaagtatgtatgtgttttttgtttttaagtgacctgagttgatacagcatattgattagacttagccaggcaagcagtggtttagaatagagtttcaggtaaaaactaggtaagacttagtaatacagggtggagaatttgtttttgttattgttttttactaacagctttgttgccataggatttatatgacatgaaattcactcttttaaagtataaattcagtgtgttttttttcaatgtattcactgcattgtgcaaccattaccactatctagttttagaacattttcagtacccagggaatttgtgtttgaagttaagttataacattgttttaactggataacttcatggagctttaaaataacaccagctaacccattagttaattataaaaaggcagagatggaatatatcattggtagaataagtgtttggtaagtttttatttagtaaaatttagtagaagaaatgatgtccactttaaaattgtggagtttttaatacttgggacaaactgaaattgtttctagaaagtctttaaaaaaaaaaccaacctttctattgtatacactggatttgagcttagttgaagagaatgggtgtctctttactagtgtgtttactgtttctaattttttttcccttagagttgggagaaggtaatttttcttgattctcttatactgaatctttttctttaaaaaaatgaaatcaaaatctttgaactttttttgaaaattaatttttgtagctataacagtagaaagctttagtacttttgccttttttttttttttcctatttttaaggcacttgagcttatggttaagtactgtttaggaaataatctatttcttgatgaatttttaatttcaggaattctgatgtgaaactaacagtctgtgagccctggaacctccactcagagaagatgaaggatatcgacataggaaaagagtatatcatccccagtcctgggtatagaagtgtgagggagagaaccagcacttctgggacgcacagagaccgtgaagattccaagttcaggagaactcgaccggtcagtttccttt

SEQ ID NO: 31109 - DNA, 2300 bp, Homo sapien
tttaatttacatttccaggccaggcgtgttggctcacgcctgtaatcccagcactttggggggcctaggtggatggatcacaaggtcaggagctcaagaccagcctggccaatatggtgaaaccccatctctacgaaaaatacaaaaatcagctgggtgcggtggccggtgtctgtagtcccagctactccagaggctgaggcaggagaattacttgaactctggaggtggaggttgcagtgagctgaggtggcaccactgcactccaacctgagggacagagaaagactctgtctcaaaaaaaaaaaaaaaaaaatcaatttccctgattatgaatgagattgggtgtcttttcatatttgagtggctgctcaagtttcctattctgtgagctgtctgttcatgtcatttacctattttcctattgggttatctgccgtttcttactgaacttagaaattattttgaatatttattattcaaaaactttgtcagttataacttgtggtttatcttttcaatttatgccatcttttaatatggcaaaaattatcaatctttcttcctttattctttgtttcttgtttaaaaagttctttcctactcccaagttcataaagatatttcctatcttcttctaaaagtttttaagttttccctttcacatttaagcgtttgatctacctgaaatgggttttttctgtgtggtatgaagcggtaatccctgattgttttttcatatgtataaccaattgttccagtactatttactgactcttcttgctttccccacggattcgtaaggttttctgtcacagatcaagttacatggatgcaccagtctgtttgggggctctttattctattgcattggtctatcaatccgtgcgcaagaatatgctgctttacgatacagtagtgtcttcacactagctaactagctagctgttataaagatggacaagtcactttaccttctccttcttcctcttcctcttcttcttcttcttttttaatctttgaattaaaaaaaaatacggcggggtgaggtggctcgcgcctgtaatcccagcactttgggaagccgaggcgggcggattacctgaggtcgggagttcgagaccagcctggccaatatggcgaaaccctgtctctacttaaaaaatacgaaaattagccgggcgtggtggcggacgcctgtaatcccagctactcgggaggctgaggcaaggagaactgcttgaacccggaaggcggacgctgcagtgagccgagatcgcgccattgcactccagcctgggcaacagagccagactccttaaaaaaaaaaaaaaactcataatacctactcatagggctgtaatggagattaaaggaaacaagaatggtatgtaaagcatcggatacaaggtagggaagaactcaacagtggcttttatttaatgatgctgaaggtaccgatgaaacagagaaataaagggatcaatctttctgggagcttcagtttcatttataaaaagaagaagatgagttagcataacatttctaaggctcttgccacttctaagactgtgatcctggcattttattatctagagaccaggcagcgagacattgatgggcagttggtgttaaagtgagaaaggcggtatctgcgcagactgcagggtcgaaccatgagcaagcaatcgtatctgccacaacagataagaactggggctggccggcctgacgactctcaacgggttagacgcgggctacgatgaccttcacgatcttttctggcagctacacggccacgcagggtgggactgctctgcctacgaacagcactgtgtgcgaacacagggccacggttaagcctcccggctgcctcccccagggaacacgacccctgagaagattccagacagtctcgcagaggcacggggaaggatggaacagagccgggagctcggtgggaagaggggcagcccgcaccgcccccgggatgtcaccggcgcttctgggaaatgtagtccttcgccgcgtccgcagccctgggcactcggaaggaggactacagttcccttcagccttgggaatgctttgtgcagcgcgcttgcgcggtgtggcggccgatgccgctataaaggcttgttttgctgcagggctcatgctcgggagcgtggttgagcggctggcgcggttgtcctggagcaggggcgcaggtaggtgatggctgctgccgcacccctgccctccagctcggttgtcacggggatcacccctttgcatttcctcggggcgtggcgggatgt

SEQ ID NO: 31110 - DNA, 2300 bp, Homo sapien
gaggggtgatggagactgtggtgatctagagtgagtatgaaccatccaaagggtttcactacttctgagctttggcagattgttgtcaagcagaaacgtgagcctcatgttgctagatcttatttttcaaatgaagccagaaacagtttttatgtgaaatctcaatgtttaagtgttacacaactaactttaaaaaaagaaaaaaaaaacactagcagggccaaaaataacataaactttcaggctaatagctcatgaccttttctttaaaatcataagtcagcagctgggcgtggtggctcatgcatgtaatcccagcactttgggaggccaaggcaggcagatcacctaagtttgggagtttgagaccagcctgaccaacatggagaaaccccatctctactaaaacaaaacacaaaaaatacaaaaaaattagctgggcgtcagccatcccattactgggtatatacccaaaggattataaatcatgctgctataaagacacatgcacatgtatgtttattgcagcattattcacaatagcaaagacttggaactaacccaaatgtccatcaatgatagactggattaagaaaatgtggcacatatatatcatggaatactatgcagccataaaaaaggatgagttcatgtcctttgtagggacatggatgaagctggaaaccatcattctgagaaaacgagcgaggacagaaaaccaaacactgcatgttcccactcataggtgggaattgaacaatgagaacacttggacacagggtggggaacattacacactggggcctgtcatggggtggggggagcggggagggatagcaataggagatatacctaatgtaaatgacgagttaatgggtgcagcacaccaacatggcacatgtatacatatgtaacaaacctgcacgttgtgcacatgtaccctagaacttaaagtataataaaaaaatgaaaaaaaaattatctgggctttgtggtgcatgcctgtaattccagctactcgggaggctgaggcaggataatcgcttgaacccgggaggcagaggttgtggtgggccaagatcgcgccattgcactccagcctgggcagcaagagagaaactccatttaaaaaaaaaaatcataagtcagcttttattttaaaaaagtattacctctgccaccaccccctactccactaatcactcccttcattgggtagacctgggtccagattgcttttgaaacactaaaaaggcatagcaaatcagctttgagaagaggaagcagaaatatgtcatcactggagcagtgctaatggcttcctcatactttaaagtcttaactatactgaagtcatgtttaaaacctcagtgtatgaagttgcttatattaatagggacccccctccccccaacacgctttcttttttgaaagatggcagtagggggccgggcatggtagctcacgcttgtaattccagcactttgggagccaaggtgggcagatcacctgaggtcaggagtttgaggccagccaaccaacatggtaaaacctcgtctctactaaaaatacaaaaacttagccaggcatggtggcaggcgcctgtaatcacagctacttgggaggctgaggcaggagaatcgattgaacccgggaggcggaggttgcagtgagccaagactgcaccattgcactccagcctgggagacagagggagactccgtcgcaaaaaaaaaaaaggaagggagggagggagggagaaagagagagagagggagggagggagagagagagagagagagagagaaggaaagaaagaaaaaagaaagaaaaagagaaagagaaagaaagagaaagaaagaaaaagaaagagaaaagaaagaaagaaagaagaaaggaaaagaaaagaaagaaagatgacagcagggtctaacaagttcacgtgccacctggaggcagtggtagtcatccatgccttctcggtgaggcactgtacgccagagtgactttaaagtatgaggaagccattagcactgctccagggaccacatatttttgcttcctcttctccaaactgatttgccatattacttttggaggctagattcaggcccagttaaagcacagggtgagttattcctctgtgacattcttttgtcaccaaggggtcttgttagagaggcggttaatgccagctgatatatatattattcaaaggtagggctcaaggtgtgatctgaggttttttaaaggttaacatcatcatcaagtacccagagaagtgccaaagagaggaagat

SEQ ID NO: 31111 - DNA, 2300 bp, Homo sapien
aaatatgtcatcactggagcagtgctaatggcttcctcatactttaaagtcttaactatactgaagtcatgtttaaaacctcagtgtatgaagttgcttatattaatagggacccccctccccccaacacgctttcttttttgaaagatggcagtagggggccgggcatggtagctcacgcttgtaattccagcactttgggagccaaggtgggcagatcacctgaggtcaggagtttgaggccagccaaccaacatggtaaaacctcgtctctactaaaaatacaaaaacttagccaggcatggtggcaggcgcctgtaatcacagctacttgggaggctgaggcaggagaatcgattgaacccgggaggcggaggttgcagtgagccaagactgcaccattgcactccagcctgggagacagagggagactccgtcgcaaaaaaaaaaaaggaagggagggagggagggagaaagagagagagagggagggagggagagagagagagagagagagagaaggaaagaaagaaaaaagaaagaaaaagagaaagagaaagaaagagaaagaaagaaaaagaaagagaaaagaaagaaagaaagaagaaaggaaaagaaaagaaagaaagatgacagcagggtctaacaagttcacgtgccacctggaggcagtggtagtcatccatgccttctcggtgaggcactgtacgccagagtgactttaaagtatgaggaagccattagcactgctccagggaccacatatttttgcttcctcttctccaaactgatttgccatattacttttggaggctagattcaggcccagttaaagcacagggtgagttattcctctgtgacattcttttgtcaccaaggggtcttgttagagaggcggttaatgccagctgatatatatattattcaaaggtagggctcaaggtgtgatctgaggttttttaaaggttaacatcatcatcaagtacccagagaagtgccaaagagaggaagatggaaagaggctggttccatgggaaaggattcctccttggcttcatcctccacctgctgctgcaagtaccttaagataagagcaagagctgagcagacatgtaactcctgggaagcagagaaaacaggctaatattttttattctgagatagtcaatgattggatgttcgttatggtaaaaatgatgctcgtgacactgatggctttgtacctcttcctaggatcctaatatttagttaactcttttctcttctttttttttttttttttgagatggagtctcgctctgttacccaggctagagtgcagtggcaatatctcagcccattgcaaccttcacctcccaggttcaaacgatctcatgcctcagcctcccaagtagctgggattacaggcacctgccaccgtgcctggctaatttttgtatttttagtagagatggggtttcaccatgttggccaggctggtcttgaatgcctgtcctcaggtgatctgcccgcgtgggcctcccaaagtgttgggattacaggcgtgagcccctgagcccagcctgggaactctttaagataatcctagtgatgaagactactaaatgttagaacaatcacagcacatagtaaagacacagtaaatactcatcaaattgaaaaactgaaattgatttgtttccttaagatcccatatatctcacactacctatctgattactccccttatcattaatttattagcatctatgccatattaatacagcgaggcggagaactgtgagtgcaaaatttgtcactgacatcacccacatggctccaggttggaggtaagcaagagaaggacactggcagaaggtggagaggttgcagtgagattgttaaggacatggcaggacactgtaaagtggcggtcggggttgagtttgcatacacatctggacaggttttgcatggggacaaaacaatggcactgaggatggatccttgactcagctcacctcatcagtttccaccatttgcctaccagctcagcctactcttcctggaccaggaaggaggagctcacatgcttctcccagtgccccctgttttctctccatgcagaaacactctccaggccccccagccctggccctcctctctcagtctctgctcactacaggaaatggcgacactttgattatcaattgcccaggctttggccagcacagggtggaccctgcagcctttcaagcagtgtttgacagaaaggctattggtccagtcaccaactacagtgtcgccactcatgtcaacat

SEQ ID NO: 31112 - DNA, 2300 bp, Homo sapien
cctttcccttcccttcccctttcttacagggtcttgctctgttgctcaggctagagcatagtggcaccattatggctcactgcagccttcacttcctgggctgaagcaattctctcacctcagcatcccaagtagtgagaactataagcacatgtcaccacacctggctccttttaaaaattactttttagccgggtgcggtgactcagacctgtaatcccagtaatttgggaggctgaggcgggtggatcacgacgtcaagagctcaagaccatcctggccaacatggtgaaaccccgtctctactaaatatacaaaaatcagctgggcgtggtagcgcgtgcctgtagtcccagctactcgggaggctgaggcagagaatcgcttaaacccaggaggcagaggttgcagtgagccgagattgcgccactgcactccagcctgggtgacagagtaagactctgtctcaaaaaaaaaaaaaattaccttttgtagagatggggtctcactgtgttgcctaggctggtctcaaactcctgggctcaagcggtcttcctgcctcggcctcccaaaatgttgggattacaggcatgagccaccgtgcctggcctggagcaggttttctagcaattcctctgttcccttctattcctccctttctcactccttccactccagtacttctagccacctttctgcctctctttctcccctctttgattctttctttcccttcaacctctggctcaagttggccaagtttccaagtcagggaagaaattacttgcagaggtggtaggtctgaaggactgcagctaccgcaaacctcaaatggaatccactgcagccctctcctgtgccttcctactttgggcctctaagtcattcctgcatttctcagcactttctacttagggctgtcatgatcactaattctgaacaaagttttttttgtattctacatctggcccttcaccctttctgcaaggaaaaactgtccaagtctttctggaaacgtagctaagatacttgaaataaaaatgctccaattcattcatttgagccaattttttttaataggaatgtggtgacataagacataatattaacacatgccaatgatattgatgttagctgagattactagtttacaataatgctatatattaacactattgacagcacaaagtgttactatcttaattttatgagttctattatcatgtaatcagtgcatagcctaaaaattatacggagaacattggtttggagagaataaatcagaaaggcagagacgctgtaaagaggaaatctagttaggggctactggaaaagcatagacactagatgatgaaggtatgaaccaagctttataatttggcatttggaataattccaatgtcaacaaaagctgtaagatactttggtaagggggccgggcgcggtggctcacgcctgtaatcccagcgttttgggaggctgaggtgggtggatcacgaggtcaggaaatcgaaaccatcctggctatcacagcgaaaccccgtctctactaaaaatacaaaaaattaggcgggtgtggtggcacacacctgtagtcccagctactcaggaggctgaggcaggcaggagaatcgcttgaaccaggcaggtggaggttgcagtgagccaagatcgtgccactgcactccagcctgggtgacagagagagactctgtctcaaaaaaaaaaaaaaagatactttggtattcataaccaaatcactaagtattgcacctggtcttggtgcacacagattccctggtcttggaagcacacaatcctaatttccccagcctacattctctcattaaggcacgttattttgttttggatctcagcacacagctgccaaatagaatgcttttcccctagtgtccgcccaatttcctgcctgcctggagcccggaaggtgcatctgggcagagccaatgcaggacacttggctgggacctctctggtcacaggctgtcacagggagtggtcacttgccatgagtagtattcaaaaccagcaaccagggtgtggtctgagctcctttaagctccagggtttgggagctcctggtgaatccccagagaagagtccagaaagaagaatggaaggagggtggcctgcaaggcagagtgccctcctctgcctcactgtcagtcttctgcttcaaggtaagatgggacgagaacagggaagaccagagtgtggttccgagggacacctggactcacctctagcacttggagggcattcagaattaatgtgttaaa

SEQ ID NO: 31113 - DNA, 2300 bp, Homo sapien
ggattgcttgagccctggagttcaaggctacagtgagctatgatcataccactgtactccagcctgggagacagtgagaccctgtctctaaaaaaaacaaaacaaaacaaaaagcaaaactcagtggacagattagacacagctgagggccgggcacggtggctcacgtctgtaatcccagcatggtggctcacagttgagggccaggcatggtgggagacagtgaaaccctctctctaaaaaacaaaaaaacaaaaaaacaaaaccaaaactcagtgggcagattagatggacagattagacacagttgagggtcaagcacagtggctcactcctgtaatcccagcactttggaaggccgaggtgggcagatcagctgaggtgaggagttcaagaccagcctggacaacatggtgaaaccctgtctctaataaaaatacaaaaattagctgggtgtggtggcacaagcctgtagtcccaactactcaggaggctgagacaggagaatcgctcaaatcaaggaggtggaggctgtagtgagccaagatcacgccactgcactctagcctgggcaacagaatgagactccatctcaaaataaaataaaatatggaaggcatccatacttgcattttgcattcttcgtatgtaatcatattgtcaaagacaaattatgtcataatctattgtaaataacacttttccccagacctaccataaagtttctgcaatgtattgtcttccagttgcaataaaaattactgagtttcatcaaaaattaattaattaattaattaaaataaacacagttgaggagagaatttttttcctggaagctagatctgaagaaatcattagggacagagataaagaggtagaaaataggaaagagaggtgtgctaggcagaataacggcccccagaatttgtccacatcctaatctctggaaccttaggttatatggaaaaggggagttaaggttgcagatggaattaaggttgttaattatcggactttgagatggggagactatcctggattatccaaatggacacaatgcaatcacaaaggctcttataagtggaagaaggagagagaaacaaataagaaccagagagatgagatgccttgtgagaaacattggcctgatgttgctggttttgaagatggagaagtaaaaataatgaaccaagaaatacaggcagtttaaaagctggaaaaggccgggtacaatggctcatgtctataatcccagcactttgggagatcaaggttggaggatcacttgaggccaggagttggagacaagcctaggcaacaaagcgagacctcatttctactaaaaaaaaaaaaaatagccaagcttggtggctcacacctgtgaggtcccagctacttgggaggctgagacggaaagatcccttgagcccaggaggtcaaggctgcagtgagtcgcgattgcgccactgcactccagcctggtcaacagagtgaaaccctgtctcaaaaaaaaaaaaatctggaaaaggcaaggaaatggattctcctctagagcctccagagggaatgcggtcctgctgacacattcattttagcccagtgagacccatttcaaacttctggcccacagaacagtaaaataacaaattgtgtttatttaagccactgggtttgtgatttgttacaacagcaataaaaggcatgtaagatagaaggaaaccattcaacacatgtctaataagaaaaatagaggaagtgaaacatttataaatgtctgagaattttccaaaattgaagagatgagtcttcagaccaagggatctcaccaagatctgcaagttgatcacgtatgaactatctataaccatttacgttgcagtgaaatacctaagactaagataaagtcttaaaagcagactgaaccttaagcataggcaagaacaagacaaccagaacactctttgaaggaaggttacaaatgtcagtggtcaaccaatgctattagtattcaaagtcagactctaggtgtggcctgtgctgctttaatctgggcattcctgggtcccagtacatgttcagagaagaacttagacaaagaagatggaaggaagctggttccacaggaaaagattttccttctacctccttctcggttttctgcttcaaggtaagaaaggagcaatgatgggggaaggcggaagaaggaggacctctctctagtagaacatctaggaacttttttcaaatttccaactcctagagattgtctaagatggatagagttctttcatagctacatt

SEQ ID NO: 31114 - DNA, 2300 bp, Homo sapien
ccatctgctggatccaagggctctaggttaggtaaggtgccagaaggcagcaggtcaagggtgaaagtagaatgtgcttctcttccagggggtcagcatggtagagagacaagaacatgggatttggagacaggtggacctgggtttgaatcttggtgtctcacgttgctagttttataaacttggatgcactgcttaacttatctgagctctggtttcctcatctgtaaaacagaacctaccttgcagggttgtgaggattcagtaagagaaggagggaagcacagtgtctggcacttggtaaaagtgccaataactgtcatctctcctcgttagattattccatgactttggataaggaggcacaggagaggactgaaccagaggtgactttaaaggccagcacagggaagagacacaaattgtacacctggtctaggcagtgtaaatggttatgaaagctcctctgggcacttgcacacaggggttgacaaatgaatattcactgttcttagagtggtttaagaatttgctggaaagcactgtgacgttgggaatggataaggctcaatgtccttggcacagaggttatcaaccatctctctcagtccaagttgttgctcctccaacacattttcatgactagaaaatttaaaaatttattagttagaagagggtgggacgggtcaggtgaggtggctcacacctgtaatcccagcacttgggacgctgaggcaggcggatcacctgaggtcaagagttcaagaccagcctggctaacatggtgaaaccccatctctactaaaaatacaaaaactagcctgatgtggtggtagtgcctgtaatcccagttacttgggaggctgaggcagaagaatcggttgaacctgggagccagagattgcagtgagtcaagatcgcaccactgcactccagcctgggtgacagagtgagactccctctaaaaaaaatttaaaaatttaaaaaagaaattaaaaaaaaatcccacccacacttctaaaaatagctatgtggctaggaatggtggctcacacctataattccagaactttgggaggcccaggtgggagaatcacttgagccccggggtttgagaccagcctgggcaatatagtgagatccccgtctctacaaaaattttttaaaaaaattagccaagtgtggtggggaacgcctgtagtcacagttacttgggaggctgaggtgggaagatcccctaagcccagaggctgaggccaagtgattgcgccactgcactccagcctgggcagtagagtgagtcgctgtctcaaaaaacccccaaaaaccccaaactaagaaatatgcacaattaggccgggcacggtggctcacgcctgtaatcccagcactttgggaggccgaggcgggtggatcatgaagtcaggagattgagaccatcctggctaacaaggtgaaaccccgtctctactaaaaatacaaaaaattagccgggcgcggtggcgggcgcctgtagtcccagctactcgggaggctgaggcaggagaatggcgtgaacccgggaagcggagcttgcagtgagccgagattgcgccactgcagtccgcagtccggcctgggcgacagagcgagactccgtctcaaaaaaaaaaaaaaaaaaaagaaagaaatatgcacaattattatatgtccattaaaaataaaataaaacttttttaaagcctcaaactagaacgctggtgatagagttgggtaaagtcaagtaagaaggaaggttggggcagtcggggtgaaaacaggtgtgttctctccggggccccgggactgtaatcctatcggatgactatcaacattccaggcacagtttgcatatagatttgggcatgctttgcatggagacagaaatattagaaaggaggctggagctctagctcagctttgctacattagcttccagaatttgcattccagctcaccccatcctcccgggcctcggaaggaagagcccagcgtctggacccctctcggtgatcccctccccattcttcatctcatccctggggacgtatagcacagcagcagcagacaaacctgggttcagaacaagtccggcttctgccttttattggctgtctgactgtaggaagttacttcctcttattgcaccttagttagctcgtttattacatgagggtaaagcagtatctacctgataggggattgggaggattaaatgaggtaatccatttttaaagggcttagaatatacctgacacacagccagtgctcaacaaatgtta

SEQ ID NO: 31115 - DNA, 2300 bp, Homo sapien
agcttatttattacattattcaaatcctctatatcatagcttatttttgtctgtgtggtctgttaaagttcaaaagtattttatccatgttctctgggtacttgtagttttccttttatatgcttgacagctatgtgatttgatgcataaaaatgtatggttattatatcttcttgaattgtgcctgattttatcctcatatattgtcactatttgttctgttcaatgtgttttgaacatgatttccatttgtaggatagtgttgcaaatcttgcttttgcctagtatattttcgcacatctctttcattaattcttgattcatttttggaagagtaatatacatacaaggtacaaatatcaaaaggtacagtatggtctgggcacagcgtttcatgcctgtataaaaataaaaataatagaccagcctggccaatatggtgaaactccatctgtactaaaaatacaaaagctagcggggcatggtggcacatacctgtggtcccagctacttgggaggctgaggcaggagaatcacttgaacccaggaggcagaggttgcagtgagccaagattgtgccactgcactccagcctgggcaatagagggagactccgtctcaaaaataaataaataaacaaaaattttaaaaaaattaaaattaaaaaataaataaaataaaataaaataaaataaaaacgataacagccctttcccaaaacaaacctccttcttgcctggggactagactgcctttataggactaacgaactagccacaagattagaaattatggtttaggagtcatgcaggtggaggctacaaaattctgaccctccctaaactgctcctaagatcagtgcttaaggtattttgcagaccctgcacttaatgaatcagctggccaccaagatcgataaactgactcatctgatcttgtggccccgacccaggaactgactcagcacaagaggacagcttcaacttcacatgatttcatctctgatctgaccaatcggcactcctggctcactggcttcccccaacccaccaagttgtccttaaaaactctgatccccgaatgctcagggaggctgataaaattccagtgtcccgcacagcaggctctgcatgaattactcttcctctattgcaatttccctgtcttgatgagttggctctgtctaggcagcaggcaaggtgaccccattggcgattacagacgcttgaatttcactaggttatgtcaaatgtgtgttttcactaatcctttctgtgtctcagtgacctttttcaatgtgaatatttaaatctttcttctgtttggggaattttttctaggatataagtaacactctacttactctcttccatctgttctttttctgttcaggcatttctttttttttttcttttttttttttttttgagatggagtctcgctctgtcaccaggctggagtacaatggcgtgatctcagctcactgcaacctccacctcctcggttcaagcgattctcctgcctcagcctcccaagtagctgggactacaggcgcacgccaccatgcccgtctaatttttgtatttttagtagagatggggtttcaccatgttggccaggatggtcttgatctcttgacctcgtgatctacccgcctcggcctcccaaagtgctgggattacagacatgagccaccgtacccagcgctgttcaggcatttgtgctattcacaagttaggtcctatggatctgttttctaaactgtctttttctcttccagcttccattttttgtggcttggctttgtgttgtgaccaatctttcagacaacaattcagttttcaggagtgaccatttctattctcagctcatctactgaatgttttaattaaaaataatttttaatttcataaagtctttttttatttttttgagacggaatcttgttctgttgcccaggctggagtgcagtggcacgatcttggctcactgcaacctccacctcccgggttcaaatgattctcctgcctcagcctcccaagtagctgggattacaggtgcatgccaccgtacccggctaattttgtatttttagtagagatggggtttcaccatgttggccaagctggtcttgaactgctgacctcaggtgatccacccacctcggtttcccaaagtgctgggattacaggcatgagccaccatgcccagcctcatgaagtcttttaagtgttctaatcacatgtcctagaaattatcttctctcctttcttaatcctacttcagaaggagcccttgtc

SEQ ID NO: 31116 - DNA, 2300 bp, Homo sapien
gaagtcaggagtttgagaccagcctggccaatatggcaaaaccccacctttattaaaaatacaaaaatcagccaggtgtagtggtgtgagcctgtaatcccagctattcaggggggcctaggtaggaaaatcacttgaacctcggaggcagaggttgcagtgagccaagatcgtgccactacactccagcctgggagacagagtgagactctgtctcaaaaagaaaaaaaaaaagaaaaagaaccagaactggcagttgaccaaatatatgaaaaaatgttcaacctcactgaaatagagaaatgcaaattaaaactacacttattttcctttacagattggcagaaactccaaactattgacaaaatactctgttggtgaggctatggggaaacaggcgctctcatacattgctggtgtaagtgcaaaatgacacattgtccagggagagcaattaagcagtatctccatgaattccaccagtgcctcatcaggcttgccagtgagttcaacaatgtaccttctgccatgggaattgcatccaatttgaaccagttactctaattcaataataaattctaagaaataaacgcaaatttataaagactatatgtagaaagatgtttattgcagcattatttgtaatcgtagaaactgcaaaaaaaatctgcaatgtttctcaagagagaaatggttcgataaacaatggtatactcgtgctatggaatattatggaatcattgaaaatggctatgtttgtctactttcccacatatgttaaataaaaatcaagttgcagacaaaatgcataatcatcaaaatagctaatacattaccttcacaatgtgtcaatgcctgttctaagggcttttcatatattatttcatttaattctcacaataactttatgggataagtattattattatcccatttcaaagatgaagaagtccaggcataaagaggctgagtagcccaaagctatccaactagggcctggaaccgaagccaggcagtctggctctggcataccagcatataaccataattatctaaacataattctgtgtttgaatacatgtggatatacatatattatgtttgaatatatatgtatgggtgtgtgtgtgtgtgtatgtaggcatacactctagctctagttctagacatataaatttagggaagaaatgaatacccatcaaattattaagaatggttatgactctacaaattggataggatgaaagaagtagggaaaggaatttttacttctttatgtagtgtgtgtgagagattatgtatatgtggtttccaatatatttcaagtaagtttttaaacaacaacaacaaaaaacagtttgagagagtcttcctgaaactcgtctattaaaatcatatccatatagctaccagtctacagaattttaagacctggatttaccataagcacaaatgcctttcggcagcggattcaccacttcccaacttcccaaggttgcgggaatcatttaaaataaattctgcaatcggacctactttccatacccaaacacccccccaagagtgtgtgtgtgtgtgtgtttgtgtgtgtgtgtgtgtgtcctatttaattccttctcccctcccccatttctacctctggatttgtagggcagttgaacattccttttctacaacgtgcattcatttaatggaaaacttttacttagttggcttcagcctttccttttctaggataaatcaaatggttttcgttccgcaccctaacgaggcaagaaatgacaaactcctcggtccccctaggcgggcgccggagcacgacgggtcaagtcggaatcgccacgtggaaacagctctcagcatcgcgaactccaaatcccgacgtgcaacgcggggcgggatgggaacagtttgcaggaactgcagaagcctgtggcgtggaacctggacaggtcccgtgcagaaagggcgctatgccttacagaaaagttccttgcctcccaaatgacgcccagccttcctgccccgttccaccgctttcccacggccccgcccctctacagagttggtttattccccgcagccaccgcttctttccccaaagagaaaaaggtgctgctgcgccttttcaagccttggacctttacgcccgcactttcctctgcccagaaagcttactgcttaactccagtacaacttactggtgcgcctggatccacccccgtctccactctgcttaagacacaggaggctgataggctggaagaatgaatagatgacataaaatagtcattgttatc

SEQ ID NO: 31117 - DNA, 2300 bp, Homo sapien
gagtgagactccatctcaaaaaaaaaaaaaaaaaaaaaaaaaaaaagctgtttaaatactatttgacttccaaacatattactttgataaaaaatgtaaagaaggtgaaggaaagggtatgaagtgacgatatacataaggtgtgtgcaggggctagcaagtgggttcattttcctggagtcaaaaatttggccaggatatgagacaaaaggctgtaaaagtaggtagaggttagattatggggggccttgaatagggatatttgggggctttggggaatgtggaaaggtttctgagtagaagaggtatctgaatgatgttgttattctagtgttaatttggcaacagtgtataaaatggagtagaaggagcccatacttaagaccatagcatccaaggccctatgtaatctggcgggtctatgtttccagcctcacctaggactgttcctttagtcatgatggccttcttattcctcaaatgtaacatgtttattcctgccttgagcctgtatattggctgtgccctctgcctagaaggctgtcaccccagatcttctcatagccacttcatccttgctatttctaggtctttttttctggaagaagttttctctaaccaatcagaaacctctttctcgttttgttttggttgttttgtttttgtttttgtttgaggcggagtctcgctctgtcgcccaggctggagtgcagtggtgggatctcggctcactgcaagctccacctcccgggttcaagcgattctcctgcctcagcctcccgagtagctgggactacaggcatgcgccaccatgtccagctaatttttgtatttttactagagacggggtttcaccattttggccaggctggtctcgaactcctaacctcaggtgatccacctgcctcagcctcccaaaatgttggaattacaggcatgagccattgcgcctggcttcccctgtcactatcccatcactttgttttaccttcttcatagcagtggtcactctgaagttatgtatttacaagcctatgtgcttccctccagctgagggaaggtcctgagagcagccttgtctgtctcgctatcgctatatctcatgcgatatgccttatacacagtaggccttcagtatttattaaatgaattaaaagttaaggggtgaggagatctgtgaggaaccggctatacctagttctggagttctggtttgagacttactgtcttaggcatgcatgcatccacttatctttttttttgggggggggcgaggggggatggagtttcacttttgttgcccaggctggagtgcaaaggcaggatctcgactcaccgatctcggctcaccgcaacctccgccgcccgtgttcaagcgattcttctgcctcagcctcccgagtagctgagattacatgcatgcgccaccacgcccggctaatttttttgtatttttagtagagacagggtttctccatgttggtcaggctggtcttgaactctcgacctcgggcgatccgcccgccttggcctcccaaagtgctgggattagaagcgtgagccaccgcgcccgggccccacttattccgcattcaacccatttattaaaccactaccttgcaactggacgctaaggttatagggaggaatcagaactggatgctgtccttctctcgagatcagtttagtagactcagtgacagcagttgtgcttctcaagaaacactgaagggccatgttgaggtcattctcctccagggatccagagtcagacccaccctctttccccagaccatttctggggaccaaagcaatccctgcattccactcttcctggactgcagaggagtcgccgatcccacttgggtccggagtcagggccttcaggggtccgggaacgccgccatcccggtgaatctccccttccgtttctagggacccgggaccggagcgccgcggcccggccagtgggcgggaaaccctgccatctgccgcgacgccggcgcctctccgcggcggccgggggcggggcgcgccggggcggggccgcgccgggccggaggaggggagcgggcccggacgaagccctgggccgggagggccgcggccaccggaagagtcgcggtcgccagtccagtcgggagagtggggagcggaagcggcggccgcggcggcggcgggcggcgctgggacccggtagcggccggagaacaagggagctggcgccgccagcagccgccgagctgggttgagccgctgggccgcgccgcgcgccgccgccgtctgggaggctcggcccg

SEQ ID NO: 31118 - DNA, 2300 bp, Homo sapien
cctcagcctcccgagtagctgagattacatgcatgcgccaccacgcccggctaatttttttgtatttttagtagagacagggtttctccatgttggtcaggctggtcttgaactctcgacctcgggcgatccgcccgccttggcctcccaaagtgctgggattagaagcgtgagccaccgcgcccgggccccacttattccgcattcaacccatttattaaaccactaccttgcaactggacgctaaggttatagggaggaatcagaactggatgctgtccttctctcgagatcagtttagtagactcagtgacagcagttgtgcttctcaagaaacactgaagggccatgttgaggtcattctcctccagggatccagagtcagacccaccctctttccccagaccatttctggggaccaaagcaatccctgcattccactcttcctggactgcagaggagtcgccgatcccacttgggtccggagtcagggccttcaggggtccgggaacgccgccatcccggtgaatctccccttccgtttctagggacccgggaccggagcgccgcggcccggccagtgggcgggaaaccctgccatctgccgcgacgccggcgcctctccgcggcggccgggggcggggcgcgccggggcggggccgcgccgggccggaggaggggagcgggcccggacgaagccctgggccgggagggccgcggccaccggaagagtcgcggtcgccagtccagtcgggagagtggggagcggaagcggcggccgcggcggcggcgggcggcgctgggacccggtagcggccggagaacaagggagctggcgccgccagcagccgccgagctgggttgagccgctgggccgcgccgcgcgccgccgccgtctgggaggctcggcccggccgcccgagcaggccgcgcgcgggccgccgggcccgaggccagagccatgggcgagaccaagatcatctaccacttggatgggcaggagacgccgtaccttgtgaagctgcccctgcccgccgagcgcgtcaccttggcggactttaagggcgttttgcagcgacccagctataagttcttcttcaagtctatggacgacgatttcgggtgaggatggcccccgccccgcctccgggagccccggccgctctggcttctaagggatgacgcggtccgtttcgacttgcctcgctacaccggctcctagccccgctctgacttctaggggcgactcggcccatttgggcccctttggttccagccccagtagcaactcccgtttacctctgaagaggggacgttggcctcccttgtttaaggggacgtccaattccccactagcaatcagagttcctgccggtgcggtccccttacctcttcagagaccagtggcccacagagacagacacaccccccctccacctagtttcagagcccgagtcccccatcctcctcctgccgaggagccagagccacctttttccgcacagacttgggtcgtgtggccctcgttcttcgcccccttcatcttttcagcagcacagctcccagccatatttggagtatgctgcatctgagggctctgctgggactttgagctgggggaggggtgtcgggggtgctcgggcgcctggccgcgagcggggtctgcagatctgatgtttatctagctgcctgccctctcctttgtgggctgttgtgggtgttgtcaccggaacagagagcctgacccctgcggagtagtcctcactgacccaggtgctgatctttcctccaattcgggcttttttcctccagttggtggccagtggagagacgttaggaagggcctggggcctgggtgggatagccaggaagagtttcttggtgttctctatcttcccctccctggtggggtcttcccttccacccagctgcagagatctggacaggcacagtttggaagcagtcactttccctttaagaggggatggaatgttggagccggaaggttctgaagcagctggcctgggaagaggggggcctggctgatccccctcgaacccccccaactcccaggagactgggggagggggaggcgcccacacttgcctgccgcctcactaactgggcgctgggcctggaggcggtggggaaggcccctccaggcctgaaggctgcctctccagccctagcctgaggcctgcactgctctttggagctgaggccccacagccaagaggagacattcttctccccagtgttcatctgtctggcttctctcccaagcccctggcccacctagc

SEQ ID NO: 31119 - DNA, 2300 bp, Homo sapien
cttgaactcctaggctcaagcgatcgtcccacctcagccttccaagtagctgggaccacaggcatacgctaccacgctcggctaatttttgtatttgttttgttttgtagagccggcacctcgctatgttgaccaggcaggtctcaaaactcctggcctcaagcgatcctcctgccttggcctcccaaagtgctgagattaccagcgtgagaaagagcaattattactgttaattatcataatggcatgtggaaaatgttcagtaaatgccttctccccttctctttttctttttcttttctttttttttttttttttgacacggagtctcactctgttgcccaggctggagcacagtggcgtgatctcagctcactgcaacctccacctgcccgattcaagtgattcgcctgccttagcctcccaagtagctgggatcacaggactggtagatgtcagagctggaatttcaccccaggcttgactccaaaatccatactctttccactgtatttcacattctttcctatataataacagaggtaacgtgggtctatgtggagagtgggtgctggaggacaatgatgtgaggcatgaagggtgtggaatgtggtcacggggcatgtagtttggccgggggaatgtggtgaggcaagaagtcaggcagtaactacagtttggggctaggaaggggagtggaaaagtttgaggaccctcagactgtcaaatatgccaggagtacagagatgggaagacacccaagtagatgggtgcacaccaccacacccggctaatttttgtatttttagtagagatggggttttgccatgttagccaggctggtctcgtactcctgacctcagggtgatctgcctgcctcagcctctcaaagttctgggattacaggtgtgagctatcacgcctggcctccccttctcttttctaattttcttaaattctttgtccatacctcccacaacaatgttaggattcccacttaagaaaggaaggacagttataattgtatgcttttttccaattagggatcagagggaaagagaaagtctagcccaggagagtcatgttggggatgggtagagcactttagagattttagggagtggcatgggggacagtgatgtgtcagttgtaatttgcaatcacctgatgactgagaggatgccccgggaaggtatctggcctaggcagggctggtgtcttcctggtggtgccaaagagctgtctctgggtctccccaacctctgctttcatttgaacagtcttgtgctggtggtttgattcccagtttaggatggaggagcccctgagagttgggatttgaggatcctccatttgcaccctagaaggttctctgtgacatccccctttctctgcagagtggtgaaggaggagatctcggatgacaatgccaagctaccatgcttcaatggccgggtggtgtcctgggtaaggagccctcagccttccatccacctgcatccctgtgctgggctggacgagggaaaggcatcactgagattgtagctggtggttttaagcttcagtatctgaatctttctttagttttgcaaatgaactgcttctcaccccagattctgtaacctttgatgaaaagtgagaaattagtgggaagggggaagagggagagacggaaacacacagtggagacagtaacgtttcctatgccgttcagacacttgcctcagatttccttctgccatctgctcatctctgccttagacctctgagccttgttctttgtccccattccacttcaccaccccatgccttccaacaaccccgtcaatagcaggaagtggcagaggggccactgttcatctcagccaccctcgcacagccctgtcttttctccctcgatatttcctgcttccttcctcttaggccttcatgccttgctggaagtgaactatccccttctccttgatgctcctgtaacatactactcactcagtttctccctttcagctggtgtcagctgagggctcacacccagacccagcccccttctgtgctgataacccatcggagctgccaccacctatggagcgcacgggaggcatcggggactcccgacccccatccttccagtgagtgtgacctgagggtggggagggccgcatcagttcagcccagggctgggggagggagcccccagcctgccccctcccccatcaagtctcttccctgcagccctcatgctggtgggggcagccaggagaacctggacaatgacacagagacggactctttggtgtctg

SEQ ID NO: 31120 - DNA, 2300 bp, Homo sapien
aacaatacttcctggggttttggtgtgcagagggctttgttggaagtgtgactcaatcttgcctgccttctgggagctctagaattgttcccaacccagtccatggcttctagccaccactacagggctgtttcatgtacttctctctctgactctgtcttgtccgactctcttgagaatttctcaacgattgctcatgcctgtcagtatcagtgcttccatcgttccatctttgattcacttctctttcctttctatttactcccaaaatggagtcattcatcctgatgtcctcaattgctgctgatatgctggtgattcccaaatacatagctccaacccccaacttcccccagactttagatctgtattggtattacctactggacatctctatggacagttccgtatagactcaactcatctgcccaaccaagtatgttcctcctgaattcctctcctggttacttcatcacaatctacataggctcaccagctagaaacatttatgagcttacattccttcttcccatatcttatcagcatatcatatccatttcactccaacactctgtcttgaatttggccctccctctcccctctctactttaattcattggagcatgggatttggagttaggtggttttgggtttgaattccagctctactatttttggttgtgtgatagagttatttaacctctctgagcctcagttccctcgtatgtaaaatgatgataataatacctacctcacagggttgttgtgaggatttaaattagatattgtacgaaaagtgcctagcacagtgcctggcacacagtagagtaggtgctcaataaatggtagctattattattattattttatcattattattatttactctaaattggtagcagtttagggtatttttggaagataaagcttttgcaaaggtagaagtgaagccttgagtgctggttcaaaaattagaagtgcctgtattcagtcacttaatgacttcaggccgtgactatgatgtgagagaggtcagatcttcatcctgccacatcgtggcttctggctggaggctgggaaggactgtaacatttgcaaccagatctgtcctttcttgcccttccttcctcccatgacaggcgtagtcctgcccaaggaaggcagcagtttatctctgcctacagaaagagaagagccaacagattttcttaagactctgcaagaaccaagcaggcctttcatgtgtgagggttgggtctgtctcctcagcttggatgtaaagattctgtttatcaaagaggggatttcaaatcccatgtcaaactaaattcaactcttcgaacgtcttctaagcaacatatatgcctgtcactagaaggcatacacagtcgcataggtatagctaaggagaacatcggctcgttcatgaaaagctgtagctgacctccgggaagagtgtacagtcatggacttatttgtgaaaaggtttagtttcttccaagtagtcgcctccttcctccccgctcctctccttgggtcttgatcccttggaaaaagctcatgtccggaacaaatatatgagaaaagcttgagagaatcagaggtagtgttagaaagcagtaaattcagcacaaacacttctactgcccagttgtatttatttgtgtgtaaagtgaggacagccagtcctgggactctggagacagaaaaggcctacagcaatccaaggcttaacagatgtgcttccacaaatggcattaatatcccaaagctctccagaacacaaataggaacaggaggaagtgcagggactacaattcccagagcgctcagtgaaaaaaaaaaaaaaaaaaaaaaaaaaaaaaaaaatgaggcgggtggagcggtgtatgctggaatgtgtatttctggtagggccgactaaggccacgcctaccccttcctgaggcgggggcggtttctcgaaggcagtcggtagttgtagttttgctaaacctagagcgcttcaaattgcaagcaaggaggccgcgaggcctgacgggatttgtagtcggcgctagacgccggcgcgcacgcgcagccggggccggggcggggcggcggcactgcggtgaaagccgaggcagcgggcagacgagcagggggcgggcggacatcttgggatccggagagtggccgggccggcagagcagggggccgaggacaccaggtgagccggggatctggccttatggcgtggaggaggacgctgcgggtcgtctgcctcgccgcgcagctttgtcctgccctgcactgagctg

SEQ ID NO: 31121 - DNA, 2300 bp, Homo sapien
ctcagtccctactctgctttgggatagtgtgagcttcattttgtacacgtgtgacttcgtccagttacaaacccaataaactctgtagagtggagttgctggcttagtgttgatgtgggagctacatggggagggaactggtgttgctctccgtgcagttttctgtactgaatactctaaaggctctttccttgtcttgtcccagttaggcccctcctgggccatccaagcccttatccttgtgggttctgggcccaggtttcctggctcctcttagaaagcctcaagggcatgcagccgcagcgggccccagtaccctggggatagattctttccctagctcctttttattccccctggtcctcggactcctaggctcaagagatcttacctgccccagcctctggagtagctgggatcacaagcacgcaccaccacagcacccagctctttctctaattcttaggcagatgttttctaattagattaagcataaattaagtgtgaagtttacatttggtcttgtagccatcctaagaaattgaccttttaattccatcatttacccaagcttcccaaatcttgctgactgggtggtaggaggaaagatttgcaaggagaataacataatggactgggcgcggtggctcacactgtaatcccagcactctgggaggccgagacgggtggatcacccgaggtccggaattcgagaccagcctgaccaacatggggaaacctcgtctctactaaaattacaaaattagccgggcgtggtggtgcatgccggtaatcccagctattcgggggctgaggcaggagaatcgctcgaacccaggaggtggaggctgcggtgagccaagatcacgccactgtactccagcctgggcaacaagagcgaaactccttctcaaattaaaaaaaaaaaaaaaaagaatataatgaatctccatgtctcatcacccagcttcaactatgatcaatgcgtggccagttccttaatatcacatccagtttgtgttcacttaaccaggtgtcttatcaaatttttccagataaggtccattgtggttggttaatgctcctcaaattttaaaaattgatgtttcccttcaggtcttgcaattttgtggaagaaaccagagttctgtagtttaccacatcagaatttgcctgttgtccccatgaagtcacttaacatattcctctttacctgtatttcctgtaaaatggttcaatatcgggattgatgcctcatgatggcaatgtttaatccaaagggatgaatgggtaataatgtaattttcggtgccacttttagagaccaattggaggaatattcacgttaaatataaagcagtagcatcattttggaggaaattcctaacttcccgagggaatcggtgaaaggaaatagccttttattggcatttattgagtgcagagaagtctgctcagggtgtaggtagggaataatttatacaggccacgttgtcctggttttcttgccctttggcggtggatttggtcgtgccctggggtggtggaagaactgaatgggcttaattcacaaaggtcggctgaattacacagtgaaaaggcggtcgcggcggggaggcgggtggcgctggccaccaggctgagaagcccgtagggtctggggacccgcgaaagcaaagcactgagcagggggcttctgagagtcagggaccggggtgagtcagcaaagctctgggcaggctccaaaatgggcctgactgggtacgcaccagcagcagacgcgcctcgagggagcgcataaaacctggcaaagccaaagtgctttatcagccgcctgcctcttgggaggctcccacccgccagaccacgggtgcctcgcggccccgataaaccttgagctcccagcctttgccccacccctcgctcccggaactccacctcccagaaggcagcgagaaccgcacatgtggctaatctttcagcggaaaaggtgtcgcgcacgcgcagagagcgcggctccggcgcagactcggcgcctctcctcaaggccccgctcgccccgcccaccgggctctgcgcactccgctcctttcctgcgtcaccgctacacatgcgccttgcaaggaagggcgagatttcgggggcagggcggggggcgggcctaggccggggtctcacagcgactgcgcggacgggttcctgagtggaacatggcgacttgcgccgaaatcctgcggagcgagttccccgaaattgacggacaagtcttcgactacgtgaccggtaagcagaactgaatc

SEQ ID NO: 31122 - DNA, 2300 bp, Homo sapien
ggcagggcggggggcgggcctaggccggggtctcacagcgactgcgcggacgggttcctgagtggaacatggcgacttgcgccgaaatcctgcggagcgagttccccgaaattgacggacaagtcttcgactacgtgaccggtaagcagaactgaatcggccggctggggagaccgaagtggaggccgggggaaagtctaagcgagcgtcgtgcccgggactgttgccaggcctctcctctgcatgacctcttgtcccgggggctggttgggtctggagcctggactggggcctctgtctggggtctgaaactgcttgtgtgtccaccctacccgataccttcctcgttctaccacgccctgcccaggcgtcttgcacagcggcagcgcggacttcgagtctgtggatgacctggtggaagctgtaggggaactattgcaagaggtgtccggggacagcaaggatgacgcgggcatcagggccgtgtgccagcgcatgtacaacactctgcgtctgtatgtgccagggagtaggggttgatgggggcgaagggacggcgaacggtccggagacaagaggtgggggaggaagatctgatggccatagagcttttccctcaactcctaactctgcgctttctatccctacccacatagggctgagccacaaagccagggaaatagccaggtgctactggacgcccctatccagttgtcaaagataacggagaactacggtgagagtgaggggaggttgaactaactgcccccctgtgcttttctccgcccccaaccatctgctgcctgcagcttagggctcctacgtcttttccacaggacaaggttgtaggagctagttgatgtctttaccgagggcagaagagcccatgatgggggtggggaggaggttggagggttctccctccaagctcttgggtaggataggaagcataagagcctggagctggacagacttgctttcacccccagttttgcaacttgctaaccagctgcatgatcttgtaagagttggttatctgtccccagccttgtctatgcctctgtatccttctacgtgagttttgttttgttttgttttgttttgtttttagtgcagggaagataatagccatctatctgcagtattataaggttttgtagaaaacatctgtgtctgtgcctggttcctattagtcactcaaaatgttagtttcccttccctcagggagaaggtgactgcttttcttatcgcttacagactgtggaaccaaacttccaggactgctaaagagggaacagtcctcggtgaggaggaggaagcaagggaggggactgtctgtgatggggttgggagttgactgtctaattggagtatcttttggggggatttctgactatgtcttttcctgagcctttgagtctgttcatcatgggtaagttaagagggtttactcgagatgttctctcttggggttcctttctgagcctacacccgagagtgaagtcgatgtgtttggacccttagacagtgaatgcaaagaagttagagaaggccgaggctcgacttaaggcaaagcaggagaagcgctcagagaaggacacgctcaagaccagcaaccctctgtgagtgggggaagcatggctcagaagagagcagagcagcttttgcctggacagaaggtggtggggagcactaagagctgtccatttctccctttaaagagtcttagaagaggcatcagccagccaggcaggcagcagaaaggagagtcggttggaatcatctggcaagaacaaatcctatgatgtgcgaattgagaactttgatgtgtcttttggcgataggtgagggaatagtggtggcaggggttggctttctttttctaattagaggacaatttggagaggtgaaacggggctataaacaatgttaggtttgtcattaaacttgctgtgcacctatttctagagcatctttggtctcctttctccactcctgcagagtactgctggctggagcggatgtgaacctggcatggggccgccgttacgggctggtggggcggaatgggttggggaagacaacgttactgaagatgctggccacccggagtctgcgggttccagcccacatttccctgctgcacgttgagcaagaggttgctggagatgacactcctgccctgcagagtgtgctggagagtgacagtgtgcgagaggatttgctacggagggagcgggagctcactgcccagattgctgctggcaggtgaggactcccggctagggagtaactagcag

SEQ ID NO: 31123 - DNA, 2300 bp, Homo sapien
gagaaggacacgctcaagaccagcaaccctctgtgagtgggggaagcatggctcagaagagagcagagcagcttttgcctggacagaaggtggtggggagcactaagagctgtccatttctccctttaaagagtcttagaagaggcatcagccagccaggcaggcagcagaaaggagagtcggttggaatcatctggcaagaacaaatcctatgatgtgcgaattgagaactttgatgtgtcttttggcgataggtgagggaatagtggtggcaggggttggctttctttttctaattagaggacaatttggagaggtgaaacggggctataaacaatgttaggtttgtcattaaacttgctgtgcacctatttctagagcatctttggtctcctttctccactcctgcagagtactgctggctggagcggatgtgaacctggcatggggccgccgttacgggctggtggggcggaatgggttggggaagacaacgttactgaagatgctggccacccggagtctgcgggttccagcccacatttccctgctgcacgttgagcaagaggttgctggagatgacactcctgccctgcagagtgtgctggagagtgacagtgtgcgagaggatttgctacggagggagcgggagctcactgcccagattgctgctggcaggtgaggactcccggctagggagtaactagcagccgctgtcgcttacagagcgcctgccgtcctggaacaatccataatttgcatgtacatcctagtaatcagcagagcttagaacttggcactctgggactcagaagcccttgttctttccacagtgcccattgccctttcttgttctttccacagtgcccatttccatagtgcccaaggtaatgagcactgtgcaaacccttcctgtattctcttcctcttccagccacaaggtagccaatggcctttccaacggtatagggtgcaggacatcctcctagactgcccctgcttaggccaattgctgtttctcctccctccagggcggagggctctgaagctgcagagctggcagaaatctatgccaaactggaggagattgaggctgacaaggcacctgccaggtatttaaagctccccctccctccttcagatttcctttcccttctgtggactgttccaactgagttcttcgatttcttctctactagggcatcagtcattctcgctgggcttggctttacccctaaaatgcagcagcagcccacccggtgagtgacccttgccattcttggctttgaaccctgttgtctcagccccttcctgccctgatgaacacccacccataatgtgactccatcattctttagggagttctcaggtggctggaggatgaggctggccctggcccgggccctctttgctaggtgagtctcctgggccagtgtatgaagccctatggaagattggtcttagctcttgggaggtggcatgagttgctgacctaaaacctcaggccatgtattgtttttcataggccagatcttctgctgttagatggtgagtttgaaatggggcaccctgactttaggatgggcaggggtggtagcatccaagttcctagttctccagcccttcaatcccaagtgtgtgctcccctgcttctccagaacctacaaacatgctggatgtcagggccatcctgtggctggagaattacctgcaggtgagtgcctgtgggtgctggagtgtgttggggaaaggcggcctccaagatacctgggggcctgagaactgactgccctcccaaaccgggcctgctgtcctgtgacccctcagacgtggccctccaccatcctagtcgtctcccacgaccgcaacttcttgaatgccatcgccacagacatcatccacctgcacagccagcggctagatggttaccggggagactttgagaccttcatcaagagtaagcaggagcggctgctcaaccagcagcgtgaatatgaggcgcagcagcagtatcgccagcacatccaggtgtggggcctggcagggctgggggtcccatcccaggggttccagagtgggggatagtgggggaatttgaccaatgcctacactcctccacctgcaggttttcattgaccggtttcgctacaatgccaacagggcctctcaagtgcagagtaaactcaagatgctggagaagctgtgagtacagcatccttggccagggcctgactcctgttctcttcgtctccttccgcatttgcacgccacccttgccctaccattctaggtctcccctt

SEQ ID NO: 31124 - DNA, 2300 bp, Homo sapien
cgttcccgcagggccggcctcccggcgccatgcccggcctgtactgcccctccagctggacgccgctgccgctcacggactcctgggtccgggcctgcgccaacggcccctgcctcagcgtgcgggcccggctcacctaccgcaacccgcagccgcagccggtggacggtgaggcccgggtggggcgcgggcgcggcggggggtgcgccgggcagggtccgacgccgcctcccgccgccctccccaggcgtgttcgtgtacccgctggccgaggccgaggtggtgtccggcttcgaggccgaggccgccggacggcgcgtctccttccagctgcagagccggcgccgctcgcaggccgcctgctgccgcgctctgggcccggggctggggaccccgacgccccgccgctgcgcgcagggtgagttccgcgcgcccgcacccgcgctcctgaaagccgggcgcagctcaggctcccgcatccgctcggcctccgcccgtcccccgccttcctccgggcactgccttgtgcattcattggctcatcctggtatttagcagtcgtgggctgggcacctgacctgcgccaggtgctgggagaacatggcccggaggttcacagcctgggagacagacacagcaggcagcacagggcttgcgggggcgccagcaacccttacagcccaggagaccggtctctctagggggctgcaaagggagccttctcccctggtggtcccctccggccccttactattttaggctgcacacctcaatccggccccgcgtgggccagtgaatcaagtgtagactcctgtgcctagcagccaaggccctcgctctcaccccattccatccctctcccagcgaccccatacaccaggtaccgctgccgctggccacactgactgacaggtcctttcccaactctctgctctgtctttccatcttctattgagcaaattcctacttgtcctttaagatccactaaacgtcattcctagggaaaccctccctgactctcccacaaatagctgcactgtttcctggctccccagccttttgtgccccctcgttatggcacttacagggggagtcattgtcacagatctgcctgtctgtctccccgctggagcatctccaaatcccagcacctcacacagaacctggcactatgaggcccagcgagtgcccggggaagggacagaagcccagccctgtgctgtgtgctgtgcttgcacctggttctttcattgattcattcatacatggctttgattcctgcccaggggatttgcaatccaggtaagaagaagaggaacagaatccagtggtgttgagagctggcataagcccagcacgttaggggcttgtggttagaggctagagtgagctctgggctgaggccccaggaatgttccagaaggaggtagagccagcatttgactgcaagaaagggtaggactcagttaagtggaaggtaggggcaacagtataagcaaatgcttataagtaggttacagtgggtaatgacaataaaatatctcatgtttatagtgatttacagtttacaatcgctagtatcacctcatttgaatcccaagtagtgggtaatgcaggcttcttcctgttatgggggatggaagggggataatcccccttcctcctgttatgggggatgaaagtcatagcaggggtcactgacttatatgttgggtgctttgcatacattgcctcatttgttcctcaccacaatcacagagttattatgatccccactttatggatgaggaaacaggctcctcagaacaagagagctgccaaaggactcaattagaggtcaccgagctgatatttaaaacttgatgctgtgctgtctccactgtgtcggttggctgggatggaagcccctttctttctttccttccatctttttcttcccttcagttattcagcaagtatttattgaaaggatgaacaattggtcattgtgaggaagtgaggtacagtagggctgtgaacgtgggctggggccagaccacgtcggtggtgtacacagctgccactgtacatggctggtcattattcctttagcagccccaccagtccccaaacaaacctaggagctaaataaaacagtgtgtgcagtgtgcaaatggagctttatgtcctccagcctgcttcctgcttctctattcctcctgcccgggaggagtagagaattctggagccaccttagtgggcaatgggggagctcctgatggttcaggagcaggaaatttatgagcagagtggggtcccag

SEQ ID NO: 31125 - DNA, 2300 bp, Homo sapien
tcttcccttcagttattcagcaagtatttattgaaaggatgaacaattggtcattgtgaggaagtgaggtacagtagggctgtgaacgtgggctggggccagaccacgtcggtggtgtacacagctgccactgtacatggctggtcattattcctttagcagccccaccagtccccaaacaaacctaggagctaaataaaacagtgtgtgcagtgtgcaaatggagctttatgtcctccagcctgcttcctgcttctctattcctcctgcccgggaggagtagagaattctggagccaccttagtgggcaatgggggagctcctgatggttcaggagcaggaaatttatgagcagagtggggtcccaggccacagggagatgtctatccacaagggatggtggccaagggttgaatggaaagaggcaggcagggggagaggggcagagggtgtgggtattcccagggccttgagagtggacatggccccttctcctcagccttccattagcaaggatgtcactgctgctcttgcctgatgacagccagatctgttcacagttagtctgcctctcctgccatcattcatctcatgcctccatcctgcgtcaccaatgcattagcctagtgccaacacgcaaagtcccccttgcccaggctccctgacccaatgcctgcttccacatctagcttcctccctctcctctgcttccagcatgctctgaccccatttctcacccatcataggtcatcttgtcttggatctggcccaggcccggtccacgttggtgctgcccacaggcattatcgccgcggctggcaccatgacggtgaccctgcacagcagccgggagctgccctcaaggcctgacggggtgctgcatgtggccctgcccactgtgctcaccccgctggccccgccaggcccgccggggccccccaggcctccggggctctgtgacgacaggttgggcctatggtgattctcttcgtccctccctcggcttctctgggtctagtgcgggtgagggggcactggcagggtacccagggatgggaagggtgaggaagggctggggccagtcagccggagggtttaggggccttcacagtggcccagtgaccctcctcatgctcccttccagccccaccagctgcttcggggtgggcagccttcaggaggaagggctggcctgggaggagctggctgcccctcgggacgtgttctcaggccctgcccgctgccctgccccatataccttctccttcgagatgctggtgactgggccatgcctgcttgcaggtgggtgcatctggctggcctgccctcttttcagatgcccactccacccagtgtagtgactggaagggaaataaggctcagggataggagggacacaggacaaaaagacagggaccccagcctccggaacatctgggttagtggtgggagcatcccctggtcacctctacccaacacacacaccccaattttatcaaggtaatttatttatatctcatcccacccagcagtgggaagagagatacttacaatgggactagtacctgtgatgaagtaggttttccttacacagaaggtggggggtgaatgctaaatcagcacctggctgatgcatgactcttcgaccagccagaaaccctgctggaatctacttcccagcccatgaaagcaggcacatcctccctcgtccatctgaccccatatagatcagactctgagagctgactgaatcagccatgacccctgccaacatttgctgtccctgggaaggtgttatggctacatctccccttcctgcctctatgtccctcaggcctggagagcccctctcatgctctgcgggcagatgccccccctcatgccagctctgcagccaccatctgtgtcacactggcagagggccaccactgtgaccgggccttggagatcctgctgcaccccagtggtgagagactgggacacaccgtgggccggctctgacctgcttctacatgaatgggggaagcatttcttaagtgcaggtttctgggccccagccagatggactgagtcatctgtgagggcagagcctgtggtgcaggaaggctggacctgcaggctcctcctggacagtgaaactgggcacttggggtccagaggcagggccttccttgacagaattgtgtcctctcctctcagagccccatcagccacacctgatgctggagggcggcagcctgagctcagcagaatatgaggcccgggtgagggcccgccgagattttcagaggctacagcga

SEQ ID NO: 31126 - DNA, 2300 bp, Homo sapien
ttgtttttcttttgagacagggtctcgctcagccacccaggctggagtgcagtggtgcgatctcagctcactgcaaccaccatctccccggttcgagccattttcccatctcagcctcccaagtagctgggattacaggcacttgccatcatgcccagctaatttttctattttagtagagacagggtgtcaacatattggccaggctggtgttgaactcctgacctcaggtgatctgcccgcctcgggctcccaaagtgctagaattacaggcataagccaccgtgcccagccaggctggtctttaactcctgcccccaagtgatccgcccacctcagcctcccaaagtgctgggattacaggcatgagccaccgtgcccagtctaactgaattttttttttttttgacacggagcttgctctgtcacccaggctggagtacagtggcgcaatctcggctcactgcaacctccacctcccgggttcaagcaattctcctgtctcaacctcccgagtagctgggattacaggcatatgccaccacgcccagctaatttttgtatttttagtagagacaggatttcatcatgttggccaggctggtctcaaattcctgacctcaggagatccacccgcctaggcctaccaaagtgctgggattacaggcgtgtgccgctgcgcccagcctagctggagatttttaatagaggatcctctgtccacagcactccttcccctcacctttttcttctttccttaaatagctaattcctaccttccaagggtggctctatgaagcctttgctgactcctccaacctggtttaagtgacttcctatgccctttatggtatcctgtgttactactaccatgattatgatgcattataattgcctgctaacttactgtccaggcccgagttagaaatgcatcctttttctttttttttttttgagacggagtcttgctctgtcgcccaggctggagtgcagtggcgtgatctcggctcactgaaagctctgcctcccgggttcacgccattctcctgcctcagcctcccgagtagctgggactacaggcgcccgccaccatgcccggctaaattcttttttttttttttttttcagtagagacggggtttcaccgtgttagccaggatggcctcgatctcctgacctcgtgatccgcccgcctcggcctcccaaagtgctgggattacaggcgtgagccaccgcgcccggcagaaatgcatctcttattcaccactgtacctctctctggtaaccagcataatgctaggcatataataagcactaaataaatatttgttgaattaagagtctttagcaagaaagccaagtgccttaagcctagagtatagtttcagcctggaaaggagtagccaataatgcctaatggactcaagtggtcacaagatgccatcattgagaagggacgttcaaagatcacagaactgaacacatggaaaaagctgagatccaggaggagacctgaggtgtccaaagccacagagaaaagcagcagcagcagcagtacaacaattttggctcaaatctgacttctaagctggtttgcaggctgtaagttcagtgcagaaggccaatctctagggtatccacctctgccatgcgggcagattaagatccggttttctgtagagcaggcttggcgctcaggtaagggatatggatgggttcgcaattgacgagtgagtggatacagagtctggtttggagttccaggtctgagatccagtttgggtcgcgggttcaggtctccctccctcccctcccctccccctcggcgcactcacatgccaccctgtgaatgacccagaaggtgatgcccacctccgccaggcagaggcaggcggccaccagcagcgtgtagcgcggctcccgcagcagcaggcgccgctcttgccaggcgcgctgcagccattgcttgcagagtccctctgcctgggccgcggaaccggaccggccgcgtttccgcagcccagccgccatcttaacggtgcgccgcttgtgtgggcccaccacccccggaaacccgaaccttcgacacttaggttccgcttcccgtgcctggcgtcccaccaggctaagcgccgatccgagtagccagtcttcatttactccactaaaatgtaatttttctgcatttgtctcctctgatgcactccacgctccataggagcagggacaatgtcttactcctcagtttatacccagccctgggtacacaggcgctaatttagaacgaatgtccagaaaag

SEQ ID NO: 31127 - DNA, 2300 bp, Homo sapien
gtgctgggattacaggcgtgtgccgctgcgcccagcctagctggagatttttaatagaggatcctctgtccacagcactccttcccctcacctttttcttctttccttaaatagctaattcctaccttccaagggtggctctatgaagcctttgctgactcctccaacctggtttaagtgacttcctatgccctttatggtatcctgtgttactactaccatgattatgatgcattataattgcctgctaacttactgtccaggcccgagttagaaatgcatcctttttctttttttttttttgagacggagtcttgctctgtcgcccaggctggagtgcagtggcgtgatctcggctcactgaaagctctgcctcccgggttcacgccattctcctgcctcagcctcccgagtagctgggactacaggcgcccgccaccatgcccggctaaattcttttttttttttttttttcagtagagacggggtttcaccgtgttagccaggatggcctcgatctcctgacctcgtgatccgcccgcctcggcctcccaaagtgctgggattacaggcgtgagccaccgcgcccggcagaaatgcatctcttattcaccactgtacctctctctggtaaccagcataatgctaggcatataataagcactaaataaatatttgttgaattaagagtctttagcaagaaagccaagtgccttaagcctagagtatagtttcagcctggaaaggagtagccaataatgcctaatggactcaagtggtcacaagatgccatcattgagaagggacgttcaaagatcacagaactgaacacatggaaaaagctgagatccaggaggagacctgaggtgtccaaagccacagagaaaagcagcagcagcagcagtacaacaattttggctcaaatctgacttctaagctggtttgcaggctgtaagttcagtgcagaaggccaatctctagggtatccacctctgccatgcgggcagattaagatccggttttctgtagagcaggcttggcgctcaggtaagggatatggatgggttcgcaattgacgagtgagtggatacagagtctggtttggagttccaggtctgagatccagtttgggtcgcgggttcaggtctccctccctcccctcccctccccctcggcgcactcacatgccaccctgtgaatgacccagaaggtgatgcccacctccgccaggcagaggcaggcggccaccagcagcgtgtagcgcggctcccgcagcagcaggcgccgctcttgccaggcgcgctgcagccattgcttgcagagtccctctgcctgggccgcggaaccggaccggccgcgtttccgcagcccagccgccatcttaacggtgcgccgcttgtgtgggcccaccacccccggaaacccgaaccttcgacacttaggttccgcttcccgtgcctggcgtcccaccaggctaagcgccgatccgagtagccagtcttcatttactccactaaaatgtaatttttctgcatttgtctcctctgatgcactccacgctccataggagcagggacaatgtcttactcctcagtttatacccagccctgggtacacaggcgctaatttagaacgaatgtccagaaaagcaacattcctgcctacctcccccacaaccgctgaagccagcattctccttcgcctgcgctgggaacatctgtgttcatgctgtctctccaggagggcaaagcccctgttcgcgcccctcctgcctgcccttcgagccttccggatgctgagaaaaatgaacctttcactaattttcagatttcctgataaaagtcattcatattgaaaatatgagaggacgcagtgatgagcccacgtgagtctgacaccttgagtgcggccctaggaaatgacttggcagtacagccggaggattcagggtctggacgatagttttcccagccggaggattcttcgaagagcgcttagtaaaggacggaagttccacgtgtttgtgttgagcaactgcaggtggtgggcggagacaccagcgccccgccttctgcatcctgccttccgtattggctgaagggccggcggctctggctgcccggcggttgagagcatggcctctccaggggcaggtagggcgcctccggagttaccggagcggaactgcgggtaccgcgaagtcgagtactgggatcagcgctaccaaggcgcagccgattctgccccctacgattggttcggggacttctcctccttccgtgccctcctagagccggagc

SEQ ID NO: 31128 - DNA, 2300 bp, Homo sapien
ctcttcttgcacaggctggagtgcaatggcatgatcttggctcaccacaacctccgcctccctggttcaagcgattttcctgcctcagcctcccaagtagttgggattataggcatgcgccaccacacccgactaattttttgtatttttagtagagatggggtttctccatgttggtcaggctgatctcgaactcccgacctcaggtgatccgcccgccttggcctcccaaagtgctgggattaatggcgtgagccaccgcgcccagccaagttattaaccactaaattatacttttttttctatccctagtaatgttctatttctcaaactgagtggaatagacacacacattagatttgttatttataccttacatatatattacatataccttttttatttattaaagacttcacttaaacatacaaaggcttttacaaagagcaaagtaaaaacgacaattggaagaaaatctgttgctcattcaaactttactagcgcctccaaggctgacactaggagagaacctcaagaggtcagccgaacaccccagagccctacctttcctccagcacgtctccctttggggaatcgtatcaccctgggcggcaatctcccctccacccctagagggtgctgttctcactctctaaggcataggaccaagtttcagacaggactctctctaggtgactctggctcccagtgcccaggggcaaaaagaaaagcgctgggcattattctcgaggtgcctgcgcgtgccgcctccgatgtgaactcgcagtaccatttctagaactgaatctaaagctcagaacgggttcatgacttgtcctaagttttacaagtcaattagcgctaggacttgatctcggtcctctgagcaatccggtccccaaggctgcctgcctcccgagggtccggacagggtcttgggtacccccaacgctcaaactctgagggactgtctttctccagagggccccgggaccaacaatctcttactcctgttagccttgactaaatacagccgggactctgaaggagctggatctcgcgtcccaacgcaggcgtcctccaagagggatagacaggcgggaggaaagcggaccaggccaagcccatgcggcgccggtcctgccagctctacctggcggggccgcgccgggattacccacctagcacaaggatacggtcctcgggccgcagctccggctctaggagggcacggaaggaggagaagtccccgaaccaatcgtagggggcagaatcggctgcgccttggtagcgctgatcccagtactcgacttcgcggtacccgcagttccgctccggtaactccggaggcgccctacctgcccctggagaggccatgctctcaaccgccgggcagccagagccgccggcccttcagccaatacggaaggcaggatgcagaaggcggggcgctggtgtctccgcccaccacctgcagttgctcaacacaaacacgtggaacttccgtcctttactaagcgctcttcgaagaatcctccggctgggaaaactatcgtccagaccctgaatcctccggctgtactgccaagtcatttcctagggccgcactcaaggtgtcagactcacgtgggctcatcactgcgtcctctcatattttcaatatgaatgacttttatcaggaaatctgaaaattagtgaaaggttcatttttctcagcatccggaaggctcgaagggcaggcaggaggggcgcgaacaggggctttgccctcctggagagacagcatgaacacagatgttcccagcgcaggcgaaggagaatgctggcttcagcggttgtgggggaggtaggcaggaatgttgcttttctggacattcgttctaaattagcgcctgtgtacccagggctgggtataaactgaggagtaagacattgtccctgctcctatggagcgtggagtgcatcagaggagacaaatgcagaaaaattacattttagtggagtaaatgaagactggctactcggatcggcgcttagcctggtgggacgccaggcacgggaagcggaacctaagtgtcgaaggttcgggtttccgggggtggtgggcccacacaagcggcgcaccgttaagatggcggctgggctgcggaaacgcggccggtccggttccgcggcccaggcagagggactctgcaagcaatggctgcagcgcgcctggcaagagcggcgcctgctgctgcgggagccgcgctacacgctgctggtggccgcctgcctctgcctggcggaggtgggcatca

SEQ ID NO: 31129 - DNA, 2300 bp, Homo sapien
cctggctcaaacgatcctcctgcctcagcctcttgagtaactcggactatgggcacaggccaccatgcccagctaagttttaattttttttttttttgagacagggtcttactctgtcacccaggctggagtggagtggtgcaatctcagctcactgcaacctccacctcctgggctcaagtgattctcctgcctcagcctcccaagtacctgggattacaggcacgtgccaccacacctggctgatttttgtatttttagtagagacggggtttcaccatgttggccaggcttgtcttgaactcctgacctcaaatgatccacccgccttggtctcccaaagtgttgtgattacaagcataagccactgctctggcctaaattttttgtagagatgggatctcactatgttgcccaggctggtcttgagctcctgcgatcaagtgatccttccaccttggcctcccaaagtgctgggattatgagcatgaatcatgaggccagcccagagtccaagttcttttctttttttttttttttttttgagacagagttttgctcttcttgcacaggctggagtgcaatggcatgatcttggctcaccacaacctccgcctccctggttcaagcgattttcctgcctcagcctcccaagtagttgggattataggcatgcgccaccacacccgactaattttttgtatttttagtagagatggggtttctccatgttggtcaggctgatctcgaactcccgacctcaggtgatccgcccgccttggcctcccaaagtgctgggattaatggcgtgagccaccgcgcccagccaagttattaaccactaaattatacttttttttctatccctagtaatgttctatttctcaaactgagtggaatagacacacacattagatttgttatttataccttacatatatattacatataccttttttatttattaaagacttcacttaaacatacaaaggcttttacaaagagcaaagtaaaaacgacaattggaagaaaatctgttgctcattcaaactttactagcgcctccaaggctgacactaggagagaacctcaagaggtcagccgaacaccccagagccctacctttcctccagcacgtctccctttggggaatcgtatcaccctgggcggcaatctcccctccacccctagagggtgctgttctcactctctaaggcataggaccaagtttcagacaggactctctctaggtgactctggctcccagtgcccaggggcaaaaagaaaagcgctgggcattattctcgaggtgcctgcgcgtgccgcctccgatgtgaactcgcagtaccatttctagaactgaatctaaagctcagaacgggttcatgacttgtcctaagttttacaagtcaattagcgctaggacttgatctcggtcctctgagcaatccggtccccaaggctgcctgcctcccgagggtccggacagggtcttgggtacccccaacgctcaaactctgagggactgtctttctccagagggccccgggaccaacaatctcttactcctgttagccttgactaaatacagccgggactctgaaggagctggatctcgcgtcccaacgcaggcgtcctccaagagggatagacaggcgggaggaaagcggaccaggccaagcccatgcggcgccggtcctgccagctctacctggcggggccgcgccgggattacccacctagcacaaggatacggtcctcgggccgcagctccggctctaggagggcacggaaggaggagaagtccccgaaccaatcgtagggggcagaatcggctgcgccttggtagcgctgatcccagtactcgacttcgcggtacccgcagttccgctccggtaactccggaggcgccctacctgcccctggagaggccatgctctcaaccgccgggcagccagagccgccggcccttcagccaatacggaaggcaggatgcagaaggcggggcgctggtgtctccgcccaccacctgcagttgctcaacacaaacacgtggaacttccgtcctttactaagcgctcttcgaagaatcctccggctgggaaaactatcgtccagaccctgaatcctccggctgtactgccaagtcatttcctagggccgcactcaaggtgtcagactcacgtgggctcatcactgcgtcctctcatattttcaatatgaatgacttttatcaggaaatctgaaaattagtgaaaggttcatttttctcagcatccggaaggctcgaagggcaggca

SEQ ID NO: 31130 - DNA, 2300 bp, Homo sapien
gccacctttgccaccctaggtcaagcggttcttgtgcctcagcctcccaagtagctgggactgcaggtgtgtgccacacctggctaattttttttgtatttttagtagagacagggttttgccatgttgatcaggctggtctcaaactcctgacctcaggtgatccacccacctcggcctcccaaagtgctggtattgcaggcgtgagccactgagcccggcctcctaaaatgttttaagtacaaacgaattaattttttaaaaccatgattatgggtccttcagttcaaggtcactgagaaagtgggagtcaggattggaacccattactggacaacttccagtgtatgtggaattttctggactctcttccagtgaccccagtcttccgcctttattgtccttccagtttcagggctcctctcactccaggctgggcctccacctccagctgtggccctcatcccggagactaggacagagcagaggagggcttcatagtgatgggcccccaggcctgggcccttgagtgaggctggcatcaaggtatcctgtggcataccgccccccccatccagttccctgggcagccaccattgcgtttgtccctgtgtctccggtattaacacctggcgagaaagtgttggaaggagacccactacaaggcagcctcaccagctgtgtgatttggtaatttggccagattaaggaaggaaagcgcgttcgcctggagtgtggaatgaacgtacagggtgatcattaccgttttcagcgctgccgtcactgtcgccgcatgtgagacaccccctcctccccaaggccagtgattgcgccagagctcctgcgcgctggcaagcaggtgacgccgcgggtgacggccagccagggcgggggttgtgggggcgggaggcaaggggagaagagggcatgttcccatcggtgaggcgagaactcacccgtggtccaaagcaacgagggcggggggcaccctccatctctaccgcactccctcggggcacacactggcgcgctccgcgtcctcaggtgctccgagcttccccgcgtcacccgcagcccagggcgccccccgcgacgccgccattcattcctcctacactgcgagcgcaccactccagagccgcggggggctacagccaccggactagggctgggggtgtctgccctggtgcgcgcgcgtcggcccagtttctatagacccctcctaggagagactgaaatacccagattcaggagacggagacactggcacagagatacaggagtcaagaatggagatagatagagaaaggcagacacttaagggacaggcatagacaaaggccataacacagcgaaagagatacggggcacagagacagagagatacagacacttagagatggactgacacacacaaaggcggagacagagacacagaccggcactcagaggcgcacggaccctgacgatctacttaagaccagcagagcaactagtacaagagcgcgtcagcggcaagggcaccatcccactggcccgagctcttcccgcgctgtgggttcgtgccttccccagtcaccctgtacccgagtctcctccccgcgcatttcccgctccccgctttccattgccagccctgcggccgccttcccgccccaacgcgcccggccagcttttgccctcctgctcccagtcccccttgcacgcctctcccagcctaggggtcagaccctcctccaagctcctccagtaccaggctcgatcccaccccccttcggtcccgcccctccccgcgaggtcccggccgggttggctggtactattccccaagacccacgtgctggccattccccgccacagtgcgggaacctcccactccagctgcctctgttcccggggtagctgggcgcgctcctgcccccggccccgcctctttcccctggccagtgcccgccccgcctccaccgcgccccgcccgccgtgctctgccgcagtcgggcgctcatcgtcattccgctcttgccgccgccgccgccacccccgccccccgcccccgcccccgcccggtccccgccaccgccgccgccgccgcctgcccagcggcccgggaggcggaggcgcgggggaggaggccccgcttggctcctcagccccggatgctgcatgacttcatccttccgccggctcccctgctgaggtagggccggtccggcagcaagcccgccgcccgcgccccgccgcagtcccgctcccgccccgcgcccaccccgcgcccgccatgtccgagatcctgccctaca

SEQ ID NO: 31131 - DNA, 2300 bp, Homo sapien
actgtactgtactgtctcctgtttaagaaccatgcaattttggggtgcaaaatgccaacaaaagcaaatgcaacacttctcagcctgcttcattcatcatctactctttctcagccgcaagaacattctgcattagatccactgcagcaagttgtctgagaactgaggtgagtgtcaataaatggattatgggccaggcatggtgacttacgccataatcccagcacactgggatgctgaggtgggagaattgcttaaggcctggagttcaagaccagcctgggcaagatggtgagaccccgtttctataaaaaaaatttaaaaattagccaggcacagtggcacgtgtctgtagtcccagctactagggaggctcaggtgggaggattgcttgagcctaggaatttgaggctgcagtgagttatgaccatgccactgcactccagcctgagcaacaaagtgagacacccttctcttattttatttatttattttttttgagatgaagttttgctctttgttgcccaggctggagtgcagtggcatgatctcagctcattgcaacctccacccccctgggttcaagcgattctcatctcagcctcccaagtagctgggattataggcgcccgccaccatgcctggttaatttttgtatttttggtagagacggggtttcaccatgttggccaggctggtctcgaactcctgacctcgtgatccacccgcctcggcctcccaaagtgctggaattacaggcgtgagccactgcacccggctgacacccttcttgagagaaagatgaaagaaagaaagaaagaaagaaagaaagaaagaaagaaagaaagaaagaaagaaagaaagaaagaaagagagaaaggaaagaaaagaaagaaagaaaggaaagaagagagagagagaaagaaagagagagagagaaagaaagaaagagagaaagaaagaaatggattatgtgtttgctacccactcaagccttctcaggtcaaattcttgtactttctcagtgggggtggaggatggggagaggaagatgaagcgcactctcttttccttttttttttttttttgaattgtaaaacactaggcacttttcagtgcaacagactgcaataacaccaggcctgattaaggaatgacaatatggaaggcagatggcagatgcatgggtgccacactattgcttttcagttaaatattgcttggtgttagttttttttctccttgtaaatctcccaaataaaacggtttgctttccccaagttagaagtgttagcacgtcttttctttaaatatctgtgcatggctgtttttttccctgccaatttgtcaccatctgtaaccctccctttatgagacgatctgatgacagcagttatcttggagagtagaagtgtggtcttgaagcgccatggaagagtagagtcagtgtaggctgtgtgtgtgtggagtgtatgctccccctgcacttggtgtgtgtacatacagaaacacagtgtgcgtgtgtgttggctctgggtgtgttgtgcgtgtgtacactgtgtgtgagtatgcagtgtgtgtacattctgtgggcatctcgtgtgtgtgtggactgtgtgctgggcgtcgtgcctgcccgtgtccttggcgccttggcgtctatgcgttctctgcacataggtaggtaccacgtgcacaccctgaatgtgagtgaactgcctgtgtgctatgtatttgccggctgaagaggggctgtgtggactactgggggaagacgttcctcaggagggcataatttctctaaagtgcttaaaggggatggagagagcctgaaatttgggggaagtaggccaaggagtattagcaacgtctgggcctggttgaatttcattacttttcctaggaaagtaaattatgggtggcttgaaggagggtgctgctgagatggggggcggaccatgaagcgtggaggggtctccggtgttgctggagggcagctggagcctgcggagagcctcggcgcgctcctccctctcccccaccctccccccaccccgggcggggctccgcgtggggcggtggactcgggcgggggggggggcggccgcggccgagcgggggtgctgcgcggcggccgtgatggctggtgacggcggggccgggcaggggaccggggccgcggcccgggagcgggccagctgccgggagccctgaatcaccgcctggcccgactccaccatgaacgtcgcgctgcaggagctgggagctggcagcaacgtgagtgggggccccgggctcca

SEQ ID NO: 31132 - DNA, 2300 bp, Homo sapien
tgggtctatcatgatttacaaatggagaaacctcatgattttccagtgcctagttctggcctccaaagacagctcccagtgggttgttattatacacaaagatggcctgaagatgaatgcaaagccattcattcattcattcattccgcatgcatgcattctgcaaatatttatcaaggctcactacaagccaggcgctaggctggaggctaggagcataaagatgaataagacacagttccaggccgggcgcagtggctcatgcctgtaattccagcactttgggaggccaaggcaggcagataacttgaggtcaggagttcaagaccagcctggccaacatggtgaatccccgtctcgactaaaaatacaaacattagcggggtgtggtggtgcatgcctgtagtcccagttacttgggaggctgaagcaggaaaatcacctgaacccgggaggcagaggttgcagcaagctgagatcatgccactgcactccagcctggacgacagagcgagactccgtctggaaaaaaaaaaaaaaaagaagaaggaagtcatggataaagaggagttttagaaaaaaatccctctacagatgactgaagaaagcatgaaaatgtatggacaccgtgaagccagagatagaataggcagaacagttatggactgttgaatttttgtctgcagaccagcgctgggggagtcattggcaatggcaatggaaggtcatgcctagaatccaagcactgagtggaaaagagcaacaggtatttaaaatggattcagacctttacttccgtatctacacaaacatttacccaacattcactctgtgatatgttgtactaggtgtctttttcttcaatgtgtcagaacccataaaataagattgctagaagactcctgagtgttcccactaggtgaaagggagaagagatacttccttttttctcaccttacacgcacacacacacacacacagctgaagaagaaactctggggtttgcctaaaacagtcaagggctttgaagactgaaagactgagctttaaattttgattccgccgggcgcggtggctcacgcttgtaatcccagaactttgggaggccgaggcgggcggatcacctgaggtcgggagttggagaccagcctgaccaacatggagaaaccccgtctctactaaaaatacaaaaattagccgggcgtggtggcacaaaaattcaacagtccataactgttctgcctattctatctctggcttcacggtgtccatacattttcatgctttcttcagtcatctgtagagggatttttttctaaaactcctctttatccagctactcgggaggctgaggcaggagaatcacttgcacccgggaggcgaaggttgtggtgagccgagattgcgccattgcactccagcctgggcaacaggagagaaacactatctcaaaacaaataaataaaataaaaaataaatcctcattttactacttgatatgatcttctctgtaaaatggacctaaccctaccaatctcaaaagattgtaagaagtgcatggaatcactcgaaagcagtcctgacataagcgcgtcagtcacacgcctctaaggcttcacagggaaagacgagaagatagaggacgaagaccttgtcttgttctgcttttagctccagaacttggcggggagcacagggctttattgatcgatgtcaactccacctggctccccaaagtatttaaaatggtagccacgggaatagcagagtactctctttcaactggggaggaatatcaaatgaggttaataggccgggcgcggtggttcacacctgtaattacagctctttgggaggctgaggcgggcagatcacttgaggtcaggagttcgagaccagcctggccaacatagtgaaacccccgtctctactaaaaaatacaaaaattagctgggcgtggtggcgggcgcctgtaatcccagctactcgggaggttgaggcacgagaatcacttgaacctggtaggcggagtttgcagtgagccgagatcgcgccactgcactccagcctgggcgagagagcgagcctccttctcaaaagcaacaacaacaacaaaaccaaatgaggttaatattccacagtggtgtggggctagacacagttacacagactttatacaggcggcaatcaagcgtcctggacgtcaagaaatctagtttgtctgtcgcgccacgcagtcaactggagtgtcactgtgggttctatttacaccgttatgagaaaaacctgtggcggagtaa

SEQ ID NO: 31133 - DNA, 2300 bp, Homo sapien
gaaaaaaaaaaaaaaaagaagaaggaagtcatggataaagaggagttttagaaaaaaatccctctacagatgactgaagaaagcatgaaaatgtatggacaccgtgaagccagagatagaataggcagaacagttatggactgttgaatttttgtctgcagaccagcgctgggggagtcattggcaatggcaatggaaggtcatgcctagaatccaagcactgagtggaaaagagcaacaggtatttaaaatggattcagacctttacttccgtatctacacaaacatttacccaacattcactctgtgatatgttgtactaggtgtctttttcttcaatgtgtcagaacccataaaataagattgctagaagactcctgagtgttcccactaggtgaaagggagaagagatacttccttttttctcaccttacacgcacacacacacacacacagctgaagaagaaactctggggtttgcctaaaacagtcaagggctttgaagactgaaagactgagctttaaattttgattccgccgggcgcggtggctcacgcttgtaatcccagaactttgggaggccgaggcgggcggatcacctgaggtcgggagttggagaccagcctgaccaacatggagaaaccccgtctctactaaaaatacaaaaattagccgggcgtggtggcacaaaaattcaacagtccataactgttctgcctattctatctctggcttcacggtgtccatacattttcatgctttcttcagtcatctgtagagggatttttttctaaaactcctctttatccagctactcgggaggctgaggcaggagaatcacttgcacccgggaggcgaaggttgtggtgagccgagattgcgccattgcactccagcctgggcaacaggagagaaacactatctcaaaacaaataaataaaataaaaaataaatcctcattttactacttgatatgatcttctctgtaaaatggacctaaccctaccaatctcaaaagattgtaagaagtgcatggaatcactcgaaagcagtcctgacataagcgcgtcagtcacacgcctctaaggcttcacagggaaagacgagaagatagaggacgaagaccttgtcttgttctgcttttagctccagaacttggcggggagcacagggctttattgatcgatgtcaactccacctggctccccaaagtatttaaaatggtagccacgggaatagcagagtactctctttcaactggggaggaatatcaaatgaggttaataggccgggcgcggtggttcacacctgtaattacagctctttgggaggctgaggcgggcagatcacttgaggtcaggagttcgagaccagcctggccaacatagtgaaacccccgtctctactaaaaaatacaaaaattagctgggcgtggtggcgggcgcctgtaatcccagctactcgggaggttgaggcacgagaatcacttgaacctggtaggcggagtttgcagtgagccgagatcgcgccactgcactccagcctgggcgagagagcgagcctccttctcaaaagcaacaacaacaacaaaaccaaatgaggttaatattccacagtggtgtggggctagacacagttacacagactttatacaggcggcaatcaagcgtcctggacgtcaagaaatctagtttgtctgtcgcgccacgcagtcaactggagtgtcactgtgggttctatttacaccgttatgagaaaaacctgtggcggagtaaaactcggtaactccgctcgcagaccgcccatctacagcagtgagcgaacccaaaccccacacggccaagtcccgcgggtttcaggaaactccgaagaggtcgggggccaggggcgactatggcgcgggggaggctgggaattgtagtctccacctgcctccgagggcggggtccgagggcggggctctcaggccgagggggtgggtgggtcgccgagcgccccggctcgccccggcgtttccggtcgcaggcgggctctggaggaggaggggcgccgcgaccgacgcgcgcgagttggtctgggaaaaagggcggtgcgagcgggtgcgcgcgcagcgggccggcagtggcggcggagatggaggagggaggccgggacaaggcgccggtgcagccccagcagtctccagcggcggcccccggcggcacggacgagaagccgagcggcaaggagcggcgggatgccggggacaaggacaaagaacaggagctggtgaggcgcgaccccgagagtcggcgaaggag

SEQ ID NO: 31134 - DNA, 2300 bp, Homo sapien
atgttggtcaggctggtctcaaactcccgatctcaggtgatccgcctgcctcagcctcccaaaatactgggattacaggcgtgagccaccgcccccgaccggctgtcagttttaagattacttctcttctgtccttattcttccatccttacgcttttgcccctccgtgggagtgtctgctctttttatattttatttcatttatttatttatttatttgaaacagagtctcactctgttgcccaggctggaatgcagttgtgatctcaggtcactgcagcctccaactcccaggttcaagcgattctcctgccttagcctctccactagctgggactacaggtgcttgccaccacatctggctgatttttctatttatagtagagatgaggtttcaccatgttggccagggtgctctcgaactcctgacttcaggtgatctgcctgccttggcctcccaaagtgctggaattacaggcgtgagccaccgtgcctgcctttattttttatttttatttttattttttgagacagagtctcactgtcatccaggctagagtgcagtggcgcaatcttggctcactgcaagctctgcctcccgggttcaagcagttttctgcctctgcctcctgagtggctgggactacaggcgcacgccaccagacccgtctaattttttgtattttagtagagatgggggtttcaccatgttggccaggatggtgaccccgtgatccgccctgaccccgtgatccgcccgcctcggccttccaaagtgctgggattacaggcgtgaaccaccgcgcccggcccatgatccttttaaacgacaaatctcatactacttgcctagttagaatgtttctaactttttaaacgacaaatctcatactacttgcctagttagaatgtttctatccttttaatttcctttgttataggcctttcaaggacctaatctaaattcttttcaaagcctgcataattcgtgttgtatcacgatttacttaggcaggactgagtctttaatttctttttttctttctttttttttttttttgagatggagtctcaccctgtcgccaggctagagtgcagtggcgtaatttcggctcactgcaacctccgcctcccgggttcaagcaattctctgcctctgcctaccgagtagctaggactacaggcgtgcgccaccaggcccagctaattttttgtattttagtagagacggggtttcaccatgttggccaggatggtctagatctcctgaccccgtgatccgcccgcctcggcctcccaaagtgctgggattacaggcgtgagccactgcgcccggcccatgatctttttaaactacaaatctcatactacttgcctaattagaatgtttctatccttttaatttcctttgttattggcctttcaatgacctaatctaaattattttcaaagcctgcataattcgtattgtatcacgatttacttaggcaggacggagtctttaatttctttcttttttttttttgagatggagtctcgccctgtcgccaggctaggctagagtgcagtggcacaatctccgctcactgcaacctctgcctcccgggctcaaacaattctcctgcctcagcctcccaagtagctgggactacgggtgcgccaccacgcccggctaatttttgtatttttagtaaagacggggtttcaccatgttggccaggatggtctcgatctcttgacctcgtgatccgcccacctcggcctcccaaagtactgggattaaggtgtgagccaccgcgccccgcttattttttttttttttttgccgagactttgatttcagtttctcagccctcaaccagcacttcgccttgtacttagcatgcactcaataaatggttgcttaaaatatgaatgaactaaagaatcgcggaacagagagaaacacagaggggaatcggtctgggagtttcaaagttcgggaggggacacgggggcgggctgtggctgtcacgtgacggggcgggggcaaatcccatgtgctcggcggcgcagatcgcccggcgcggctccgccccctgcgccggtcacgtgggggcgccggctgcgcctgcggagaagcggtggccgccgagcgggatctgtgcggggagccggaaatggttgtggactacgtctgtgcggctgcgtggggctcggccgcgcggactgaaggagactgaaggtaaagccgccatgtccgggcccgacccggcccccccaccccctccccccgcatccgccgccatccgggccgggac

SEQ ID NO: 31135 - DNA, 2300 bp, Homo sapien
tctgcctctgcctcctgagtggctgggactacaggcgcacgccaccagacccgtctaattttttgtattttagtagagatgggggtttcaccatgttggccaggatggtgaccccgtgatccgccctgaccccgtgatccgcccgcctcggccttccaaagtgctgggattacaggcgtgaaccaccgcgcccggcccatgatccttttaaacgacaaatctcatactacttgcctagttagaatgtttctaactttttaaacgacaaatctcatactacttgcctagttagaatgtttctatccttttaatttcctttgttataggcctttcaaggacctaatctaaattcttttcaaagcctgcataattcgtgttgtatcacgatttacttaggcaggactgagtctttaatttctttttttctttctttttttttttttttgagatggagtctcaccctgtcgccaggctagagtgcagtggcgtaatttcggctcactgcaacctccgcctcccgggttcaagcaattctctgcctctgcctaccgagtagctaggactacaggcgtgcgccaccaggcccagctaattttttgtattttagtagagacggggtttcaccatgttggccaggatggtctagatctcctgaccccgtgatccgcccgcctcggcctcccaaagtgctgggattacaggcgtgagccactgcgcccggcccatgatctttttaaactacaaatctcatactacttgcctaattagaatgtttctatccttttaatttcctttgttattggcctttcaatgacctaatctaaattattttcaaagcctgcataattcgtattgtatcacgatttacttaggcaggacggagtctttaatttctttcttttttttttttgagatggagtctcgccctgtcgccaggctaggctagagtgcagtggcacaatctccgctcactgcaacctctgcctcccgggctcaaacaattctcctgcctcagcctcccaagtagctgggactacgggtgcgccaccacgcccggctaatttttgtatttttagtaaagacggggtttcaccatgttggccaggatggtctcgatctcttgacctcgtgatccgcccacctcggcctcccaaagtactgggattaaggtgtgagccaccgcgccccgcttattttttttttttttttgccgagactttgatttcagtttctcagccctcaaccagcacttcgccttgtacttagcatgcactcaataaatggttgcttaaaatatgaatgaactaaagaatcgcggaacagagagaaacacagaggggaatcggtctgggagtttcaaagttcgggaggggacacgggggcgggctgtggctgtcacgtgacggggcgggggcaaatcccatgtgctcggcggcgcagatcgcccggcgcggctccgccccctgcgccggtcacgtgggggcgccggctgcgcctgcggagaagcggtggccgccgagcgggatctgtgcggggagccggaaatggttgtggactacgtctgtgcggctgcgtggggctcggccgcgcggactgaaggagactgaaggtaaagccgccatgtccgggcccgacccggcccccccaccccctccccccgcatccgccgccatccgggccgggaccggccaccctgcgccgccgccccggcgccctggccccgcggcccgacccagggccccggcccgccagggtcccgatccccggcccacgtgtgcctggcccggccgggcctggctgctgggtgggggtggggagcgcagggccggactatgcgggccccgcgggctggtagggcgccgggttcgtcgccgcgaaatgccacctcggcctgacccgaggaggcccggcagcccacgggcgcaggcaccacggctcccggcccgccgccccctccccccttcgcggccaggccgccgggaagtgacacgttgttctttggcactggcccgcgctgcgcagggagggcgcaggggagggaggcggtggcggcgggcagggaggagcccccggccccgcccgccctccgggccgaccctcacttgcctgaaaccggctcctcgacggccgccgcccgcctggccttttagggcctgactcccgcccttcctggcctacactcctgggcggcggcaggcctagcttctggcccagtgcgggttccccggcggcaggcgtatcctgtgtgcccctgggccaggcccgaacccggtgtccccgggtggggggtggggacgcca

SEQ ID NO: 31136 - DNA, 2300 bp, Homo sapien
tgatcacctatcaggaaaagttttgagtatgaatctctcatacatgtatgtttttgtttatatgtatgcaaaatttaaacaaatacacttgtgcttgtcaaaaacaagtggaatttagggatgaaattaaagaatgtgcccggatcttgcttgtaatcccagcactttgggagtcaggaggactgcttaaggccaggagtttgagaccagcctgggaaacttagtgagaccctgtctctattttaaaatttgaggggggctgagcacggtggctcacgcctgtagtcccagcactttgggaggccaagacaggcggatcacttgaggtcaggtgttcgagaccagcctggccaacatagtgaagctccgtctctactaaattttattgttattattttaattttctttttgagacggagtctcgctctgtcacccaggctggaatgtagtcgcacagtcttggctctctgcagcctccgcctcttgggttcaagtgattctcctgcctcagcctcccgagtagctgggattacaggcgtgtgccaccacacccagctaatttttgtgtttttagtagagatggtgtttcatcatgttgaccaggctggtctcgaactcctggcctcaagtgatccacctgcctcagcctcccaaagtgctgagattataggcgtgagccaccacgcctggccctgtctcaactaaaaatacaaaaattaggcctggtgatgcactcttgtaatcccagctattcgggaggctgaggcaggaggatcgcttgaacccgggatgtggagattgcagtgaaccaagattgtgccactgtattccagcctgggcaatagagtgagactccatctcaaaaaaaaaaaaaaattaaggggaaaaaagaactcacccactttggagatagtttgctttaaggaattaatttttcttcatcttgagcctagttcataatgttactttgtttctttgcccctttgtaaagggctggagacaggaactagactcaagttaaatggaacagggttggcagatctctttctctcattaccagccaaagacctggttctgtttcaggttcagagtatgtgtgtacatgttgatagcgggtggggtacacacacgagagtaacttgtacggtggaaggacagacataagtcctcctggtcactggtgtgtggtaggaaagagtgcctgcctacgaggggtgtgtgtgtgtgtgtgtgtgtgtgtgtgtgtgtgtgtgtttgtgtgtgtgtgtgtgttaggaattcttgtaaacgcagttcagactggttccccagctttgacagacacctaattccctgggggaggagggcagggcagggcaaggcaaggggccggctgtgggtggtgagaggttttggggtgggaggtgtcaggcaggcattagtatatggttgggccctgacgctaccaccattcttctccgtcccccctcccccaagctggcgcctactatccagcccaaggggtgcagcagtttcccactggcgtggcccccaccccagttttgatgaaccagccaccccagattgctcccaagagggagcgtaagacggtgagtagcagtgaggggctccgggacatctgggaaggggagaatcaaggtcaggtgctgctgggacattgtgccggaaagagcagtgacttgaggaggaaggagctgagagtgggcagagaatggtgtctgtggagggctcaggttctttgtaagatgctaagatttcagcatagaagcaggtcatgggaagactgaagtgcctagcgaggaagttcctgcgagacctgggtgctggggggttggaagaactatgcttggttttgggtttctagtggcttgccttggaaatggtttgttttctgtggccccagcccccattcccccctgcccccccagtcctggaagctctcaaggcctccgcctctgctcagtcctcaagccctgggcgtggtgcccagaatagggtgccagagctggggaagccgctgagtcaccctggctccacctactggatctgggccctgcccccagagatcaggcacactagccacaagtgagccgattgggttctagatgggggtcctgggccccagggtgtgcagccactgacttggggactgctggtggggtagggatgagggagggaggggcattgtgatgtacagggctgctctgtgagatcaagggtctcttaagggtgggagctggggcagggactacgagagcagccagatgggctgaaagtggaactcaaggggtttctggcac

SEQ ID NO: 31137 - DNA, 2300 bp, Homo sapien
gccggacaacccttagcacccgtgggcccccaaggggtgggccaggtggggagctgccccgtgggccggtgagtggggctgggtaaagtggcaggtgggcaaggagtgggagtggatgattccgtgtctcagtgcccgcggggaggggtttgccctggaggcgtgtagtagtggtgtcacatattgtgctgactagttccatgtcccctcttgtcttcatcccttgcttagcaggctggcctgggaccccggcgctctcagcagggaccccgaaaagaaccacgcaagatcattgccacagtgttaatgaccgaagatataaaactgaacaaagcagagaaagcctggaaacccagcagcaagcggacggcggctgataaggatcgaggggaagaagatgctgatggcagcaaaacccaggtactggcaagtcctgcttttggtctctctccatttcttctccaggtctgccatctgtgccctctttgcttctttttgtccttatcactagcatctgtcatgcctaagtccccaccaccctctcctgtccctcccaacagcctgttctgagaccctcactggaactcttgtctcttctccctccaggacctattccgcagggtgcgctccatcctgaataaactgacaccccagatgttccagcagctgatgaagcaagtgacgcagctggccatcgacaccgaggaacgcctcaaaggggtcattgacctcatttttgagaaggccatttcagagcccaacttctctgtggcctatgccaacatgtgccgctgcctcatggcggttagtttccagtgggttctaaatctaatggtctggttgcccattcctattcccaagactccttgagtccagcttcttggttcccctccaacttgtgcctcttccagctggaaggaggcagagctggggccagagatcttcctgggtcaggtagttaaaggctcttggagggccttccctgcccaggactagtcttgagtgtgacattctctctgacctacagctgaaagtgcccactacggaaaagccaacagtgactgtgaacttccgaaagctgttgttgaatcgatgtcagaaggagtttgagaaagacaaagatgatgatgaggtttttgagaagaagcaaaaagagatggatgaagctgctacggtgagagaaaacccactatcgattccactcaccacttacctccttcccttacccagatgctactcagctgtagaatttggaatggaggtagtggtgtcttggggatttctctggctcaggacgttttttttcctttttgagacagtcttgctctgtcacccaggctggagtgcagtggtgtgatcttggctagcctccacctcctgagttcaagcgattctcctgcctcagcctcccaagtagctgggattacaggcatgtgccaccatacctggctaatttttttgtatttttaatagagacggggttttaccatgttggccaagctggtctcaaactcctcctgacctcaagtgatccgcctgcctcagcctcccaaattgatgggattacaggcatgagccactatgcccagccagccggcctcaggactgagtgcttattgctaggtttggatatccaggtagaaaagggttttagccgagtggctggttatctttttgacacaatccctgtcctgtgaatggcaggcagaggaacgaggacgcctgaaggaagagctggaagaggctcgggacatagcccggcggcgctctttagggaatatcaagtttattggagagttgttcaaactgaagatgttaacagaggcaataatgcatgactgtgtggtcaaactgcttaagaaccatgatgaagagtcccttgagtgcctttgtcgtctgctcaccaccattggcaaagacctggactttgaaaaagccaaggtagaggtccttgcatctggagggggatgggctgaagcatatgtggggctcactgagcccacaatgatggggcggaaggcctgaggaggggtggggcctgcagttataggtgggacatgagaagttcctggtctgatgcctttctccttcctagccccgaatggatcagtatttcaaccagatggaaaaaatcattaaagaaaagaagacgtcatcccgcatccgctttatgctgcaggacgtgctggatctgcgaggggtgtgtgtccccctcctccccactgccagcctgctgcctccagtttctgacactgccttgtcttgccttccctgacatcatcgtgactggccctctgtct

SEQ ID NO: 31138 - DNA, 2300 bp, Homo sapien
aagttgagaaggtgacagctgaatgtttcctcttagactaactggttggattgctggagacaggactgccagctgtagagggagggtggtactcccattagtctggaccagtgtttggcaaacacacacacacacacacacacacacacacacgtgccagatccagcccattcatacatcccaggacccagtagtggtttttacattttaaagttgcgaaaaatcaaaaagtgaatggtaatttatgctgtggaaattaaataaaatgtaaatgtcagtgtccatgaagttttattggaacacagtcacagcatgcctttatcatctacagctggtttcatgctactgtggcagaattgagtagttgcaatagagactggccctttattaaaaaagattttctgacccctggactgggccattcactacctgtttggttgcatatggtggtgctggccaagggactcagccgggttggacctatgattctactccccttttcttcttcagcctggctccatcgattctaacaaccagctctttgcacctggagggcgactgagctggggcaagggcagcagcggaggctcaggagccaagccctcagacgcaggtatggaggcagtgtcaggagctgggtggttacccgtcagagctcccttgaggacagagccttttctgttagggaggccttcagtacaaggtggttaggcaatgcgggcaatagaggaggtttgtgttgtggttccagggattgaactgctttacttttgggactgggaccaagtgtcctaaactggcaagtaggggataaaatgcaggaaaggagaaaaagattttaatacggattttctgcatccccagcatcagaagctgctcgcccagctactagtactttgaatcgcttctcagcccttcaacaagcggtacccacagaaagcacagataatagacgtgtggtgcagaggtgaggtttcctggacatctttgttattcacactgggggtaccgtgattgggttctggttgttgccataggttggaaatttcttcatacctgtcctggttggagcccttgggttagattggggcatactcattatgctaagaacaaggcccaacagttgctcagcatgttgtgtaattacatgagtgcctgggcagtgcaagtgagtgaaaatttgtctgtctgtcttccaggagtagcttgagccgagaacgaggcgagaaagctggagaccgaggagaccgcctagagcggagtgaacggggaggggaccgtggggaccggcttgatcgtgcgcggacacctgctaccaagcggagcttcagcaaggaagtggaggagcggagtagagaacggccctcccagcctgaggggctgcgcaaggcagctagcctcacggaggatcgggaccgtgggcgggatgccggtgagagtctgggagaggaatggagggaaaggcattggctgccttgggactagctggtccccagctttttgagagctccaaatcttgtttgctgggaagactgaaaagtccctctaatctgtgttctcttcccacagtgaagcgagaagctgccctacccccagtgagccccctgaaggcggctctctctgaggaggagttagagaagaaatccaaggctatcattgaggaatatctccatctcaatgacatgaaagtaggcagtgggagcggcgtgtgattgaggagtgggcagggagggatcatgctggcaggcataggggtccggggtctgggtcagacagtgactggtctcttcctgctgtgccctgcacccctcaggaggcagtccagtgcgtgcaggagctggcctcaccctccttgctcttcatctttgtacggcatggtgtcgagtctacgctggagcgcagtgccattgctcgtgagcatatggggcagctgctgcaccagctgctctgtgctgggcatctgtctactgctcagtactaccaagggtatgaccagcttctctgggcctcccacttatacagacccacaattttctatctcctttttgggacccttggaaccttgcataagagtgtaggttccctggccgggtgtggtggcttatgcctgtaatccctgcactttgggaggccaaggtgggttggattccttagaggatcacgtgaggttgggagttctagaccagcctggccaacatggtgaaaccctgtctctactaataatacaaaaattagccaggcgtggtggcacagtaatcccagctactcggaggctgaggcaggagaactgcttgaacccg

SEQ ID NO: 31139 - DNA, 2300 bp, Homo sapien
tcgattggatggggtccctgggtgggtatgtgtgggatttggagtgtaggtacgggttaagtgaaggttctgccctgctatggcccattgctatggggtgggggtagcaggtgactgtgcccctaggcagtttgtgactttgaggctgggcatgccctgcagaacatcctggctggcagcatctcatagatggcttagaagtgtaaggtttggtttggaaagactggtggtgccttgtgggcactggggtcggttgtgtttcaggggttataggacacgttgcttgggaaggctacccagcagctaggggttgaggagaaagagggcccgaacaggtgatgcttgagttgagtcctgaaggaacaagacacgaggaagtttccggcaaaggatatagcatccacaaaagtgtcaaggccagagaaggtgtgtatgtacaggaaatgtgtggggaaggaagggaaattgagatcaggagttgtcaggatctgtttggggggcagtgaatgttcaggttacatgtaggatatatataggactttatgtatgatatatataggacttttagcgatttcctgaattcaggagtaccaattctgaatatagttttctccattaaatacatcatgggcagagaggtttcaggctgccaaggtgaggccaagcaagtttgtaaggtttttctgatggccaagtgactcattgctgtgcagcagtctcagatcatgagattagcatcctgtcagaggcctagtcactctggaatggccacaaatgtcaggctggtgcatcagggccttgtttgaacagtggaacttgggagggttccctggggtgggctggggtggcggtggccagtcacctctaactgctgtcccgcctgcttgcagacctgctgcggatgttctttgacgcactgtatgacgaggacgtggtgaaggaggatgccttctacagttgggagagtagcaaggaccccgctgagcagcagggcaagggtgtggcccttaaatctgtcacagccttcttcaagtggctccgtgaagcagaggaggagtctgaccacaactgagggctggtggggccggggacctggagccccatggacacacagatggcccggctagccgcctggactgcaggggggcggcagcagcggcggtggcagtgggtgcctgtagtgtgatgtgtctgaactaataaagtggctgaagaggcaggatggcttggggctgcctgggcccccctccaggatgccgccaggtgtccctctcctccccctggggcacagagatatattatatataaagtcttgaaatttggtgtgtcttggggtggggaggggcaccaacgcctgcccctggggtccttttttttattttctgaaaatcactctcgggactgccgtcctcgctgctgggggcatatgccccagcccctgtaccacccctgctgttgcctgggcagggggaagggggggcacggtgcctgtaattattaaacatgaattcaattaagctcactgcctttctgctttatgccctgctccctctagagaaggtgtttataggtggggatccttcccagagctggtactgtagcgctgttccctgtaacctggcacccctcctgcctcttcccctgtccatgattgcagggatctgaggtttcctggaaggttgggccctcagatgggcttgataggtgccttcctggtccggagaaaagggagattagtgataggacatccttgctaggctctgctctcctaccagaatgattcaagcccctgtgtggggaaggcttttgggtttcgggttgtttatagctggagaatccctttatggcttgaaggtgtcatctgtaaaatgaaggggctggatgcatgaagggaggttttgcgaccccgtgtagtgtgactgggctggcttagtgagtgttcgccgcccctgccttcaggtggcagtcggctctgggaggagaggaccggcattttcgaacccggtccaggccgcctctgcgtggctgtgacgtcgctgcgccccgcctactttgggtggtgacgcggcggtcacgcccccgcgcttacgtcaccggcccggttccctctccggggagcggcggcggacgcgcggctcccacccctcccctctcacgggctctcccctccccagtgtggccgcgaccctaccctctgcaaggcgatggcccgcgccccgagcgcaggctagcgtgcctgggtgcccggccatgggctgtatcggctctcggagcccggcgggtcagggtaagaggcggag

SEQ ID NO: 31140 - DNA, 2300 bp, Homo sapien
cctgcctcttcccctgtccatgattgcagggatctgaggtttcctggaaggttgggccctcagatgggcttgataggtgccttcctggtccggagaaaagggagattagtgataggacatccttgctaggctctgctctcctaccagaatgattcaagcccctgtgtggggaaggcttttgggtttcgggttgtttatagctggagaatccctttatggcttgaaggtgtcatctgtaaaatgaaggggctggatgcatgaagggaggttttgcgaccccgtgtagtgtgactgggctggcttagtgagtgttcgccgcccctgccttcaggtggcagtcggctctgggaggagaggaccggcattttcgaacccggtccaggccgcctctgcgtggctgtgacgtcgctgcgccccgcctactttgggtggtgacgcggcggtcacgcccccgcgcttacgtcaccggcccggttccctctccggggagcggcggcggacgcgcggctcccacccctcccctctcacgggctctcccctccccagtgtggccgcgaccctaccctctgcaaggcgatggcccgcgccccgagcgcaggctagcgtgcctgggtgcccggccatgggctgtatcggctctcggagcccggcgggtcagggtaagaggcggaggccgggtacgggttggggagtcgggctgcggccgccggtgcgcgggccgcgggtgggtgggggccttgaggagggggccggtgtcgggagagggaggagcctgcaccgggaggcgggccaggcaacaggagggagcgggaatgagcagggaaggggccagaccgactccggttcgctcccacggcctgcctgccttggggttttgcagggcagacgcatggtctcgccgctggctgccgtgtgcccactgctcagggtggccggagacgcacagccccgggaggggctgggcagcccgatgcccccaccactccagccctcggcgactggccttgcgcgcccacacacacactcccctccgcctacacctctgccttcacagtcctgggagtggccctgtgctgggaacctgcttctcccagccgtgtccccatcttcttaaagaggtagcctttcggtcctggctaagcaccctaccacagaatttttgtcggacattgactcccctcttcagtcagtcggcgaagggggactgaggtcccgtttggggcacctgtgaacactgaatcacctctcacctattacagttgttttaatgtcctgcccccactcagcaaaaacaaatcactctactctgtggagggaaagaggaacccagaggcaggccatcagggcttccttcccacagtgctgacccctgcctgggcctcggtttccgtgggtggccatgcacaccgggcctggccgtagtcctgtgcatcagaggtcggccagcttcctttactccggtgtggtggatttctccacgcataaggcaaggcaggactgggtttgggatgggtcctggaccttcagggcaggtggtcagtcacacaggccttggtgtggttggtacttgatgttctttggagctaagactggctgagatttgtacttcccttgaggaattctgggatttgtagtcctaagttaacctcgtggcttttgaagctgaggagcagctgactgctctgatctctctggccctatcaaggcttggagttcaggaagtcatcaccttctcttgtcaggggtgagtttggctgacctcaggactggcctcgagagccctggttaggtaccagttgggggccagggatggcctgtaacctcctgttttccttctggttggtagcatttctggggaccaacagctggccgaggctcagggatagagacggctgctccagctaaaggtcagttgtgatgtacattgcctgttggcactgtctagggaatgggcctcagctccccgagtcccagagagcttggctgagccctggtgttcccacctcctcagagccatgaggcaggaatgttctccttatgtgactaggcacaggttccaaatggggaggggactggctcagcatccggagccaaaacaggaatagaactgggagctgagcctggagcggttctgggcttttggttctctgcatcaacacagccagcatgcctatgatttctgtgctgggcaaaatgtttctgtggcagcgtgaagggcctggaggacgatggacttgtcagacaagtcgcagaggtgagaccagggatcatggatgtgatctgggagatgatgggaagct

SEQ ID NO: 31141 - DNA, 2300 bp, Homo sapien
gaggggctgggcagcccgatgcccccaccactccagccctcggcgactggccttgcgcgcccacacacacactcccctccgcctacacctctgccttcacagtcctgggagtggccctgtgctgggaacctgcttctcccagccgtgtccccatcttcttaaagaggtagcctttcggtcctggctaagcaccctaccacagaatttttgtcggacattgactcccctcttcagtcagtcggcgaagggggactgaggtcccgtttggggcacctgtgaacactgaatcacctctcacctattacagttgttttaatgtcctgcccccactcagcaaaaacaaatcactctactctgtggagggaaagaggaacccagaggcaggccatcagggcttccttcccacagtgctgacccctgcctgggcctcggtttccgtgggtggccatgcacaccgggcctggccgtagtcctgtgcatcagaggtcggccagcttcctttactccggtgtggtggatttctccacgcataaggcaaggcaggactgggtttgggatgggtcctggaccttcagggcaggtggtcagtcacacaggccttggtgtggttggtacttgatgttctttggagctaagactggctgagatttgtacttcccttgaggaattctgggatttgtagtcctaagttaacctcgtggcttttgaagctgaggagcagctgactgctctgatctctctggccctatcaaggcttggagttcaggaagtcatcaccttctcttgtcaggggtgagtttggctgacctcaggactggcctcgagagccctggttaggtaccagttgggggccagggatggcctgtaacctcctgttttccttctggttggtagcatttctggggaccaacagctggccgaggctcagggatagagacggctgctccagctaaaggtcagttgtgatgtacattgcctgttggcactgtctagggaatgggcctcagctccccgagtcccagagagcttggctgagccctggtgttcccacctcctcagagccatgaggcaggaatgttctccttatgtgactaggcacaggttccaaatggggaggggactggctcagcatccggagccaaaacaggaatagaactgggagctgagcctggagcggttctgggcttttggttctctgcatcaacacagccagcatgcctatgatttctgtgctgggcaaaatgtttctgtggcagcgtgaagggcctggaggacgatggacttgtcagacaagtcgcagaggtgagaccagggatcatggatgtgatctgggagatgatgggaagctgagcagtagggtgcttaggtggaaaaggaaaattactctggcttagatattaagaaccaggctgaaacagggagaaccaggctggggccagacagggcatcaggaaacggcttcaggggacaggggtgaaaatcagaaaaaatatcatgagttcgtcagaaaagaagagtaaagagctgtggaccagctgaggctggcgagaggaaagaaggcagcaggaagagagaaggaaggcaaccctcctgcaaagggtccagggtggcggtggtgggggggacagtgatggcggaagaactcagtgtgctttccaagaggaatgggtaggctgggaaacgggaaggagagtcagaatttatcattgtttggtttcaccctagggttttgaggcaaaatttatccagagcaggaaggtggcaagtgggctgccacagaatggccccaggggcccgagggtcagtgatgtgtgggatgggggcttttagagttgaggagagcactcagtgggcgctggtcttctggaaggtgggggaggggccgagaaatgatacggcaatactggatgaaaatggggatctctgcagaagtaggggcacagctcaacagcctttccccttcctctcagtgtcctcggaccccgcttgggctgtggagtggatcgaacttcctcggggtctctctctatcctctttgggatctgctcgaaccctccgaggctggagcaggtcctcccgcccttcctcggtggacagtcaggacttgccagaggtgctgggcccctggtggtggggggaaggaggacgtcatccatataaaggggatctgcagcccccacccacgcctggccagccagcttctggctcccttttccggcgggcggaggcgctatccggcggcgggccgggaggccgcccccgtgccggtctgctctgctcggcgctgtgccagcaggcgg

SEQ ID NO: 31142 - DNA, 2300 bp, Homo sapien
tttccccttcctctcagtgtcctcggaccccgcttgggctgtggagtggatcgaacttcctcggggtctctctctatcctctttgggatctgctcgaaccctccgaggctggagcaggtcctcccgcccttcctcggtggacagtcaggacttgccagaggtgctgggcccctggtggtggggggaaggaggacgtcatccatataaaggggatctgcagcccccacccacgcctggccagccagcttctggctcccttttccggcgggcggaggcgctatccggcggcgggccgggaggccgcccccgtgccggtctgctctgctcggcgctgtgccagcaggcggagagctcgcgccttccgcgctgacgtcagcgcatcccgggccgtatcccgggagaccctgttgcgtggtgatgggttgccagggagacatacaccttttctctgggcctgggccgcagctgcgcggagcgccgggcacggatggcggcggctgaggggagcgaagcgagggagggagagcaagctaagaaacacccagcaggtgctcccccgcctaggcctggctggaggctactggcgccaccctgggggccctgtcagccaggtacccaaggggagggatcgagggtgggcctcaggtcaaggggcagtgttggctgcccttgtgagggacgggaacgtgatagaagagagctgggcaatgccggggagggatgtgtgcctccaacttcattaagtgagggaaacatttgctggggcttgtcagggagccctgagccaggtacagggtggagttaggaacttacgtgcatcagacttaggccttgccatcctgagctccctcgggagacagacaagggcaatgatgggggcggggtgtgtcagagaaaagaagaggctgtcggctgaaagcattatttgcaggtgacacttgagatgggccttaagtgatggcaagcattttttcacgtaaggatggcattcttggcccagaggaaagctgagttccttttcctggaggcaggcgggctgcttgctgacagggattggtggagaagggtttttgttttttgttatttatttttatgtatttatttatttgagacggagtttcgctcttgttgcccaggctggaatgcaatggtgcgatctcggctcaccgcagcctctgcctctggggttcaagcgattatcctgcctcagcctccagagtagctgggattacaggcatgcgctgccacgcccggctgattttgtatttttagtagaggcggggtttcaccatgttggccaggctggtctccaactcccgacctcaggtgatccgcctgcttcggcctcccaaaatgctgggattacaggcgtgagccactgcgcccggcctgagaaggggggttttattgggcagaggagatcagcagtggattcaaaggaggcttggaaggaggcaagggtgtcacagagtgggatccttcagggcctgggtatgatgcctgcactaacctcactggacagtagcgtaggctagacaagattttagagatgtgttgtgaccagctgcactccaggaaaactgtttacattatatcttacctcattcatccagcctttgcatttttgtttgcttgtttttgagacagagtctttttctgtcgcccaggctggagtgcagtggcacaatcttggctcactgcaatctccgcctcctgggttcaagcaattctcctgcctcagcctcctgagtagctgggataacaggcacccgccaccatgccctgcccattttttaaattatttttagtggagatggggtttcaccatgttggcctggctggtctcaaactcctgacctcagatgatctacccaccttggccccttggcctcccaaagtgctggaattacaggcgtgagccaccacgcctggcccagcctatgcattttttttttttttttttttttttgagatggagtcttgcaccgtagcctaagctggagtgcagtggtgcgatctcggctcaccgcaacctccgcctcccgggtcctggttcaagcaattttcttgcctcagcctcctgagtagctgggattacaggaacgtgccaccatgcccagctaatttttgtatttttagtagagacggggtttcaccatgttggccaggctggtcttgaactcgtgacctcatgatccgctcacctcggcctcccaaagtgctgggattacaggcatgagccactgacgcctggccagcctatgcatttttaagaaattattctgtattaggtgctgtgc

SEQ ID NO: 31143 - DNA, 2300 bp, Homo sapien
gtacactcaggaccttggggcctttgccaaagaggaagctgctcggattcgcctgggagggcctgaaccctggaaaggtcccccttcctctcgggctgccccagagctcttggaatatggacggagccgttgcgcccgatgccgcggtgagaactggggtgggggcaggggacctggctgtgctgtgctgagggaagcagaggccattagagctgctgatgggggagaggggacagttgagggggcagtaaaaggggtaggagcactttggtgccatcctcccccttcttcccttccctgcacccagtctgttctgtccgctgccacaagttcctagtatccagggttggtgaagattggatcttcctggtcctgctggggcttctcatggcattggtcagctgggtcatggactatgccattgctgcctgtctgcaaggtgagggtgacagctggcagggggaggactgggaataaacctcctgcgtccatgccacactcgtctagacatggaggaaggcgtcttggcttcttggccactgaccactttccccagccagtctgactgcccagattcaggcatcatctcggccactcccacagggcacagcttcttgcatcccctctccaagtgatcctcttgcctagattgcgctttgtcccagtgaataccctcagggaccctttccttcacccatgccctgactctgtgtggtactccctgggacagcctgtcgtatcagcgtggtccactggccaggcaggcagtgggtgtgtgcactgggggtccagcaggtcctcttcccacagcccagcagtggatgtcccggggcttgaacaccagcatcttgctccagtacctggcctgggtcacctaccctgttgtcctcatcactttctcagccggattcacacagatcctggcccctcaggctgtcggtatgttagaagagaaggggagggcagaggcgggacccctgaaatgggtgcatcgaatgcctctcctgagactgttccctctccaggctctggcatccctgagatgaagaccatcttgcggggagtggtgctgaaagaatacctcacactcaagacctttatagctaaggtcattgggctgacctgcgccctaggcagcgggatgccgcttggcaaagaggtaactgcaggctggggaatgaaggagtccctcctggtggaagaggaggccaggccaaggtcagggcgggccccctcccgactcaccgcctgccccaccccgcagggcccttttgtgcatatcgcaagcatgtgtgctgcccttctcagcaagttcctctccctctttgggggtatctatgaggtaaggggaaccctggggcaagtagggggcagaggctgctgagcccacagctgaccccctcttgccaccactctcgccagaatgaatcccggaacacagagatgctggctgccgcctgtgccgtgggggtgggctgctgcttcgcggcacctattggaggtaggcagggctcctaggtcagtccagccccacaaccctgcccttggcctctcctccttggcccctcttatctgggtctgaggccttaggccaggcccaggcctcaagtgctggtctccctccccctcacaggcgtcctcttcagcatcgaggtcacctccaccttctttgcagtgcggaactactggcggggcttcttcgctgccaccttcagtgccttcatcttccgggtcttggcagtctggaaccgggatgaaggtgggggcacccaggggatgagggcagcccgagatggtgccaggtagggggcccacgaggctaggcctgcctccctctgctgttcttccctttagagactattacagccctcttcaaaacccgattccggctcgacttcccctttgacctgcaggagctgccagcctttgctgtcattgggtgaggagctgagggggctgggggtatcagagaggaggggggtttctagaaggctccttttcactcaggtgcctcttccctttccagtattgctagtggcttcggtggagccctctttgtctacctgaaccggaagattgtccaggtgatgcggaagcagaaaaccatcaatcgcttcctcatgaggaagtgagtggctctcggctcctctccaggctgctttgagttgtataagggccacagtaggtcaggggacagtgatggggagagaatggcccagtcaaaacaggcacttcactgagaaatcagccagcagtgttttccaggctgactgagcatttttatattcatatgaattacc

SEQ ID NO: 31144 - DNA, 2300 bp, Homo sapien
attctccactgccacccccaccagcctgccagcccagctgggagtggaaagcctctcacttagggtgggtggagagggcttggtggcctcagccccattctggagctgcactgagcccagcggtgggttgggggacagcggaggctgaggatggctgggctgtgactgtggatgctggggtgatgggacgggagagtcgcctgaaccatggctagacctgccaagctgggcgtgtgttggggggcggggaggagtagattctggctgccacccgcagagcttcgggacacaaagggctcctgttggggctgggatgggggggagggagggagggaaagatagagacagagagagggtgagagataggaaagggaaagcaaagagaagagagggaactagagaggagaaagtagaagagaaaagagagggaaggcgaagggatggagaagagaaagaaggggatgagagaggaagaagtacggaggaggaagagaatggagagtattaagaggcaagcacggtgtaggaggagggaggtgagagtgggagagaaagacaaagggataggatggtgaaggggggcgggagcaggctggagcacagagtgcccgggacagagctcgaccctgagagctcattccagagacagctggaagggacggagatggagaggtggctggtgttaagaggcaccatttcagaggccaggtgcctggcttccttgaccatgctcctatcctggtctgggcagattggcaagtgtctcctaccccatcccaagggttggcccctctacccttgctctactcccacctctccctgacatcctgattcatccagctactttctcctaactgggcacctcccagacttatagcctctcctctccaagacgttccctccctgccaccttcctgggcaaattccagcccaagctggtaaaaaggaaccacgggccccttcctttccctagggcttgggtcttccaccccagtgacatgaggagggtcacgtggcttctcaaacaccaagtaacaatgggggcgataagtcagctcagagcccaggacccctgcttctaatgaggtcaggggacacaccctggggtgggtgggggctggataccccgcatcagcatagacaaaggtcccaattcccacacccattcctgcttcacccaccctccctaaagctcctgtcccccagagtggcaagccacctttttccagagtcaactgaggggctcctggagccaacgctgggtgtggagcctccagaggtagggtctggggctgaccatctttctacacactcgattctatgcttagcatggtgccatgcacatggcagggacacagagaatgtcttgggtggtggagatagtggcgtagagaaagttcaatggtgtgaatggtgccgcggaaggggcagtggggtgctgagacttgggcccaggtggtgaaggggaggtgcaaagaaaacgtgcatgttgtggggtgaggggaaggacacctgagacaagtacctggtgtccttgtcctctgcaggccctcagcctcagccagaaaccagcatgcagttttccatcccttcggccctgcagcctcagacttccaagcctcagtttccccagctcaaaatgctaggacaggattagggtaggcccctggtcctcgcgcttcccagggtaacctggagcaggggtcccggagcgcactcctggggctcagctcagcttcacttaccagggtctgctcgtactgcagcgcccgtggctccatcccttcctccgccgccgcggccgccatctccgcgcactgccctctcgcctccctcggcggttccggctctgtcctggactcggctcccggcccgcaaagtccgcgccggcagccgtcccgtccccgcagcccgggaggccgagagcagagtgcggcgggcccccggcgggcgccgctggcgcagcctcccgctcgcgtcccctccccggcgggcgggccgagggcggtgccctctgcgctgctccgcccgccggcccatccggaggggacggcccagccaggctggggtccgcgcggggcctcccgagaggcggcaaggggcgctgggaaggcgcaagcccgcgccggctccctgcggatgcccgggtcggagaggggcgcccgggaggggcgggtctactggcacgtggaggggccggcccgggttcgcggttccccgtgcccaggcaggaggggctgcagacgcctgagctccgtaggggttggggctgggggctgcggagctgtctacatcggact

SEQ ID NO: 31145 - DNA, 2300 bp, Homo sapien
tcaaaatgctaggacaggattagggtaggcccctggtcctcgcgcttcccagggtaacctggagcaggggtcccggagcgcactcctggggctcagctcagcttcacttaccagggtctgctcgtactgcagcgcccgtggctccatcccttcctccgccgccgcggccgccatctccgcgcactgccctctcgcctccctcggcggttccggctctgtcctggactcggctcccggcccgcaaagtccgcgccggcagccgtcccgtccccgcagcccgggaggccgagagcagagtgcggcgggcccccggcgggcgccgctggcgcagcctcccgctcgcgtcccctccccggcgggcgggccgagggcggtgccctctgcgctgctccgcccgccggcccatccggaggggacggcccagccaggctggggtccgcgcggggcctcccgagaggcggcaaggggcgctgggaaggcgcaagcccgcgccggctccctgcggatgcccgggtcggagaggggcgcccgggaggggcgggtctactggcacgtggaggggccggcccgggttcgcggttccccgtgcccaggcaggaggggctgcagacgcctgagctccgtaggggttggggctgggggctgcggagctgtctacatcggactcctccgggtcagcccgttaggagccgcctcccctctgcccctccgaagagacgagcggcccagacaggcctgggaaggcccctctgccccgtcaggggtgaaaagcaaagctggaaggattcggagagggttggggccgtcttcctcatccttccttttctcggggctcccgtgggtaggtgcacttggagcaaccgggcctgcggggtgtgcgggggtggaggttggggagggcaccggaaggggtaggccggagggaagggagctccaggtgccgggaagtctactcctgggacgcgggcgtgggtcgcttctccctggctgggcccaaggaggaacccaagtcgctgcttccatccctccgctttgggggaactgcctgctggtgttctgggttctctatcaggggctggggaaggatagaacagagggcggagcgcgcgcagggtggatgggcagcgtagagatagtgtgagaggagcgagggcagcgcccaggaaacgcacaagtgtgcgggagagccagcaccaggagtaaggggcatttgggaggcagaggcggggctcagggggcgggagcagtgcccgggaagggggggccttgtgatagaagccagcactcaggaggaagggccagtgtgagggaagagctggtatccaagggacagggcagtgccaggctgaaggggcacggaggggatccgtgtccaggagaaggcagtggagggggaacgcgcagcactaagctggaggggtaatgcccgggggaggggggtggcgggagcccggctgaaggggcggtgtaggggaagagagcagggcctggggggaagagggagggcagtggtgggagggtgcagtacgagaggaggggacaatgcaggctttcctcttctccatagcgacgtcatggcaaattcccaaactggacggatccggctcgggttacgtccagcagggccgagccggcccaggccggccccggggtcctcggtgccggctggaggggctgggcacctctggggcggggttctgctccacctgccctcggcgcggactgtgccctcggcgggcacgcggaccggcggggtagggctagggcccggcttctctgggccaaggatcaaggtccctgcctgggttaggcccccacgcattccagtcttcggaacccggcctctgaagagggcgcagtagggccccagcggagcgcgagaacccgctctacagcctattgcttccccgccctgggcagagccacctggacatgagacccgccctcaatgccgaagcctctcggaagcaatctttcgggacggaagttaagtagccccgagcgggaggctgtggcggaagtggtcgcgttaccgcttgtttgtgcgcatgcgccactctcgtctggccgccgcgctttcaggaggtgcttttggttctctccggtcttgtccacgctagggggtgcacgtactcccaactgtggtcgcgctctcaccccttctgctgctctcgtggccccctcgcgatggcgggcatcctgtttgaggatattttcgatgtgaaggatattgacccggagggcaagaagtttgaccgaggtaagtaaggtatgtaggggcggtttggaggaagaggcta

SEQ ID NO: 31146 - DNA, 2300 bp, Homo sapien
aatgtttactgagggaggtccctacaccaggacctgctggtaggggcaggccacaagagctgggtggacacggggcccaggggcatgtccgcgaggttagcctcttcctccaaaccgcccctacataccttacttacctcggtcaaacttcttgccctccgggtcaatatccttcacatcgaaaatatcctcaaacaggatgcccgccatcgcgagggggccacgagagcagcagaaggggtgagagcgcgaccacagttgggagtacgtgcaccccctagcgtggacaagaccggagagaaccaaaagcacctcctgaaagcgcggcggccagacgagagtggcgcatgcgcacaaacaagcggtaacgcgaccacttccgccacagcctcccgctcggggctacttaacttccgtcccgaaagattgcttccgagaggcttcggcattgagggcgggtctcatgtccaggtggctctgcccagggcggggaagcaataggctgtagagcgggttctcgcgctccgctggggccctactgcgccctcttcagaggccgggttccgaagactggaatgcgtgggggcctaacccaggcagggaccttgatccttggcccagagaagccgggccctagccctaccccgccggtccgcgtgcccgccgagggcacagtccgcgccgagggcaggtggagcagaaccccgccccagaggtgcccagcccctccagccggcaccgaggaccccggggccggcctgggccggctcggccctgctggacgtaacccgagccggatccgtccagtttgggaatttgccatgacgtcgctatggagaagaggaaagcctgcattgtcccctcctctcgtactgcaccctcccaccactgccctccctcttccccccaggccctgctctcttcccctacaccgccccttcagccgggctcccgccacccccctcccccgggcattacccctccagcttagtgctgcgcgttccccctccactgccttctcctggacacggatcccctccgtgccccttcagcctggcactgccctgtcccttggataccagctcttccctcacactggcccttcctcctgagtgctggcttctatcacaaggcccccccttcccgggcactgctcccgccccctgagccccgcctctgcctcccaaatgccccttactcctggtgctggctctcccgcacacttgtgcgtttcctgggcgctgccctcgctcctctcacactatctctacgctgcccatccaccctgcgcgcgctccgccctctgttctatccttccccagcccctgatagagaacccagaacaccagcaggcagttcccccaaagcggagggatggaagcagcgacttgggttcctccttgggcccagccagggagaagcgacccacgcccgcgtcccaggagtagacttcccggcacctggagctcccttccctccggcctaccccttccggtgccctccccaacctccacccccgcacaccccgcaggcccggttgctccaagtgcacctacccacgggagccccgagaaaaggaaggatgaggaagacggccccaaccctctccgaatccttccagctttgcttttcacccctgacggggcagaggggccttcccaggcctgtctgggccgctcgtctcttcggaggggcagaggggaggcggctcctaacgggctgacccggaggagtccgatgtagacagctccgcagcccccagccccaacccctacggagctcaggcgtctgcagcccctcctgcctgggcacggggaaccgcgaacccgggccggcccctccacgtgccagtagacccgcccctcccgggcgcccctctccgacccgggcatccgcagggagccggcgcgggcttgcgccttcccagcgccccttgccgcctctcgggaggccccgcgcggaccccagcctggctgggccgtcccctccggatgggccggcgggcggagcagcgcagagggcaccgccctcggcccgcccgccggggaggggacgcgagcgggaggctgcgccagcggcgcccgccgggggcccgccgcactctgctctcggcctcccgggctgcggggacgggacggctgccggcgcggactttgcgggccgggagccgagtccaggacagagccggaaccgccgagggaggcgagagggcagtgcgcggagatggcggccgcggcggcggaggaagggatggagccacgggcgctgcagtacgagcagaccctggtaagtgaagctga

SEQ ID NO: 31147 - DNA, 2300 bp, Homo sapien
cggagggcggagggccgggccgggggcggtgcggcgggagggggccggggccggggccggggccggggcagtgccgcgaggggctcgtcgggcggccgcagagtcggcgccgggccgggcggggcgggaggagcggccgggaggagcgcgggcgggcgggcgctgacccgggccgtacgcggctctactgccccgggcgccggctccggcccgttttatgccccgcgcccgacgccccggccgggggcctcctcctcagcaaacggggcggcggcggcagctcggcgaggggccgggctgagcccggggggtccgacccagcagcagcggcccggatcgcgggtgggggaggggagggaggggctgggaccgggcaggggaggagggaggggcgggaggggaagggggagcgggggagggggaggggagggaccagggggcgcgaagagggggaggagaggcgggcccggagccccccgctgctggcggccacagggcggctggaccaggaggtcggtgtccagcccaggaagggagcctcaggctagggaggggcagaggctaggcctgaggcctggaccgctctgtgagcgaggacccggttccgcccgaaggatgaagacttgtctttaaagatgacaacgtacaggaaaggtccatcagccgatctccccctgcctgggcccacagcgccccccaaaccctcaccaccctctctcactgcctagcctgcctccctaccttctctctgaggtcgctcctcattcttgtgttacccaggacagggacctagccagaaaccggcagcattcccccttctgtggagtgacagtatctccctctcattgtaacttatcctcaggcgcattcgacagtcccctcttgctttctcacccccttccttcacccaagggaccctctgcctctccagcccactcccagcctcctttctcttggttccctggtcatgcctgcctccctgtctcctgtctctccctcccacacacacccactatcctcccagctatcccagcaccctccttcctaatcttgggagacatctcgtctggctggacgggaaaattccaggatctaggccacacttctcagcagacatgcccatccttggggaggaggaacaggagagagcctgaggaagttctgggggacagggggatgatgggatcaaggtcaggccaggaagcccctgaggacagagactgtggggagactgggactgggaagaaagcaaaggagctagagccagggccaaaggaaaaggggggccagcagggaggtatttgcgggggaggtccagcagctgtctttcctaagacagggacacatgggcctggttattcctcttgtcacatgtggaacggtaggagatggaagacggagacagaacaagcaaaggagggccctgggcacagaggtctgtgtgtgtagccatctaagccactggaccccagcagacgagcacctaagctcaggcttaacccagtgcacgtgtgcgcacatacatgtgccccgcacctgacagtccactcaacccgtccaaaccctttccccataacaccaacccataacaggagatttctctcatgtgggcaatatccgtgttcccacttcgaaagggggaatgacaagataggactccctaggggattacagaaagaaaagcaggaaagcaagcatcctgttggatttcagcagcaggtatgatgtccagggaaaagaaatttggatagccagggagtgaaaaccccaccaatcttaaacaagacctctgtgcttcttccccagcaacacaaatgtcctgccagattcctcctggaaaaaaacttctgctcctgtccccctccaggtcccaggttgcccatgtccaggaaaagatggatccccctatccaaatcttctccgtggtgtgtgtgggtggaggagtggaccctggtccaggcaggggctccagggaagagaaggcgtcacttccgggggccttcaccagtgtctggtggctcccttctctgattgggcagaagtggcccaggcaggcgtatgacctgctgctgtggaggggctgtgccccaccgccacatgtcttcctacccatctgctccccagagggctgcctgctgtgcacttgggtcctggagcccttctccacccggtgagtggccagcagggtgtggggttatgtgagggtagaaaggacagcaaagagaaatgggctcccagctgggggaggggcaggcaaactggaacctacaggcactgacctttgtcgagaagagtgtagc

SEQ ID NO: 31148 - DNA, 2300 bp, Homo sapien
cctgtaggttccagtttgcctgcccctcccccagctgggagcccatttctctttgctgtcctttctaccctcacataaccccacaccctgctggccactcaccgggtggagaagggctccaggacccaagtgcacagcaggcagccctctggggagcagatgggtaggaagacatgtggcggtggggcacagcccctccacagcagcaggtcatacgcctgcctgggccacttctgcccaatcagagaagggagccaccagacactggtgaaggcccccggaagtgacgccttctcttccctggagcccctgcctggaccagggtccactcctccacccacacacaccacggagaagatttggatagggggatccatcttttcctggacatgggcaacctgggacctggagggggacaggagcagaagtttttttccaggaggaatctggcaggacatttgtgttgctggggaagaagcacagaggtcttgtttaagattggtggggttttcactccctggctatccaaatttcttttccctggacatcatacctgctgctgaaatccaacaggatgcttgctttcctgcttttctttctgtaatcccctagggagtcctatcttgtcattccccctttcgaagtgggaacacggatattgcccacatgagagaaatctcctgttatgggttggtgttatggggaaagggtttggacgggttgagtggactgtcaggtgcggggcacatgtatgtgcgcacacgtgcactgggttaagcctgagcttaggtgctcgtctgctggggtccagtggcttagatggctacacacacagacctctgtgcccagggccctcctttgcttgttctgtctccgtcttccatctcctaccgttccacatgtgacaagaggaataaccaggcccatgtgtccctgtcttaggaaagacagctgctggacctcccccgcaaatacctccctgctggccccccttttcctttggccctggctctagctcctttgctttcttcccagtcccagtctccccacagtctctgtcctcaggggcttcctggcctgaccttgatcccatcatccccctgtcccccagaacttcctcaggctctctcctgttcctcctccccaaggatgggcatgtctgctgagaagtgtggcctagatcctggaattttcccgtccagccagacgagatgtctcccaagattaggaaggagggtgctgggatagctgggaggatagtgggtgtgtgtgggagggagagacaggagacagggaggcaggcatgaccagggaaccaagagaaaggaggctgggagtgggctggagaggcagagggtcccttgggtgaaggaagggggtgagaaagcaagaggggactgtcgaatgcgcctgaggataagttacaatgagagggagatactgtcactccacagaagggggaatgctgccggtttctggctaggtccctgtcctgggtaacacaagaatgaggagcgacctcagagagaaggtagggaggcaggctaggcagtgagagagggtggtgagggtttggggggcgctgtgggcccaggcagggggagatcggctgatggacctttcctgtacgttgtcatctttaaagacaagtcttcatccttcgggcggaaccgggtcctcgctcacagagcggtccaggcctcaggcctagcctctgcccctccctagcctgaggctcccttcctgggctggacaccgacctcctggtccagccgccctgtggccgccagcagcggggggctccgggcccgcctctcctccccctcttcgcgccccctggtccctcccctccccctcccccgctcccccttcccctcccgcccctccctcctcccctgcccggtcccagcccctccctcccctcccccacccgcgatccgggccgctgctgctgggtcggaccccccgggctcagcccggcccctcgccgagctgccgccgccgccccgtttgctgaggaggaggcccccggccggggcgtcgggcgcggggcataaaacgggccggagccggcgcccggggcagtagagccgcgtacggcccgggtcagcgcccgcccgcccgcgctcctcccggccgctcctcccgccccgcccggcccggcgccgactctgcggccgcccgacgagcccctcgcggcactgccccggccccggccccggccccggccccctcccgccgcaccgcccccggcccggccctccgccctccgcactcccgcctccctccctccgcccgct

SEQ ID NO: 31149 - DNA, 2300 bp, Homo sapien
ggggatctggctctcgctgccacctgtcttggcctcttgctattgcccatcacaccctgctctgtccccaggaaccaggctttgctgaggtgctgcccaacctgacagtccaggagatggactggctggtgctgggggagctgcagatggccctggagtgggcaggcaggccagggctgcgcatcagtggacacattgctgccaggaagagctgcgacggtgaggcggggggggggcctggtgcgccgggcatgcacaactgagagacacagacaagtgccagggtgggtgtgggagagatcctgtggactgggggtgtaagcggccatggggtaaacctagcctcacctgtcttgcccctccgtagtcctgcaaagtgtcctttgtggggctgatgccctgatcccagtccagacgggtgctgccggctcagccagcctcacgctgctaggaaatggctccctgatctatcaggtaagagccaggggctgcagaaggtgggggaggggtggcgtgggcagcaggccccaggcctttactgcctctccactttgccctcctccatccctgcccatcaggtgcaagtggtagggacaagcagtgaggtggtggccatgacactggagaccaagcctcagcggagggatcagcgcactgtcctgtgccacatggctggactccagccaggaggacacacggtgagggctccaggtggagctggaccccagggcccaatgcatgggctgtgggaagccaggttggatgagcagggatgttcattatcatccactcactcatgggttctcccactcattcatttattcatttgacttttttttttttttttttttgagatggagtctggctctgtcaccaggctggagtgcagtggtgtgatcttggcttactgcaacctctgcctcctgggttcaagcgattctcctgcctcagcctcccaagtagctgggaccacaggtgtgcaccaccacacccagctaatttctgtatttttagtagagacggggtttcaccgtgttggccaggatggtcttgatctcttgacctcatggtccgcccacttcggcctcccaaagtgctgggattacaggcgagagccaccgtgcccggcatgatttgacatttttagtgagccccagactagggactagagtacaaagcaaatcatatgtggcccctgtgcttagcaagctcacagtcaaatgggagcattggacctggagaacagtgccacaggccacatattagtaaatgtaatggcaatggttgctacttatagggcctttccatgtgctaggtgctgcattggtggccttacatagtttttggctttcacagtatccatttgagagatgaggaagtgaagacttggagaagttaagttactcttgaaggttgttacatagctaggaagcagcaggggagggccttgaaactgggcctgccaggtccttatcctgtgtttctggtgtgtggaagtgtgtgtgggtggagtgggggcacaaaatggtccaagacttcagaaccttggactcgtgtgagagctgagaaggcctatcctcccctgcccccaggccgtgggtatctgccctgggctgggtgcccgaggggctcatatgctgctgcagaatgagctcttcctgaacgtgggcaccaaggacttcccagacggagagcttcgggggcacgtggctgccctgccctactgtgggcatagcgcccgccatgacagtgagtgtccttaggggtctgtctgccctttggtttcctagaacatttgagggatggtggcagacagccggagcctggtgtgtctttctttgtgcctaagctccggttgccatctgaaggtggggacatatagggtggccctgctggcggactcttcctgttgctgaggttcaagggtctaaaacttgctgctctccaggccctggacctatggacagtgtcttccagctcgtggaatgtgtgctggggagctgggaatgctgggtttgagggcttgccctaggccaccttctcacctgtcatctctcctctgtctggacccagcgctgcccgtgcccctagcaggagccctggtgctaccccctgtgaagagccaagcagcagggcacgcctggctttccttggatacccactgtcacctgcactatgaagtgctgctggctgggcttggtggctcagaacaaggcactgtcactgcccacctccttgggcctcctggaacgccagggcctcggcggctgctgaagggattctatggctcagaggtaagg

SEQ ID NO: 31150 - DNA, 2300 bp, Homo sapien
cttttcggctctacaatgggagagttgtataagatgatctccaagagcccttctgtggtctggagccctgagtgatgtttctgaaagccc[450 bp omitted]cccagagattctgagttccaagatttgaggtaggaaagggtggcttagaattctgagttttaaacgagtacctaggtcctctgtaggtttctgatgaaatgtatttaaaagctatgaagtcctgggttcaaatcccatctctgccactttttagctatgtgacttgagaaagtcactaagcctttctggatgtcagttttgtctgtaaaatgaggctgtataaaataactttcaataagttcgagttactgttgcagagtgttgattgcactttgtaaatgtttgtggaataaatggggcagaagtccatttgcccaaaccagaaacctactgttctccttgacgtcctcacctaccacatctctccaccaaccaatcacaaattcctgtgaactctacctcctacatacacttcacacctgccagcttctctccctcctcagggccaccacgctagcccaagccaccatcttcccttgcctgcgcactgcacagcaccctcactggtctcctgctgccaccatggcctctgcccatgcatgctccccagagcagccatgatcatccaaggtcatgcccctacttcaaaccctagctctcaggaaggccttatcatgagtccaaaaaaaattccttcttcccccaacacctacttctaagaactcctttcagtccctcttacactcaagctattctgaacttctttcggattcctccagtgaatcagtttcttttgcccctaggtcttcacacaaagagtatttgctcccctcctcactcccccggaacacacaatccgccactcactactcatccttcctatttcagcttgaatgccagttcttcagggccggacactggccgtcgccctcacgtacgctcgaggaactcttcctcctctgcaataaagctccttacactctacagcgatgacttaatcccacgtcctccactgctaagctagtaacacaagcctctgtcttgtccattgcggtagcacccgcaggtactacagtctgacacattgtgggcgctcacaaagatgtgctgaatgaatgactaaatacgcagcccagtgaaagaatgaagaaacgatgaagtcccttgtcacaggatacatcgcggtgggggtccccccaagtagcactaagctacagccacatgagggcgtcgcagggcagacgcgggccacatgggggcgcccccggtccgtcttagctggttggcacctcctcggactcagtttaggttactaatcgccaatgggcgccaggaggcggggttctccctctgatggacagcatcgctccgcccaatctaattcatcttttccttagccccgcccactccggcccctgagaccccgagggtgggcctggcggagacaccgccaactgaactccagctgagtgctctcgaggccgaaccagcgggcctggcggtctgtgagtgggtggccagccgctaggggcggggcctcagcgttgacgggcaggcaggccgtcccacccctctcgcccagagcggccgcgccagcgctggggacagcagaagtgagtacgtgagcggcgcagcaagatcccagctcggaccccggacggcgcgcgcccccgaagccccggatcccagtcgggcccgcagctgaccgccagattactgtgcatcccgaatcacgaccacctgcaccctcctgccccggcccgccccccaagtcctcaggcacccagctccccggcgccccggatcctcctggaccggtc

SEQ ID NO: 31151 - DNA, 2300 bp, Homo sapien
ttcatatttagatttagaaaagtctatcagatatttacttaaaataagtaactgttatttcctagggaaaaaagtaaagccttctgtcatttattcattggcaattatatatcgagtattgactaagagaagctcttcaaaagagttaaaaacatagccctagcttttaggatgtttggtttggggagggtaataagataagcacaacaaattataatacaaaatatagtaaatgataataataataattaacatctatgaatgtagtggttaagagcacagtctctggagtcatactatatgggttcacatcccagctgtgtgatgttgggcaagttacttaacctccttgtgtgtaacctcacctggaaaatggggctaataccacttacctagcagggctacagtatcagaaaaaagtggcccagggtgtttgagcatcctgtacaaggtcacagaatgggtgagtactgacccggttcagtgctatgtcccaggacacctcctccgcatctccacagagtgctaggcattccaggacagttcatcttgcaattctaatattgtatattgcatataaaaatatgcattaattaacagctaacatgtattgaatatcaatatgtgccaagcactgtgttaaatgcttatgtgcattacttcacataatctccacaatgctgttactactattatactcattttactgataaggtaacagaagggcagaagtttaggtaacttgcccaagattacatagctagtaagtagcaaactgtgtcacagaaaagatacaatcatctataaaatggggatgatggtattagtacctacattagtgagaatctgatgaattaatatttgaaaagtgattagaacggagcctggcacctaataaagcctatatatgtggatgttaacaattgctaaggtgattcagagatgacagtaaataacttctatgcgtggtgactaaggaaggcttgggaaggtgatgtttaaactgggccctgaatagtggacaggatttggagaaatggaggtgatagagagggcatttctgacagggaaggaagggagggagggagggaagaaggaaggaaggaaggaaggaaagaaggaaggaaggaaggaaggaaagaaggaaggaaggaaggcaggaagggaaggagggaagggagggaggaaggaaggaaggagggaaggaaagaaggaaggaaggagcaagaagcagaagaaagctcagagtgtgtaaaaagagaaaaagaaaagaaatacatgggagtagtcaaatttgacttgcgcaaaaaaaaaaaaaaaaaagaacaaacttcccctttcttccaaccagtccctattcctgctgtacttctcagtattttcctcttatccccatggaatctgctgtccttactccctcatcataatgatccattgaatatttattgagttcctctccgtgtcaggcactgctctaggcaccgaggatacaacccagtaaataggccgggtcccagttcctagtttgcactataataatcctccaaactggattctagcttttagccggccgaactccaatctatcttccacaataccgccagaaccgaagacacagatctggtctggacactcacttgcttaaatcccgctgcagtattttctctttacgtccagaataaatttcagtctccctagcatcctttactaattggttcgcacagtcttacctcgcagccttcaccgtgcactctgcacaagagccccggtaaagcactgaaaatcccagatacacacactcacaaataggcacttgcagaaagaacgtggggggcactccatccctatttcatctcttgtacaccgaaacattccccagtctgcatgccttggatgggagagtcctggttacattcccccgcccccgacttttcaagcctaaaatccgtcacagggcgcacccccgtccccaccctccagggcatttccacttatagcagcctgggcacacccccaacccagaagggaccggaaaaggaggggctgcgcgcggcactagggtcgccgtcctggctgaggtggccggaagtggcccctcgcgcgggcgcggactgaggctgcgcgccgcaggttccggctgctggcggcgttgcggccgcaggtttgactcccgtgcggtgcggcccagcagccacaaagctcccgctgccattgctccttgtactcccgccgtcactgccgctgtccaacccctcccccggggcttgcgcggcggctcccacacccctcggcccgtgtac

SEQ ID NO: 31152 - DNA, 2300 bp, Homo sapien
ccttcctgtgtgggaaggtcttccaccccatcccacttctgagtggctaacaatggccacaggacactcacagcacaattcccactggggcgcagcccaggcaggggtgggaaagcatgtggggctcatctatgtcctctggagtttcccctggtccccagttcttggcccggtttctcagaagactgcattcctactaaggatttaggggatgtaatttaagcagcagccctttgatggtgggggtgggaatattgcattttcagaggcaactcttaaagaacagaaagctttcctgccaggatggctctggaatgacagcagaatgtcaagcagcttaagaaaattgaggggaatttttttttttttctggaagggcataagtggtcagacatgatggctcatgcctgtaatcccagcactttgggaggccaagacgggagaatttcttgaggccaggagtttgagaccagcctggtcaacatagcaagaccctgtctctacaaaaaaaaaaaaaaaaaaaaaaaaaaaaagaatagaaaaaataataatactaatcagacttggtagtacacacctgtagtcctagccccttgggagctgaggcaggaggatcactttgagcccaggagtttgaggctgcagtgagccgtgatcagaaagccggggacgtacagtgtccttttggctcccaaatcattcagatcctgtttttctattttgcttcctccttttttttttttttttttttttttgagatggactctcgctctgtcgcccaggctggagtgcagtggcgccatcttgcctcacagcaacctccgcctcctgggttcaagccattctcctgcctcagcctcccgagtagctgggcctacaggcgcccgccaccatgcccagctaatttttgtatttttagtagagacagtgtttcaccgtattggccagggtggtctcgaactcctgacctcgagtgatctgcccatctccgcctccccaagtgctgggattacaggcctgagccactgcgcctggccttcatttcctcttagctgaggtccttccggtctgcagatcttcctcctggcggcctccactcttttccctttcctgttccgtgtctacctttcgtgggggagagagtggagcaccgcacggaagaggtgccatgaggacaggggccgcgtctgcttccccagctcctggatccccgcctggcacacagtgggccttcaagatggattcgttgcctgaaggaagtcaagaagccaggctagcgttccatttttcctctcccttcaaggcctgtgcagggagggcctggctgctgccatgaaggggaagagagcccgggacagtgactcgccaaagggccccggccaaggcccagcgcagcaggaaggccggccgcatcctgtcggagccgcacctctggctttcggccgtgacactgggacccagggaagccctgggatctccccagggaccctccgacatgagccctgttccatatgcctgaagagcggggccaggagggaaggaagtgcccagacacagggagacagagcattaaaattccagcggcagttccacgggcaggagctcgcggttcctaactgaccgtaaaccctttctcctgacagctcttggaatccatcactccagcctctccccgagcagctgacacatcgcagcaacgcttctccagaagtcagggtctgctgactccggcagggacgggaaggcaagcgagcgcgagcagctgaaatggcccctgtctcccctgacttcggggccgagggcaggcgggccggggaggcccatggaaagggctgtcaagtgtagcgcgattcccagccacagcccgagaaggtggtttgctaactgtctgcctctgggtggaattctattaacctagtgggggaaactcgttttctccccactgaaagctctgagtggtgtgtcacatatgtcttttattaataaaaaaaaaaaaaaagagagagagaaaatagagtcattatgactgcataattacagttcatttggtaggccagatctttcaaacccgggtgctgggggtgcggtggaggggggggtgataataaaagggaccttgatatgaaccgcttgggaaccacctgtgtaggaggcagttcgggagcaactctcaaaaggtgcagtggcttgcaagattcagagctggcgtgggcagggacacccctctcagagctaacacagtgcaccgcagccctggcgccagctcggggaatcaggtgaccttaagcaaggccctaccc

SEQ ID NO: 31153 - DNA, 2300 bp, Homo sapien
atttcaaaagggtcagttttttaaagtaatggcaaaaaccgcaattacttgtgtaccaacctaatagctacctttccactgctcacccctatgaccctgctctcccctacttctgctaatttcttttcctctggatactttcaaaagttctctgtcacacaggctttctggtctcaccagcttgcttatccttctgtagacagtctctagtttaatagctttactagaaaaatgtgatattcagaaccaaaggccggtttccagccttctaaagcacagctatcatcttgccactcctctgctcgagttcctctggagactctcaccagaagagcagaacaccccagcttagcgtgcaatgtcttcctggatctggtcctagcctttccagcctcatagcccaccacatctctaatacacactacaccagtgtcttcaaactatgggttgctctgcatcactgagtactgaaatgaattcagtaaccagcacttaaaaaaagagaatagaatagaaaataccaagttgcattgtacactctaagggcaattactgtttcagcatatctatctatctatctatctatctatctatctatctataatgcacactcacacatatgcgcatactgtgtgtgtttttatactaggccatggctgaaatgtatctttttttttttttgagacggagtctcactctgttacccaggctggagtgcaatggcacaatcttggctcactgctgcaacctctgcctcctgggttcaagcaattctcctgcctcagcctcccgagtagctgggaccacaggtgcatgccaccacacctggctaatttttgtatttttagtagagacagggtttctccatgttggtcaggctggtcttgaactcctgaccacctgcctcagcctcccaaagtgctgggattgcaggcatgagtcaccgcacctggcctgaaatgtatttcttactgtgagggatgattaaaagaaggttgaaagccactggccacaccacggctacatcaggccaataactagttcccaaacttgctttgtactgcctttgatcccacccttccctcagctaggcattctccctgctctctgctactgaaatccttcaaggccctgacaagataccacatccttccttgagtgtttcaccctttccccctgtctgtgcgaaaatggtggttcaatgtctttctttatattactcaaaacagcctgccttgtattttgttatgtctgtacactgaattcttagaaaataaatacctggaggacagggcaacaccttcgggtcttctgaaggcccagaagtctagtgaacctagctgatgctcaaaaatgtctgcccaaccgaatattttctgtatctccttccaagagtatcttctggtgttcttcctcctgttttcttgacctatatagcccccagcaggcctaaaatctgtgtcctggggctaatgttacgtacagtgatgactctagaaaccagtctgttctgaaagctttcacctttcttcaggagcgataagagaaataagcatacgtttttgttcatttttcagatgtttcctttatttgagactatgtttctcctgtatttttggtgttaagatgtattttggggagcaacactgatgatatattacaagataatagttggtattttagtatgtgtgtgcctattgtacttatttgacacaataaataggcaattctgagttcatcttttaaaaaaaaaaaaaagttaaaaaaaatttactggttgcaaactccaaaaggcagggaatcaacttcccttctgggctggctgcaagtaagttcactttcttaaaggaggagctttctcctctcacctcaaggactgttatttatttgtctgcgctactctttcgacgtttccattctcttggtcctcaagatgtgaatcacccattttttccgtaggggggaagacggcgtatctctggccctttaaataggggcgtggtgaagaggcgcggaccgcccaggagggggagcagtgcgaggaggaaagcggaagcgctgcccgcagtggtaggtagtgcgcgtgcgtgaggctagagcagtgggtgcggtcacgtgggccggcggtccacggccggaatggcagcaagctcaggtaacgagtttccagagagcgggcccgtggaaggagacaggattgaggggccgtattcagggtaggaggagagcgcgcgacaggtctctgagcctcggcgtctcctccccgcgcgacagcggcgggacctcggggagcgaacaga

SEQ ID NO: 31154 - DNA, 2300 bp, Homo sapien
gatatgagataaaaagagctggaaaaaattgttttcctttctgagttattttggaaagagataaaatatgaaacattttagattattaaatcagttaaatattattttcctgtatggtctttcccactatttttgaaaaatgtgtaagaataaaagttaataactatctttaggaaccactgaacgtgaattagattgtgcatgtttgtaaatagttgttaaataattgcaaccctttttgcttagtggtacaaataggagttgaaagactttattaaaaagtaatttgtcatgagctaaggtctttgaagaaatgagtataaacattagtattgctactgcatttgggttattgcaaaaggagccctatatttagaacctgatgttggaaagatactttaaaatgttgccaggcaaagagtggcctcagttatgtgttctaggaatgtgtttgatagtgtgtgttttattaggacacaaccctataaatagaaaacccattttctgtaacgtgaaagaaattagtctgtatttggtaatataccaaatagtgtaatagctagaaaagttggtttcagctcttgaaaagtcagtttcataagtccatgatttatacaaggtaactattcatttcttttaatatgataaaaatgaaacatcaaaggaagtgaattaattataggtactaaaataatgagcttcattagataaaattgtcagtgaatttttagcatattgtttaaaaacaactaatctcagttcactttttaaaaaattagttatttcaagccaggcatgatggcacatgcctgtagtcccagctactcaggaggctgaggctggaggatggcttgagcccaagagttggaggccacgttgacaatatagtgagactccatttcttaaaagaaattaagtggctcagtaattacaagtcttttttttctgccttcactaacatgcacaatccatctttactaacatacacaatctaatttactaagagaagctcactgcagggcaagggttggtggtagtggtgtttatacacgctaaaggcagtatgtagtttgaaagagctttgcactgagagttttgccagttgtttggtactgtgaaaaacatctagtttaggaaacaaaatgatctttattattattattattagggcattgtttctgttttcatatttttgctttatcctaaacaggtaaagctaattggactttttaaagttgggtcacttgtggcctaattgaaacacaaagtaaaatcatttaaaagcagacttaattattaaacttacagtaatgttttcagtatattttagctttctaaaaatgacagttttgcaagtaaaccaaattatctgtgatttttgatataagtgtgatctatcatttagagctctgaaataataaaaagctgtataagtttctagttttctttagtatttcatttctctctgaaaatgtccatgtttctctgtgactggctctgtttctagaaatctctggtaggctatggagttattttatcttggggtcattgttgtttcctttaatagatctgaacccttaggtttgctcgtgttgtattaaatagctagttgttcatcctcagtgtttctgctaagctcccagagacgtctgtggccctgtgcagaggccaacaacaaaactggtttatatgcttatttccaggggaactggagcactaccctggggtttggaatgtaaagaaggcattaattgcagcttttggcaccgatttacccttatgctgttaggtaaataaatctagttggtaccaggtctagtggctgagcctattaagttatcactatcaccagtttcatgactttgggtggcgggccacttcctaaagtccttgagcccaagttagctgttcctcctttatgctctcattgaaaccctctcctaataacataccctgtaccccactgttaatttcagtttgcctgcaatcggatgtttaggtgaaatctgaccaagtaagtctttggaatgtccaattgacaaggaggaaatctaaatgatagtgttttgttttgtttttgtttttttctttttttgaaaagagataatcattcaggtcttcgtgagctaaggccaaacaaacaaaaaacacttgctttgatggactgaatactgttattagaagtaaatatggaaaatgaaccagaccatgaaaatgtggaacagagcctctgtgccaagacgagcgaagaagagctgaataagtctttcaatctagaagcttcactttcaaaattctct

SEQ ID NO: 31155 - DNA, 2300 bp, Homo sapien
gttgctgagccttatttttcttgcttctttatattatagcttctgattggttaagaaagaaacgtgtggttttgcatttatcttagcagcatcacatgctgtttgtaaacaggagtgccttcttagttaacttttgtagcctttactgaatttttagctctctttaattctctccccaaggctttttgtactaaactaaaatatataattatcttttttagcatgttccttttaacaacacattacagagtacaagggcttccaaatctgacattttctttgaatcattggttatcttgttactttttctttcttacagtaaaactccattaatctctgtttgttttgcttggctagtaatcggtcatcacaaaaatatgatgaattattgattcaaatgaaactgacatgaaaatattttgataaatatgaaatggaggggaaaaatgatgtaaaattacatttgtgcatttgagaaaaaaataaatggctgtggattttccctagaatgttgcaaatgctgttaattgcagggtggtgtggagttctggtgcagttgtagccagtctgttttccatctgtccccttccaggacttcagatgagtcaaaaccccatcctagtcctttcaggagcttccttgatgtttttgtggaacttgtcatgaaagaccatacctgtgaataaataaaccatttaccactttctacaattgacatgatatacatataaagaaattacacatttaggaaaaagtaaataatctcaacaggtaaataaaattcacacagtttttgtattttttaaaaaacagaatgaacaaagaagtgaatgatacaaggcaatacaatttataaatgaaaacatggaaaatattcaattttgctggtcataaaagaattattaaattgtcaggggagaaaaaccaagtttgcaattgtctggtgaaactggtaggattatacattgtgggtggcagtgtcaattgatgctgtgatgctttttgaagataatttcatagcacatttcaagtgccacagattttttcatatcttttcacttaagataaatttctaaaagttgactgatttaggaattaagcccttcaaatgggaaaggctttatatgtagatgttcattgtagtatcacttgaaatactggaaataagtaatatatccaacagtacaggaatacttaagtatattctgatttttcagcatattgaagtattgtgttagacaaaatggtaattttgaagaataaatagcaacttagaataatgcttatcatataatgtatgaaaacagaattccgaattctgtctgtggtcaatataactcaaattatttatgggttgtttccagaaatatgaaataaacattgtcgaggttgttgacatttaaagtaatttaaaacaatttttgtttctgcaataaaattgtttctaggtttatattttaaggattaaacattttttttcttcttcttccatgaataatcactagccaaacattttgggatgcaaagggttatagctagacaaagaagcatattgactgcaggtcagctaggaatatttaaataccaagaaggagggaaggataaatcatgagtagtccttttgtttttttcctacttcatgatgtccacccaattatctgttcccatgtcagtgttgtctttaagaagcaatatgccacaatagactgagcacaggatttaggccggaaggctgggttcaaaatctgactcttttgtttgttagatatgtcactattagcaaacaatttatcttaccttttctgatttgttaaagaagtgttgggaggattaattgagattttatatatatgtatatatacacacgtatatatatatatatatatatatacacacacacacaaagtttttgcagtataaaactctgtgaatattattgccattttaaataaactcatgagtaagttgaagtagggaaaagatgagatatatttgggagactaaatttaatggatatttggcatgttcctaaaagtttttctccccccctttctgttacagggatcttttatttagtcagatgtatgataaattaagtgagaattcagtggccaaaggagtatttttggagtgccttgagccatatattttaagtgataaattggtgggaatcacaccccaagtaatgaaagacttgattgttcatttccaagataaaaaattaatggaaaatgtggaagcgctcattgtacatatggatatcaccagcctagatattcagcaggtgagtttatagacag

SEQ ID NO: 31156 - DNA, 2300 bp, Homo sapien
tccttgccaactgaagaatcacaaggttcataaattttgaaaggagagctttatttcagataaagagttgcaacctgcaaggtggccattctacgggctgggaagtgtagcctctggcagaagctgaaaataagcagttcaagggaggggtaaagggaatagtaatttacgctgagtagagtagctaagtatatatattcagtaacctataggaagagtcatgaatatttatgaaaggagaaataagcacatgcacaatcaagcttcacgcctttttgtgggacccgtgttcaaaatatggcagcattagcacaatccaaatgggctgttttcagccctctgatgtcaaaaggtgaagcagatgacacgaaaaccctcactgcatgtcctctgccattcggcaaaacagttgtggaggtggtgtttagtgtttaggaaaggatgtgttgtgaaactggtgagctgtcacattgaaacagcagaggaggagcaagagtctggtcacaacctcagacagttggctaaaggcaatgaaagaatgagccatatgttttttgttttccagagctgttttctgtttactccttaggaaagaattctggttaaaggttaataagggaggggcctactgaggcatgtcagacctgccatcctgtcatggctgggaactcaatttttaagatggggtctgttaccaaactgaacctgggtccacttacctggtgcagtaaagccaaacacccacattgaggtttgcagtgagagaacggagggcatttatttgcagggcaccaagcaaggagaattggcagttcatgcttaagaccagacatccctgatggcttacaggaagagtttttaaaggcaggggaacatttcaggaaagcagaaattacaggccaaattgcaaatcactacatggaggttttatacattgatttggcttaaaaaggtgggatatcttgaagtgggggtcctatatggcataggtggattcagagattctttgatttgcagttggttaaggaagcaaggctttgcctgagaacttggggtcagcagaaggaatattaaggtttggcttgtgggcgtgactctcttcagaccctttaggaagcaatctagagcaaacaacagcagacagagctcagtcctcaggggcccccttatctgagttctgcatgacagtggttggcattttccatctggttgtggtgcaggtttcagaaaaacaactcagggacatatgttaagatgttatctttaatttctacagggaatcaaacatcttgtggctctaacctacttgggtggctattgttgtaagctgtttctttgttatcaggttgctcatttacttctaaagactagctagatgcctggaatttccctcgaagagattcaagatttttccttattttcatgcttgaaggagggaaaggtgtgtggcaggctgctaagagaggcccctgctccatctcagtttcattaagttggttggggagcttaggattttccttttatttctcttcccacaggcttagtcccacaaaactagcccctacttcaggtgccgagcataagccccaggctgtaacctgtgcttctgaccaactaggactttaaatcaggatacccttgaccctcctccgcaggttccattaatttgctagagcagctcacacaattcagggaacaccttacttacatttactggtttataataaaggatattacaaaggatataggggaacagccacatagaagaaatgaatagggagaggtttgtgggaagggccagggagcttccatgctctctcagtgcacactgccctccaggaccctccacatgttcagtgatccagaaactccctgaacttagtccttggggtttttatggaggctttattatgtagacgtgattgattacatcgttggccattggtgatcaagtcaatcttcagccactcttccctctccagaggtgtcagggctggggtgggactgaaagttccagctctctaatcacatggttggccctcctgacaaccaaccagcccttatcctgaggctggccaggagcctccagccctcagtcatctcactagtatgtaagaagataacactttggaaagcttaaggattttaggagctgtgtgcttattatatcacaatattatattcccacatagagaactgccgtgtccctagatttatcatgggctgcttctaatttctccatgtaggactttccgataggatttattcctaattatctctgactttatagccctagtccc

SEQ ID NO: 31157 - DNA, 2300 bp, Homo sapien
aggatttgccctcatggagtttacattgtagtggcagggatagaccataagccaacaagtgaaatgccagatactgataactaccatgggggaaaaaatgttaaaggagatacagagtgtttggtggggggtgcagatattttatataggttggtcagggaaaggctcactgttaaggtgacttatgaacagacaacttaaaaattaattaatagaaaaataatagttacatgaataaaaaacaagctatgctatagaggaaaaggaatgttgggagctactaatttatagagtagtccaggaaagccttcttgtttaagtgacgtttgaggggatctaaaggaagtggccatgcaacgtcagaagagagtacaccaggcagaggagccaagtgcagagaccatgaggcgggagagccttggcattcttgaggagtagtgagtgaggaggctagtggcacctgagcagccaaggaaggggacagtgaaagagacttcagaggagcagaggccaaatcatgtaggagctggcccaagtctaactcatttttataatgaaagtgagacttttactctgagatgcgaagccactggatggttttgaggactggggcggtgacatgatctgacctatgtcttaaggattactctgactgctgtgttaagaaaggactagagagatcaagggggaaagcagatggaccacttaggctgttgtagtagcccatgtgagagatggtctaggtaatagtcatgaagtaagaagtggtaggattctggatatatttagaaggtagtggtattttaaagctatggaacctggaagtaatctctaaaggagcaaaggtagctacaacaacagagtatagaagaggaagtttatatatatatatatatatatatatatatatatatatatatatatatatatatatatatagcgagagagagagagagaagggaagaaaaaagaaaaagagtataaagactatagaaaagaaaaggtttgatttctggaatgtccgacattttagattagagaaatgaagataaatcagtgtagatggctgagaattattctcagtactcaacttctgggaggctgatttggtaatttagtgtaatcaatagggaatttctttataagaatagcgtaaggatttactacagcaatgacatttttgtaaatgtttaatcaaatcacaacccttgccttgaatttggtgagcagaccactcatgttgttatcaagctacttaaataattatgattttttccagttgcttttttttttctttttgagatggagtctcattctgtctcctaggctggagtgcagtggagcaatctcagctcactgtaacctctgcctcccaggttcaagcgattctcatgcctcagcctcctgagtatctgggactacaggtgtgtgccaccacacctggctaattttttggtttttggtttttttttttgagacagagttttgctcttgttgcccaggctggagtgcagtggcacgatcttggctcactgcaacctccgcctcccgggttgaagcaattcttctgcctcagcctcccaagtagctgggattacaggtacctgccaccacgtccagctaattttttgtatttttagtagagacggggtttcacgatgttggccaggctgatctcaaactcctaacctcagctgatctgcccacctcggcctcccaaagtgctgggattacaggcgtgagccaccacgcccagcccccagttgcctttttttcagattatctaaaaatactatccggatttcatagtttgagaaatgaacagaagttcaactcatcctctaggtagtttttagtcagagaactgtgatttgttcgtactcacaacataagtatacaaatatatgtatgaatgtggatttttaaaaagagaggacagcagcaagtacattccctttcttgtttcttaccctgtacagccatcagtgcatttctacttgttagagatttttattgcttctaagtacacttacaagcttatatttatggattttgtgataataaaaagtacaaattggttgccttcgttttgcagctgtggccatttgtatcactcattctgcctacaaaacaaagaatgcactgtggaatttgagggccaaacaagatggacatgctacaaatgcagttcaagtaacaaagtaggaaaactcagtgaaaattcatctgaaattaaaaagggaaggataaccccatcacaggtaagacttgttttcgtggcaaaatggaaatggtctttt

SEQ ID NO: 31158 - DNA, 2300 bp, Homo sapien
agtaataatggagtatggatttctttgattaagatttctctgccttttacttccgttattctgaggtaggtcagactgtgaagttaacagcaggggtgcatagattttgtgtcagagatgtattcctttaggatttttttgaggcggggagcagttggggtggaagctgatgagatgattcttcatgtttgcaactgtttcaatgttaggttaatgggggaactagagtttgtgattttgattcagacctttctggaaaatacttttgctgccaaattgagtctctccccaatccctaataaatgaagatttcaccagagtcagatatatgcaaattacatttcccttctcaagccaaggttacataaaagggaaaattatgaaagattgcttatggcagcaaggattttcaagcttgaggatgaatttggttgtttcaaaaccatgatgagtctcttgtcagtgcaaagcaggaaaggcataaaggagaaagtggacctgggcataaacatgttcccacacagtgtttgtgctgaaagccttgttccttgaacaagcattcttctgtgcgtttggcaaataaggagggggtgtcccctcctcttctgtgttcaaggctgggttctggccttgttgcagggaaacactaattcccagcagtgcaccatgggagcaaatggtttgtttcctcttcagtgaatccagcctggggtcggttctcagcagcagagcctggcatggaaaatctatttggagcaacttgtccccaggagggaagagtgcgagccaactgtgtggggaagccgcagccaccacagggtcagtcacacctgctggccagagcaggcgctaacacagaaaggcagagtcctccgcatacatgagtcctgtttgtgtgcccacccactcctatgtaccacacacacccgatttgatccgtatatgccatgtgcacactcgacatgccagatacacgcactgcactgccacacatataccatacacacaccactctgtattactaagcatacccacccccacaacacgtgcacaagcacatgcacgtccaactacacacatatacatattctgcacgccacacacactcaaccacacacacaccacccacactccacctcagttataacattcatttcacatacacacgtatacacacacctcaccagtcacttgcatcacgcataccacccaccatgtaccatgaacacacctaaccacacacaaccacacacgcatacccaccatacatactccaaataatcatacacacgcacgcaacacacacatcccatgcacaccaaactacacatacgcagacacacacacacatcaatgcacccagctttgttgctttcccgctcaacggaggcgggggtgggaggagaagggggaggggctgcggtcccggcgaaggttggggcgggcgcgggaaggcccgggcgcactggcctggggtttggggcgaggcgggcaggggttggcggtgctggcccctgacgcgccctgtggccgcgctggggcaggaggcccgccctgggtggggggagtgcgcgcgtgtgcacgagcgtgtgcgcgcctcccaggggctccatgcccagacacggggaggtgtgtacgagggagatgtgagacgcctgtggggacaggctgtgtgtgtgagatcctcgctacgcgatgcacccggcccgggccactaggaggttcgggtgggcgtgggccaggtgtgcgcagccctccgtggagcgtgtggacgcgtgtgtcagttctcggtggccagtgtcactcggggggaagtgcatatgtaggctggcgtgcatgtgagtacaaagcggccgaggagtgtgtgttcaccacggccctccgtcggggtctttctccgaggaaggagtgagtatgtgaggaggacctcgctgtgaccggcggggacgccgacggccaagctccccagcggcgtgtgtgtgagaaggccgggctcgctgaggaacgtcgcgcggggccgaccggcgcgcgcctgtgcgcgtgcgtgtgcgcgtggggcgcggcgcgcgccgcgccggagggagggaggctgccagcccggacccggtcgcagcgcccggggcggctcctcctcgagcctgggaccgccgcgctcccgccgccgccgcgtgctggcgtgactcccggcccgtgccgcgccctcccgcgtccgcagccggctcggcttcctgcccacccagacgtcgcttctcccgggctcccggtgtcggctccgcgcggagggagaggaaatgagtgcg

SEQ ID NO: 31159 - DNA, 2300 bp, Homo sapien
gcgctcagagagcatcttgctcacaatgctgggctcattcatccactccacaaatagctagtgagtgttttctatgtgccaggccctaggctggatgctagagaaaatttcgagggaagacataaaccaaccataggaatataaaaggtaactgctttgattaaggggtttaaacaaagcactataggagaatgagggagaaacatgtctgcctggagccatttaaaaacatttcctaggaaggatgcgtcggcactggtgacgcagacaagctggggtggggtataatgaaagaaaggcaagaaaggcaaaggctgctgtgtggatctgtcttgcctgaaagtcatgtgggagcagtcaaacaagaggcggaactggtaggcaggggccagatcacgaaaagcctggtagagtttagaccgagtcctctaaacccatagtttttgtatatctttcagctgggcgcactttgttcaattaaaaaactcatcagaaatcataaatgaaacatctgtaaagtccagctgctccagctgaggctgttgcgtgttgctggggtaaggctggaaccccgtttgtttgtaatccccacaacaccagagcaaaaccactgggcaacctctaagatggctcccgctacttccttgtgttaattcgctcccctggagtatggactggacttaacaatcgtaaaagtagtgatgggagttgtttccaaaattagttgacaaggaaagtgacttctgttgtgttggtctctctctttctcagggacttcactctaggggaagccaggagccatgttgtgggtggccctagggaaaggcccacatggcaaggacctgacacctctggccaacagccggtgaggagccaaaccctgacaacaaccatgtgagtgagcttagaagcaaatccttccagtagaacctgagatgaaaccacagtcctggccaacacctcgactgcagccttgtaagagacctggccagcgcagctgcacctatactcctgacacacagaaattgtaagatcataaatatttcttgttttaacttgttaagttgtggagcaatttgttctgccacaataaataacgagtacaggacccactgaggaatgctgagcccagagtgaccggatcaaatgggcattttgaatgctgactcaggaaagacccaggaggatacattgaatggaacaagaccagagataaggcaactgctagtccaagagggagacgaagagggttgaatgatgggggtaggaaggaggggagaggaatggtagatatcctgggaaggtaaaatcagtaagtcttgggattgtttctggggaggggaggagtttcaaggacaatgccagtcattagctagggaacaaggacagaggaacatatttggagggaaagaaaaaaatgttccatttgggatgtgtggagatcatagtggctgtgagtcactcatatgaagcatgcaaatagtcaatacgcagttcaaagcagtctgaaagaagagactgcgtaagaagttgcccttatacattcaggttgcttcactcacagaggctgcaaactccaatgcctctgtgccaagaaaataacatcaaggagtgaagggtcctgggtgaagggtcctgcattcaggagctgcagggaccgtgttgaattgcacagtgcctgccttccttaggggtaccaaagccacacatgtttgaaactctgctgtctgcgacgctcatttcagtttcaagagaagctggcttgagtggcactccttagggaagtgtcaagcagaatgaaaaggacaagagctttggagtcagacagcactgagttctaatcttgcctctgccacgtgctaactggtatccctgggggagttaattatgctctctgagccagcgtttctttggctgtgtaagagactaataacaccagttttaggaaggttgttgtgattaaatgagatactgcttgttaaatatcaagtacagttcccggcaccaaagaggtgcttgagaagtggtagctgacattctgatagtgatgcaataatggccgtcatctccactgaaggaggcgagactccagcacacagcgaatgtcctcgccattctattcaaagagaagagtcatcctggaacagccgtgctggaactctcagaactcagtgtgcttgaggggtatgtggatctgtcttttggttgtgggtactttaagtgatgagaagtttaatgtcaggaggcacatggcgcaacaggagactccaagaacaaaagtcacagtacatccaggactc

SEQ ID NO: 31160 - DNA, 2300 bp, Homo sapien
agtgtgctttcattttcaataaatctctgcttttgctacttcattctttccttgctttgttttgcattttcaattctttggtcaaaacgccaagaacctggacaccgtccacccataacagtttcgctagttgcatgtgattgtaagacaaataaaaatgatgttgtgggctgggtgcggtggctcacgcctgtaatcccagcactttgggaggccgaggcgggtggatcacagggtcaggagatcaagaccatcctggctaacacggtgaaacgccatctctaccaaaaatacaaagaattagccaggcgtggtggcgggcgcttgtagtcccagctactcgggaggctgaggcaggagaatggtgtgaacccgggaggcggacttgcagtgagctgagatcgcgccactgcattccagcctggtcgacagagccagactccgtctcaaaaaataaaaattaaaaaaaaaaaaagatgttgaggcaggagtatagggcctgaaggcagggaacctaaagactttctagaactaaatcaaatggaaacacttcagctatgacaggaaatattctcttcatttacatagggtgtacactgagtaaatgacttcgtaacttcacttcgtcctcttcatttacatagggcgtacacccagtaaccaatgggaaacctctagagggtattgaaaccccagaaaattctgtaacaaggtcccttgggcctctttcttgggcccactcccaccgtgtggagtgtcttttcgttttcaataaatattcgcttctgttgctttgtttttcccttgctttgtgtgtttcgtccaattctttgttcaaaacgccaagaacctggacaacttgcagtccagaccctcctctagtaacaatgttatataagtatttggttgatgttagagtaatcactggatgggttcttcctgcctgctgcacaaacaaaatcaattcaggaagaccacagcattgcagtaaggaaagagtttaattgatgtgaggctggccacgccacatgggacatggagttattactcaaatcaatctcatcgaaggctagtaggttaggggtttttcaaaggtggtttggtgggcaggggctagggtatggaaaatgctgactggttgggttggagatgaaatcataggggttgaagctatcctcttgtactgagttgcttgtgggtggggccacaggagctgttgactggtccaggtggagccatcagtgtcaggcaaacgtgaaaaaatatctcaaaaggccaaacttaggttctacaatagtaatgttacctgcaggagtaaatggggaagttgtctatctggtggcttccggaataatggctggcaatggtctatgtttacaccttagcagagagaattcacactcctctgtcctcctagcctggtggtctctcggttagctttacaaaggcagttgagttttggggaagggctattatcatttaaactataaaccaaatgtctcccaaagttaacttggcctaagctcaggaataattaagggcagctaaaggcaagatggggttggttaaatcagatctctttgactgccataattttctcactgttagaatttttgcaaaggctgtttcattagtaccctactcatttaggtgaaatgaacaatgtgtattttatgtgttccagatgtgtatcaatatcacataactgtcagggagggccccaggtatctgtccctgttcagaaagatcatgaagatgaataccgcgatgaggacagcttgcccgtctcagcgaactcagaacttgtcctcagtagccagcccctatgggccaaggggttacaaacttcgacttgccggcaattacagctgttttccatcattctccttgctgtaccttctggtgggagcagcatgggagttaataaagggaaagcgacaagcgtctgtagagcgccgggtggggtctcgggagaggagggctgggtgggaagaggcgcggcgggaggcggcgccccggctcgcattggcccagccggcgtccctcctctggaggaggccgggcgcgcccggaaaagtggtttgcctgacggcgagaggcagaggtgccctcggtgatagaggaaacatggccgagtatacgcggctgcacaacgccttggcgctaatccgcctccgaaacccgccggtcaacgcgatcaggtaacgggctcggtcgcctccagcccggggaccgtgcgggccttagccgccctctggctccggaggctttgactctcccccgtcggtttaaaccgagaa

SEQ ID NO: 31161 - DNA, 2300 bp, Homo sapien
taggcagttgttcagataggtggtactggacaatgacgtttttgtttagccagaaggaagcaaggaaaagagtcccttaacacctgccatctagtggtcacagtgataagtaacatgcatgttttctactaaacagattaatacatggtttgttctatggaacaaacaggaaattaaggccagaggggtaaagtgatttaaggtcatatggctagttaatagcagggcttggcatagaacccaaacaagttgactttaagacctgcgtaaattgtgattgtttgaaacgtaaatatgtcattcaaatgattttaaatttgattaaagtatcatcctgttttgtatttagttgtattaagttatagtatattagtatcaaaggagaaaaagtgccattggttgaatgagggaacaagatgggcctatgagataatattaacattgaattattttccattacatggtcccactaccaacatttccataataataataataataatgcctatgctagctctgtcatattcctaaacaaaggttgaatagttattaagagaaattgcttccaattaaactaaatgcaattatgccacatcattgaccgtacattcagagtctatgttaccttctggagtttgttggatctgttacttattcctgtccagccagttaaaattgaaggtagagctcacaggagctgatactttactctttatttctgggtaaatataagaagtttgccaggggaacggaaatactgtgtttcaaatgaatgcaatggccacaccaaacattcagatgttcatcacaattaggcggcatctaggttacattgcccttgtctctccaggactgggattttcctaatccttttcacttgagagggaaggatttaaaagtgaatctacccttaccttattaacattttgaggcagattttgggaatgggagaggtggcaagcattttgagactctacttttggtgctagcattgaaactcattgtgtgacatttagacgcttctttggatccaattttccttacctgtaacagcaagaggttgactaagtgattgcctctaaaagttcctttcagttctgtcattctgcgaaatttttgggcaaagataaatcttcagctcagctggtcccttctgctttttcctgggttgacttccttcctcccactatcatttattgagtatctccacgttcttgagggtagggcctgggttttattcaactttcccccattaactagcacaataactaagcaggttatttccagcagggttaaagttgttttctatataagattccaactttgtctggaggggctcacagttccgaagagggtgccaggcatcatcaattaattaaaagccgagtatccataaacataaaaaaaagtaggggggacataaagggtagcaggaaatctggttccagttgtccttaagcacaggtatgttccaacagggaataagagtgcatagtagtgcaaaaagtaatggttaacactcatcgaatgctttcaatatgccagtgctttccacgtattatctcaagtaatacaatcgtcctattttctaggtactagtattatgtttcacacttgaagtgggcacagagaggttaagtatcatgcccaggtaacactgttagaagtgagaggcagcacttgaaaccagatagcacaacctcactgcctgcactcttagcactccactaggtagataaataagaaaaatcatagtaacaatcatgatttctccaagaggccaggtgaatttgaccagtgatgagtccaagctacagaaggagcagagggaagtggctgccgaaaagaaggctaaagaagtttgcaaaaagataacatgcacttttccaggctagatacacaggcggagaagcaaaccggcgaaataaaatccgacaagcaagatctggagcgcatcaggatgccaggtgaactcaaagacaggtcggaagtgacgtcactagccgagtcgggcgctcagcgggactgcgggtccggtggaattccggccggacgtggcgcacaggaagttacgcacgggaggcggtacctggttgtggagggtgacgccatgggtggggcggagcgtctgggatgcgctgggagcctaggatccccgacaggtaacctgcgggcggatctgaacggggggcgagggtggcagctggagttgatggcctagatcgctcggggccctaagcgcgggtggacacaggttaggtaatggacagcattaggtggcggctgaagaaaaggctcct

SEQ ID NO: 31162 - DNA, 2300 bp, Homo sapien
tcccgagtagctgggattacagatgtgtgccaccatgcccagctaatttttgtatttttagtagagatggggtttcaccatgttggccaggcttgtctcaaactcctgacctcagattttatatgtatatgtgtatgtgtatatatatatatgtgtgtgtgtgtgtgtgtgtgtgtatacacacatatatacatatacatatatacagattttatatgtgtgtgtatatattatatatatatatacacacacacacaaattgatgtttcttggctattttattgacatagtccacaaaaagtttgcctctttccattagttagtctgtattgttttggaagaaaaaaatgttttccataaatctgattcttttaatgtatcctgattggctttggttgttgttaaatagagatgtatattcttcagctttccatttgttcgttttttgttttttttttttcttttttctttgagacggagtcttgctctgtcacccaggctggagtgcagtggcaagatctcggctcactgcaagctccgcctcccgggttcacgccattctcctgcctcagcctcccgagtagctggggctacaggcgcccaccatcacgcccggctaattttgtttttgtatttttagtagagacggggtttcaccatgttagccaggatggtctcgatccctgacctcgtgatccgcccaccttggcctcccaaagtgttgggattacaggcatgagccaccgtgccttgcatgttcgttcttaaataatgtggtacactgaggcctactgggcgtgtaccaatgccgtatttgccttgagcactcccatgttacatgtgtaaacttctttggtctatcttttttgtagtgatattccacaataagctcctttagagaagtttgttaactatgttgtttgccaacgatattctattgcttcaatatagacagtacactgaatatctttgctgtgtgtaaaattatcctgaaaagttttccttttccaaatgagctaagaagtgtgcaatacttactagtggtcaggtttagaccctccagaaccacttagaaacaggccaccactttccttctctcacagttgtataaataatctgattgagaaatagagcagatctctgttcagaatgttcttggtcactggacacctcataactgaggctttatattaaccacgatcgttctagtttcaaggattgaggccatttcccaagttcagaaaaatcatgatcagtatttgtcaagtattagtcattgtgaagtgtagtgatggggagtagggacaataaatatattcatctccaattttgtataactgaaaagtgtaaaaataaagaagaaagagatgcctcttgagtgaatttaatacagctgtttttgctgttaataataaaacatcttactgaaaccaaaatttgttcaaagtttcattaagtgcccttttggagctgtgtcttaatcgactgccagaagttgaataaaccaatgaggaaacactgtaccctacttaaaagtagcagtaaatttttcttccatatccacttttgatacatcatgaaggtcagcaagatgttactgctgtgcaaaacagctacattcgtgtaatattattttccatatgtctgttttcttagttactagattattgttcccatgcgttcttcccgacaattttgcttttacaagtcccgacaattttgcttttacaagtcgtggtgagcagggcatacatgtccactagtctgctagttttagaaatggttttcctgactttgatttgttttgatcgcatcaggcatattgctgaacagtaagaaaagggttgaagaaaagagttctaatgaataaaagatgggatttcttctatatgcatttttgttatccttgattccacagaaattctattttgattccttcattcaataacaataataatgtttttatgactatcacagcttgaaacacacacacacacacacacacacacgcacacacacacacacacacacacactcaagctgccagtctgtcttaaggcagtggcagatgcctgattggcgggctctgtttattctgtgaccagattccttctaaaagaaggaaggccatgtctgcctgaagcctattggctgggcctactctggacccgcccctcttttttttttcatgacacacaccacagcgaagtctgtgcggaatcctaaaccagcccaatttacatccattcatgaatctgtgacgtcagcaagcctttgggctcctttgcggtgggctggag

SEQ ID NO: 31163 - DNA, 2300 bp, Homo sapien
acccaaatagtataaaacacccaggtgatcacccagcttcaacaactatcagctcatggacaatcttgttctacctacatgcttactcactaaacccccataccattattttgacacaaatctcagacattgaataatttcatttgtaaataatttttggttctacatgctataacaattctgtgaaaaaaattttaaataaataaatactttggtatcttaaaaagttaaagtatatcctctttttgtccttaaaaaggagtgatacatagcatactctaacactgcaacttgtttgttttatttgtatcttagccatctatctggtgaccacactgtatcaggatatgtagaattgctttcctcttttaggaggctacctagtattccatttgtgaatagttaacctagccagtcaccagctgatgggcatttaggttgttcccaatctcctaacataaaaacaaagctgagagaatacccttaaatatacatctttgctacctatggggattcttggatgtggaattaaattccagtacattcttggatgtaggttacattcttggacgtagaattgctgagatcttgtgcacatggattctgaaaggtgctccctatttggcccaacaggtgctttaaatgataggacaaggatgctttctctctgttgtccaggcttttgacactttggagttctctttctgtcccttccttcgtttactcagtgacatatcataccaatccaactacccccagcctcctccctccatgtccactgctgtggtcctgggtcaggcctgagtgctttctttctttcttttttgagacaaaatttcgctcttgtcgccaaggctggagtgcagtggtgcaatgtcgggaaagtaactgcaacctctgccttccaggttcaagcgattctcgtgcctcagcctcccgagtagctgggattacaggcacatgccatcatgctcggctaattattgtatttttagtacagacggggtttcaccatgttggacaggctggtctcgaactcctgacatcaagtgatccgcccgcctgggcctcccaaaatcctcggattacaggcgtgagccaccatgcccagccaggccggcgtactttcttatcaggacagttgtggctatcaagtcagcacgtattctaatcatctgccaaagcgaacatcctaaaacaggaacgaaatcattctcttacttaaacacctctgttggtgtctcatctacattattaaaaatctaactccttagcctgccttcagtgcactcttgtttgtccccagattctcacttatttctcatataccttaggcttcactgaaactggattctggtgccttacctgggaccgtgttcacccattcccttctttttctgcttgaagaaaagtgttgctcatccttgaaggtaaacttaaactccatgtcctccataaagccacacagtgttaagggccactggttttggactcaggttgacttggattcttatactgtctctcttttggggggatgtcatttaattcttctgaaactcagagttttcatctgttagagaaagacaaaaatacctaccttggaggatgattgtgaggctcagggatgcgggaatatagtaggagctgaattaaaagcaattctgattatttccgtggtcactattgccgccccaccgcacttgattgcagcccctggtgctacaccagctacatttgctttatgtgacagcaggttgtggacaagactgccttgatctctagactgcaagctcgctgtgggccgggctcacgattcacccccggatctcccagccctggcaccaagccggcactgggggcgcgccatgcctgcagaataagtggggaaagcgacagggataaacgtagaaaaacaagcacagacagacggagagagggcagactgggaggcaggtttttcccggagtctccaccgaaggacagagagggcggagtcagaatcgggggcgggggcctggctcaggaggtggggcctggttcggaggcgggtctcggcgcggacccctccctggtccgtcagtgaacgtgctccgcgggctcagtccgcccgccgctgcgtcccggagtgcaagtgagcttctcggctgccccgcgggccggggtgcggagccgacatgcgcccgcttctcggcctccttctggtcttcgccggctgcaccttcgccttgtacttgctgtcgacgcgactgccccgcgggcggagactgggctccaccgaggaggctggaggcaggtgcgtg

SEQ ID NO: 31164 - DNA, 2300 bp, Homo sapien
gggcaacagagcaagactccatatcaaataaataagtaaataaaatggcaaggttttagtcctaaataagtctctttaacttcatgaaagcagaaatcctacagacggtgttttctgggaacaaatttcactaattgttaagtaacgataaaaaccatgaatttaagtgtaaccaacaagtaacatctagccacgtgtaaatttcctttaagttcatttaatttttatttatttatttatttacatatttatttatttgggggggttggttttgtgctgattctattatgaaacttcactcactcctgagtaccagagcctttttgaaaagtttcaataaatgcataactgaacagactcaggttattaaagatgggcaaggaccccaagatgaaggctactctgaggcttagaatgaagaatacttcctggatgtgcaaatgaagattcattgagaacagggacccagagcaaatgcttcctgaattcctattggaggaagtcagacagatgtttcccagggcactcttgtcttctgttggcccactgcatgttaacagccttccctttctgctcttgtccaccaagaatggccatcggtagtgccttgcctcttctgagtatcttacagaagatactcatcatctcccacttggagctggggatgacttgctgttccacatgttattgagtcctctaccatgtgctgggcactgtgagggatatacaagtaatgagctgccatttcaaagagattgtgttctagcaggatagacacatatgtacatagatatctataatgtgtgcctgaaagtgggttttcattgtgtcgtcaacaaggtgcataaagggagttttgggagttccagggtaaaggatagtacttatagctgggagggtcagagaaggcttcattaaggtggcttttgagttaaatcttgaaggaggataagatttggaagaatggctttctgctgaagcaagaggtcactacttacaagctctggatcaaatatgattttgttggccgggcacggtggctcatgcctgtaatcccagcaccttgggaggccgaggtgggcagatcaccctaggtcaggagttcgagaccagcctggccaacatggtgaaaccccatctcttctaaaaatacaaaaattagcccggtgttgtggtggatgcctgtaatcccagttacttgggaggctgaggcatgagaatcacttgaacccgggaggcggaggttgcagtgagctgagattgcaccactgcactccggcctgggcgacagagtgagactctgtctccaaaacaaaaacaaaaacaaaaaaacaaatatgatttggcagccaggtgtggtgggctcaggcctgtaatcctaccactttgggaggccaaggtgagtggatcacttgaggtcaaaagagtttgagatcagcctggccaacatggtgaaaacccatctctatcaaaaaatacacaaattagcgggcatgatggcatgcacctgtagtcccagctactcaaggaggctgaggagggagaattgcttgagcctgggaggtggaagttatagtgagctgatattgcgccactgcactccagcttgggtgagagtgaaaccctgtctcaaagtatgtatatatgattttgcaacttcattcaactggatccagcccttagccaggtcctatcaggaacataagaagaactcctacaaatatagaacagcactcttgcttgatgcccagctaaggaaagacctgtcgtgatgccatctaatttttattttcagacgcagaagaaacatgtccttcattcaccaggctgagctttcacagtgcagtggttggtacgggactaaatgtgaggctgatgctctacacaaggaaaaacctgacctgcgcacaaaccatcaactcctcagcttttgggaacttgaatgtgaccaagaaaaccaccttcattgtccatggattcaggccaacaggctcccctcctgtttggatggatgacttagtaaagggtttgctctctgttgaagacatgaacgtagttgttgttgattggaatcgaggagctacaactttaatatatacccatgcctctagtaagaccagaaaagtagccatggtcttgaaggaatttattgaccagatgttggtaagagaattctcttagatgattcagagctaagttgaaactggcccattatctgagggcttaaagccaagagatagctacagtgagcaggaggcctatattgcaacattttgcaaatgtgaataagccccagggaa

SEQ ID NO: 31165 - DNA, 2300 bp, Homo sapien
gtggagcctgcagtgagccgagatcgcgccactgcattccagcgtgtgcgacagtgagactccgtctcacaaaaaaaaaaaaaaaaaaaaaaaaaaaaaagaacttaaatgttttgcctaagtctacacaactaagctagtggaagacaagggatttgaactcaggttagtataataagtcagccctaggcagtcttggtattcattaggtctgatgtgtgacacagaaatctgcacacagtacttttaaaagcccccaggtgattctgacttactgacttcttgggaagcattgctagaatctacttcctgcaaaggaatctcctgctactcaaatggggtgggaacatgaagagaactaatagataaacttatatgagcggtactattacttcacaaacccatacttcaggtagacaatgctaaatgactaattgcttttgcctgatgctttggatgaaatgttttcttaagttgcgtctttattatttatttatttatttatttagagacggggtctcactctgtcacccaggctggagtgcagtggtatgattttggctcatggcaacttcctgcttcctgggctcaggtgatcctcccacttcagcctccttagtagctgggaccacaggtgcactaaagaatgtctgtattttttttcagagatgggtttttgccatgttgcccaagctggactggaactcctgggctcaagcgatccacccccttcagcctcccaaagtgctgagattacaggcatgagccaccgcgcccagcatattaatgttttttattattttttatttatttattttttttgagacggagtctcgctcggttgcacaggctggagtgcagtggagcgatcttggctcactgcaagctccgcctcccaggttcacgccattctcccgcttcagcctcccgagtagctggcaggcgcccgccaccacgcccggctaattgtatttttagtagagagggggtttcaccgtgttagccaggatggtctcgatctcctgacctcgtgatccgcccgcctcggcctcccaaagtgctgggattacaggtttgagccaccgcgcccggcttattaattgatttttaagctcatcagaccactagaagcctgagttagtgttgcaagcactctcgccagaaagggaattaaattaccttggagctatgaagcacaagtttagttacctctatccctgagatacatagattctggcatggggttctatttgaaagtttttcatttatttttcctttttatttatgtatttattgtttgagacagtcactctgtcgcccaggctgaagtgcagtgatgtgacctggactcattgcaacctctgcctcccgggttcaagcaattcttgtgcctcagcctcctgaggtagctgggattacaggtgcgtgtcaccacacccggctaatttttgtaattttagtagagacggtttcgccatgttggccaggctggtctcaaactcctgacctcaagcagtccacccgcctcagcctcccaaagtgttgggattacaggcgtgagccaccgtgccggcctgtttttcttttttaaaaaagacctattagagctgtagaaattctcggtaggaagaaatacaaataaagatatataataccaaaaaaagtttcttttaatctgaagcatacatatattttggcaaatgtagatgtataattggacctaatgaaatgttcttaaaatctaaagactgccctatgatgaatgagtgtatgaattaacataaaaactggttttgtatatacaggccaacagatacaaactggatttgttatttcattcacaagaaccaaggggaaaagatctcaagtcacacttggtttcaacacaccaagccaaacaactaataaaccgcccacgaagaatgaaactattctgaactcgtcattctgcagatgcagattataatattaagatatgcacaaaattgtataaagtagacaatgagtgaccttttattgaaaagaggaggagtcaaagatcctgaaagggttgggactgcctgcagtcagtccctagggaacttcctgttgtcaccacacctctgagtcgtctgagctcactgtgagcaaaatcccacagtggaaactcttaagcctctgcgaagtaaatcattcttgtgaatgtgacacacgatctctccagtttccatatgttgagattctacttattcatcagtttgttgtgcttgtcaagatcaggtaggttatttacaaactggttttcttaactgcttaaaaaa

SEQ ID NO: 31166 - DNA, 2300 bp, Homo sapien
aagtcagtatggatatccaggaatgcccccagcaccacagggcagggcgccataccctcagccgcccactaggagacttaatcctacggcaccacctagtagacagggtagtgaattacatgaaattattgataaatcaagaaaggaaggagatactgaggcatggcaattcccagtaacgttagaaccgatgccacctggagaaggagcccaagagggagagcctctcacagttgaggccagatacaagtctttttcgataaaaatgctaaaagatatgaaagagggagtaaaacagtatggacccaactccccttatatgaggacattattagattccattgctcatggacatagactcattccttatgattgggagattctggcaaaatcgtctctctcaccctctcaatttttacaatttaagacttggtggattgatggggtacaagaacaggtccgaagaaatagggctgccaatcctccagttaacatagatgcagatcaactattaggaataggtcaaaattggagtactattagtcaacaagcattaatgcaaaatgaggccattgagcaagttagagctatctgccttagagcctgggaaaaaatccaagacccaggaagtacctgcccctcatttaatacagtaagacaaggttcgaaagagccctaccctgattttgtggcaaggctccaagatgttgctcaaaagtcaattgccgatgaaaaagcccgtaaggtcatagtggagttgatggcatatgaaaacgccaatcctgagtgtcaatcagccattaagccattaaaaggaaaggttcctgcaggatcagatgtaatctcagaatatgtaaaagcctgtgatggaatcggaggagctatgcataaagctatgcttatggctcaagcaataacaggagttgttttaggaggacaagttagaacatttggaggaaaatgttataattgtggtcaaattggtcacttaaaaaagaattgcccagtcttaaataaacagaatataactattcaagctactaccacaacaggtagagagccacctgacttatgtccaagatgtaaaaaaggaaaacattgggctagtcaatgtcgttctaaatttgataaaaatgggcaaccattgtcgggaaacgagcaaaggggccagcctcaggccccacaacaaactggggcattcccaattcagccatttgttcctcagggttttcagggacaaaaaccccccctccctgtcccaagtgtttcagggaataagccagttaccacaatacaacaattgtcccccgccacaagcggcagtgcagcagtagatttatgtactatacaagcagtctctctgcttccaggggagcccccacaaaaaatccccacaggggtatatggccccctgcctgaggggactgtaggactaatcttgggaaaatcaagtctaaatctaaaaggagttcaaattcatactggtgtggttgattcagactataaaggcgaaattcagttggttattagctcttcaattccttggagtgccagtccaggagacaggattgctcaattattactcctgccatatattaagggtggaaatagtgagataaaaagaacaggagggtttggaagcactgatccaacaggaaaggctgcatattgggcaagtcaggtctcagagaacagacctgtgtgtaaggccattattcaaggaaaacagtttgaagggttagtagacactggagcagatgtctctatcattgctttaaatcagtggccaaaaaattggcctaaacaaaaggctgttacaggacttgtcggcataggcacagcctcagaagtgtatcaaagtacggagattttatattgcttagggccagataatcaagaaagtactgttcagccaatgattacttcaattcctcttaatctgtggggtcgagatttattacaacaatggggtgcggaaatcatgcccgctccattatatagccccacgagtcaaaaaatcatgaccaagatgggatatataccaggaaagggactagggaaaaatgaagatggcattaaagttccagttgaggctaaaataaatcaagaaagagaaggaatagggtatcctttttaggggcggccactgtagagcctcctaaacccataccattaacttggaaaacagaaaaaccggtgtgggtaaatcagtggccgctaccaaaacaaaaactggaggctttacatttattagcaaatgaacagttagaaaagggtcatattgagccttcattctcgcc

SEQ ID NO: 31167 - DNA, 2300 bp, Homo sapien
agggatggccttgaggtgaagggaattcctttgcgagacaataggccagggactatagatgctacataatctaatagccacttctaagtcttctcagctttgtaatgccccaaactttcagcaacagcctggttggtgtttgctatgcttaggggaataagggaggcgggtgtgtccacacttaggatttgcttccatcctctaggatatgaccccagcccccgaggccagagtggtggtagcttcaggtgtgtggctggtgattctgaagctctagggggtggcttgcagcacaattctggaatgctacatatatatatatatatatatatatatatatatatatatatatatacacacatacacacacacacacacacatacacacacacatgtatttattttatttatttattttttgagacagagtcttgctctgttgcctaggctggagtgcagtggtgcaatctccgcttactgcaacctccacctcccaggttcaagcgattctcctgcctcagccttccaagtagctgggattacaggagtgtactaccatgcctggctaatttttgtatttttttttttagtagagatggggttgtctcaccatgttggccaggctggtcttgaactcctgtcctcaagtgatccgcctgccttggcatcccaaaatgctgggattacaggcgtgtgccaccacacccggcctggaatgctgtctattgaggaaaggaagaggctgtactggggagtgccagcgttgaagttcaagcaagtgtaaaactctggccttaactgaatcacaagtaggaaacaagttaatcaggaatggatttgtggggcatgaaaacctttgaggattcttaggattgtttggaagaggggactggattttctatcactaaatagggtgggatttgttttacagttgataattttttgatggggtgcgtcagggtcccactctgtcaccctggctggagtgcagtggcgtgatcacgactcactgcagtctcaacctcctgggctcaagtgatcgtctcacctcagcctaccaagtagttgggactacaggtgcgtgccaccacacccggctaatttttgtattttttgtaaagatggggttttactatgttgcacagactggtctcaaactcctgggctcaagctatctgcccacctcagcctcccaaagtgctgggattaaaggcaggagccaccgcgcccggcctatagttgacaattaactagaagtgtgacattggaattatagagggagagtaacgagactcattacttactagcccagggtaggagacattagtgggccgcaggtttcatccttaaatttctgtgaagcctttcttgaggacatctgccctttccttctctccctcagtgtgtggttttcctttctctggctcccactgcactctgcacatacctttatcacagcaaccacttacggtgtattgtaatttgtaattatctatgtacatgtctccaagtagactgacctcaagggcgagggactggcgctggtactcagaccccgggttcaagttccagccacgtctctagctagttttgtgatcttagacaaataacttaatcgctctatgcctcaatttccttgacttataaaactggcttaagactctctgtcacacgccattgctgggcatattaaggtgacaatgcgtgaaaagtacgaggcaaaaggtaagtgcaaaataaagggcgcctaaaacggtaaacgtgtgttaattaacctgatctacctttacatgtgcattcagcaaacactgagcacctaatgtcctctgggaccccggaacgcctcctccggagtggagcagcctcacatgtggcctgtgggccttgtcccacgggccggctccggattggctccgccgaagagaaaaccctgccgacagcccttccgatctcgtcagcgattgggccgggaccgtcccacaattactcttgttgctgggctcggaaatagggagcggtgctaggttgcgcgtgcgcagattgagaatggagctttccggtcgggcgggaggaggtgacgtcaggagtggtggcgggcgggggcctctggtagccctggggacgctgtatctgtgggctcttgaatcgcgtcacaaatcagcgaccgaactctggcggtggtggttaagacggcgaaggcggcagcggcggcgacagctctggggtttgcgtctcggggtgtgtcggccgccgctgctgcttgggcctggtatgtacagatggctggttaggattctcgg

SEQ ID NO: 31168 - DNA, 2300 bp, Homo sapien
ttgcagatatctgttattgatttctagtttaattctattatggttagagaatatgctttgtatgatttcgtttcttttaagttttttaatgtttgttttctggcctagagtatggtccagttggatgatgttccatgtacacttgaaaagaatgcatattctgctgttgttgggtagaatgacctaaatgtcaggtcaggttggttgataatattttacaggtgttagtgatttttctgtcaacttctttattgattgatgagtcaggaattgagttttctaccacaattgtggatttctctatttctccttcagctttgctagtctttgctccatgtttttttgtctccatatattttgaagctctattaggcaaataacctgacctagattcaccagttgtcattctgttacatttgctttctcattctctcatatatacatattgttttgaaccatttaagagtctttgattcatgtccctttaatcctaaatacttgagtctgtttattttttttcttttcttttttttttgagatggagccttgctctgtctcccaggctggagtgcagtgccgcaatctcggctccctgcaacctccgcctcctgggttcgagcaattctcctgcctcagtctctcgagtagctgggactacaggcatgcaccaccacgcccagctaatttttgtatttttggtagagttggggttccaccatgttggccaggctggtcttgaactcctgacctcgtgatccacccgcctcagcctcccaaagtactgggattacaggcgtgagccaccgcgcctggccgaatctgtttatttcttaagaataagggcattcaagactgggcgtggtggctcacgcctgtatcccagcactttgggaggctgaagcgcgtggatcacctgaggtcaggagtttgagaccagcctggccaacatggtgaaaccccatctctacttaaaatacaaaaaattagccgggcgtggtggcaggcgcctgtaaccccagctacacgggaggctgaggcaggagaattgcttgaacctgggaggtggaggttgcagtgagccgagatcgtgccattgcactcctgcctggaggacaagagtgaaacttcgtcgaaaaaaaaaagaataagggcattcacttacatgatcatggattaccaacatcaggaaattaacactgatataatactattatgtaatctacaggtcttatttaaatttttctcttatagctttttctttttcctaatacaggatccagtgcaggattgtgtattgcacatagttttcatgtctctttgatctactttattctgcaacaactccttgccctttctttgtgttcattggcattaatattgtaattttgtctgatatttactgatgatttgtttcagattatgcctttttttttttttttgaaacaccacataagtgatattcatttcaaaagcatcacccaaggaaggaggggcatgatgtcagtttgttgcattgttggtaatggcaggaaaggcagatttgtcaccagcagctgtgactgggtgggaattccaggcttcagttcctttagtgtttattaatttagcattcagcagatatttattgagggccttttggcttagaccctgtactaagataacagtggtgaaaggatgtaatctcttttcatggaatttaaagtttagtgtggaatatagacattaaacaaataatcataccagtaatgaatttcagtggttccaggtgactaaaggaaaaatgcagtatcagaaggggtatatgcaataggagagctaaatctagagttggggttggaaatgggcatgaagaggaaggcagagactctctttgtgtggcagctctagtttagaaacagacattccatagtggaatgctgcggtgccctgtgctctagggatagatctaacttttgcataattgtacttgtctgacttgccaggagtaagcttgacctaaagcaacttaatcacaggatggtctgggagcttagattccagcaatttaagcagcttggtgatactttttttctttttttttctgttgctcagttttactttgaactcagaaggctgtaatagaagaccaggtggccgtcgccatagcaaaggtaatccagagagttctttaatgtggaaacctcaggaacaggctgtaacagagatgatttctgaagagagtggcaagggtctgaggcgtccccattgtactgtggaggaggtaagccttttcagcttgatttctttaaaaaaaattttac

SEQ ID NO: 31169 - DNA, 2300 bp, Homo sapien
aagggggaaaattagggcagagataactttaaatatgcaaatttgatttataaccaattttgggagactagacttttgcacaaataattgttccagtggtgctgatagaaatccaagatttctgacctgtatctttcctgaactatgcaaatcctattcctatccctgcacacccacagcttctaggctagtgacatgtgcaccgcagtctctcagtgaacctgatgaatgaatgaacatgacagggttaacatctctggtgcttaaacacagaattccttccagcggctgattcacactatcttctgagttctgtgtcctacaaagacaatgaacagcatctgtctcggttcctgagttttcatcacttcctgagttttcatcgcttcctctcaagacagcaccattagctgagcaggctccagcaggacccaccagcagagaggtgcacatgggagtcaatacctgaagtgaataacggtgaacgacctacctggctcagcaggtggccacaggcagtccccgctaccacagcttcaaattccttttcctacctctttttccttccctggacgcagcccaggagtgcctcctactttcaggacctttccttgcctagagccttgtccttagcagcatgattgagagaaggaagagagctgagtaggtgccctctcctttgctgttcacagggtcccagtcaccatggtagataagctcctgccctctcctctcacttggctttcatcaagccccaggattatgagaaagtactccacaaactgcaaactctacaaacaccaaactcccctttcccagctttggtcctgatgtgctcaggagagttggtgcctggttttcccatgaaatgtgaatgaatctggcaactaattagaaggcatgacctggagccagcactgaatcaggagagaaactattaaagttatacagagtcacctgtagattcagctaaagacctagttcaggatggtttcagaagctgagaagtgcaactgtcaaaccaacagattatgcttattttttatttaatagcaccctgattaccatacttactaagaataccttttttccttggtgtgaaatgtaaaatttgcaataatcaatcataaatacttatgaaaatgcaaacatttttatttactagtgtctataagcaaagaaaaagccttgatttcctagggaacaatgacgtaagaaaaaatacaaattttaaatatattccctagattttctaacaccataattctccccactcctaataaaacattttattgttaccaaaggctgccattattccaacacaatagagaagcagagtgagagatatgccaagtgggaactggagatacgaatttgaatcccagctctaccacgatgctgagtcagtcattcaacctctctaatgcctcagccatgagacagagaagattctttctaaatctatgatttacctcattttgacagcaaaacagaactgttgcaaggagaaggtaaggagcagaaagaagaggtatcccacatggaccttaggctacaaatagatgctgaattttggaaaaaaaaaaacaataatctcaacaaatcttgaattttgtttgggtcacaatttttaacatcccaataaataagttaggtgacaaactccactgtattttataattggatggcttacaaatcaaaaaacaatgggtttgtgactctacttgtgtcatgaccctacagcctccatttacccatttcttccctctcctaaaacaggaagctttacgcttacactttcattactgccaggatactcttgtacaatatctggtgtccagattttgaaagtataaggttatttcatgaaatttactatgaacagaatagagggtgttgcatagcctgccctacagatatgtatgtgtgtgtgtgtgtgtgtgtgtgtgtgcaagagacatatatgtgtgtgtgtgtgtcttggtgtaatactgtgaatgagaagaccagaactgcacccaaggaactgtaccactgtcataaaccaccaggtcaaagttcacattttcactgcatagaaacagaactctggcccataactcagatgttggttaattagtaatatagggatactccacttgttattgcgactttgatctaaacagctctgtaaagcccattttcacatttttaaaataatatgctttagcagcaggtgaggaaaacttaaggcatggcacatttattggaaaagcagcagtgggcggcttggtttaatggcaacaccactagataactgt

SEQ ID NO: 31170 - DNA, 2300 bp, Homo sapien
gatggagtgttgctcttgctgcccaggctggagtgtaatggtgcgatctcgactcaccacaactgcgcccggcccctttgggagccaccgcgcccggcccccaaagcctatttaaagctactaacatgatatcaccaaaacggaaattggaaaggatgcacacaattggctctggtgagccaggggagccctctagcacagcactggaaatgaagcttgttgcttgtagcagctcttaactggatgttggtctgttgtgatatctaaggacactgacaggccactacgaaggcatgctgctgaacccactccactcacccagttattcagaggcagatcttacagctgacattcttcaaagaagaacctcagcttcaggctttggaagaaactcattttgcagattaggaaactgaggtccagagctgttctccttgagctgcatgtgagggctggtgtcattatgctttacataatcagtaagaaattctgaaaccagacagtaactgctgtgtgagaaggtagtcgaaaacagtcaactccattacagtgcagcagacacagggaaacgtccttcaagggtaatgtggtcaaaggaaagacagaaaagacatctggatgcctacaagttgtgtgtgcacacgcttgcacacatgtgagtgggcagatgtcaggaagcactcataaatgccacctcctgtgtactgtcaatagagtaagaagccccaggcgtcttaattaaaggaacaaaaaattagtgtgtggattttaaccaattaatgaatgacacacatgaaggagaggctcatactcttcttcttctttttttgtttttgtttattattattattatttgttttttgtgagatggtgtctcgatctgtcacccaggctggagtgcagtggtgcaatctcagctcactgcaacctctgcctcaaacaattctcgtgcctcagcctcccgagtagctgagattacaggtacccaccacaatgcccagctaatttttgtatttctagtagagacggggttttaccatgttggccaggctgctctcgaactcctgacctcaagtgatccgcccgcctcggcctcccaaagtgctgggattacaggcatagccactgcaccaggcccactcttctttcaagcagttttttttcttttctctttttaatggttaaaacttttaattttgctacctcctcatctcagcaagtgaattatgtatttaattggaaatcaagtctttgtctaaaaactgtactttcatgctggtttcctccagactaataaaacactgtttatcagtctaagcctcaagtaggtctctcatgtacctgtcttcctcttctctgtctaccacctccctcactctcatctgaaaagtcatgaaccagcccacctagtgagttcctttgacatcagggctaacacggcctgggtaaacttcagcaatgttggctttcttcctggctttttctgcttgaaaagaagtctctttcagcaagtcagggcagtgttttctgtttatgaggtgcttttcttctgggtggcagatatgtcttctatttaccaaccattcacttatcactaaccagcatccttggcagttcttagaaactttcaggtggcaagtacttgtttttttttttaattttattgatataagatcacgggatcttcctgccttagtcgcctaagtagcatgcaccaaccacatctgattttttttttcttttttttttttgtagagagagtgtctcactatgttgcccaggctggtctcaaattcctggcctcaagcaatcttcccacttcagcctcccaaagtgctgggactacaggcacatgccaccatgcccagccgcaagtgtttatccccattccatagggggtgaaactgaggcacaaaaagaggaaatcaccatcaggatatgccactgcagagagatataagatgagagtaattcagcttcatgggttattttcaaaaagtaaggaagaaactgcaacaagaactgaatcacgctttactacagcattgccttctacttcctccaccagccaactgggagatgaacttttatgaggagcagtattgatggatttaagttttcaattttatgtcattttgtgctttctggaggcggtacagtgagcttggaagtaagtgatatggtgggaaggtgggaaggtggaaacagggaaggtaaaatgagaggcttgtaggatccagacctgggataatcaaactaagaaaaatcaatctggtggaggttacacagagactctggga

SEQ ID NO: 31171 - DNA, 2300 bp, Homo sapien
ttcattactttctcctctggatacctaattagttaagaagatctccttctgtagaataaagtattttaaaagttcatgaattcctgggggaaagaagagaaacaggcattaagtgtctgaccacccatgtctcaacacgctaggcagttatccttcttgtagccctcacaacagccctgcgaggactggttattttatctccttatagatgaagaaacttaggctcgagaatgctggaacatctcagggcacaaagatgggggcagagagaaggtctgagtccggggcagataggccttccactccaacagtgtttaccagaccagaatcacctgggagtacttgcggaaaatacaaaatccagcaagccccattctctccacgccgctcatcaacaggaaagcttgggaaagacaatactacttcacgacccagtcaggagacccgaacttgttccattcctacattcgtgacttctccacccaaggacactccccgcacccgcgccccaacgccttcacaaaacccaacatatccgcgatcaaaccttcaactctcccagtggcccccagaggtccagagcttggaatcttcttctgcctcctcacctctgaatcccgccattcttctccctcctgtagaatttcatttcctggctgggaccaggctctaaccatcaggcttccagccgggccccggaacttgcagcccgctctagcctgtctggctcctgcccgagcccctcggctccagcctgctctcatcccaaccctgcctcttccgtcggtcacgttgtttcctccgcttggaaggacctctttcctctccgggcccttcccagtgctcggggaactcctacacagcctgcgctcctccgcttccagccaccctcgcctcccaccaccctggctttggagctgaaccggccgcgcagccgggcggcgaccatccgtcccccggccgctgaccccagcgctccggcctcgccgcagtccctggcccctcggcgttcgtttccccacccgccacctggctttcgccgccgccgcccgggaagccctcggcacttcccagaatagagagcagctgccaacgtcaggctgccgcctgccgcggggttccggacacgcggggtctgggcggagaggacgtgactccgcgctggccttccgccttccctccccggtcgggaaactgaggcccgggaccgggaaccacttccccgcgagcacggtccgcgagggcccggccaaccccggtcctaggcgtcccgactcccgcgcgcgatccttcgaccacacgcgccgctcggtcacctcagagagcgtggcggggagcgggtctcagagcgagcgcacggcccgggaacgcgcagggcgccagccccggccaagtcgctgcgaaagttgttgtctcccagcctgccctcgcctctcacctccgggacacaccttcccgcttgccctggcagcagcgcactcacatccggtccaccttgcgcacacccctctccgcgctcactcgcagcccctctccctcccacgcccgcggctccccgtcgccccctcgcgcgctcccacccgcgcccggggcgcgccttccccgccccgccgctcgcccggcctcggcgccgcgcccgcccggggttccggcgcccggagccccagcccggggccgcgacccgcttccgcccgcctggcgcggggccggagcccgagcagccactgccgagcgcggtgggcgcgaggcgaggggcgcagcggcgcggggcggggagggggcgctcgctcgctccctctcggctgcgcacacgcccgtacaaactctcacacagacacacgcggggtgcgctgccgccgcccgccgctgctcctcctcccgccaccgccttgagagggagagagagggaggcagagagagcgctttgtccgcgcgccgccgcccggcccgggactctgccccgaggaggcagccgcgccgagtccccgcctccgcctctgcccccgggcgggccgggccggccgcggtggggggagccaggctgagggtgggggtgggtggcgggcgggcggagggcggggagggggggcggaggaggaggagagacgagggcagcggaggaggcgaggagcgccgggtaccgggccgggggagccgcgggctctcggggaagagacggatgatgaacaagctttacatcgggaacctgagccccgccgtcaccgccgacgacctccggcagctctttggggacaggaagctgcccctggcgggacaggtcctgctgaagtccggctacg

SEQ ID NO: 31172 - DNA, 2300 bp, Homo sapien
agccaagctagtaaaatgctgcgtgccttgatttgtaaaagataagtaatatgtctttaattggaagaaatactggaggagagcttgtggtttttagaacgcttcctagcaaagttgaaatgactaaataattagagaagaaaagtattgatcctactaaattggtaaccatgttagcatattcctggattgttccctcttttggagtttaactttagaacagagtaataaagaagacaatatttgttttcagtcataaccttaggaggtctttgtcttgcaggtctagatccagaagaagctcccgaaggcattatacccggtcacggtctcgctcccgctcccatagacgatcacgtagcaggtcttacagtcgagattatcgtagacggcacagccacagccattctcccatgtctactcgcaggcgtcatgttgggaatcgggtaagatgaaaaactggttttgaagcagtcaactgcctaaatttactttttcttaaagttagagctgattttgacaatagagctttagcagttggtgcgtgagtgaaatcttcagaggcttttttagtgttttgagagagtcttttaagttaatcttccatgacggggtctgcatttgggctgcctgtcaattaagcataatactgacacaatggtgtaactccttagcccatcaaaaaaaaaaacttccgactgcattactatactgtagtatagtattagtacattagttcaaaatatagttctatgctaacattaactctttccaggctgcataaacctagttagatgctctcctgactttcccatttaatttgaagctaatttcttttgggtgttgttaaggcattttttacatttcatgaaaggcttcaaatgagatgatatttattgtgatttcactgtataatccaagtggtttaggaggagggtgcagggggggacttaatgtttttagagtagagtagaatttttccctagtaaattgttagtttatgaaataaatggaatctttaggtaaattcatcacagcatctggaatgttagcaacatatggctcactctttattctttcctcttgtcatctttttttgagacagggcctcactctgtcgcccagtctggagtgcagtggtgcaatctcagcttactgcagcttctaccttgcaggcttaagcgatccgcccacctcagcctcctgagtagctaggactagaggcatgccaccacacccagtaatttgttatatttttgtagagacatggggtctcactgtgttgcccaggctagtctcaaaactcctgagcttcaagcagtccaccagccttggcctcccagagtgtttggattacaagcatgagccactgcgcctggccaactcttgtttcttacgattgcaagctgtttatgacctgtaaaatggtttggtacgcatcccctcaggcttcgtttatgtacttacttgtgtattgtgtttctgaaaaaatcgaaccatacatgctcatctttttggcaattcagagcattctattgaatggaaggtgtgtcaacattacaattttttctagctgatagacacagtgtggttccagttatccttgtatgtcatgttatgaatatgtgaatttttcttagaataaattcatagaaggaaagatgccaagttgcttttcgccagcacgagtgcttgtttacctacttaattctaaggttgaaattttttcttttgcattctttcctacccattcccaaaaatacttgtagtacttgctgtaattttgtaatttctaagcagtgtttggtctaatcattatgtacttttcttgttagtgacattttggctagtatacagctccctttttaaacaactttgattttatgacaacttttccaaagtttaaaacttttttttttccctaggcaaatcctgatcctaactgttgtcttggagtatttgggctgagcttgtacaccacagaaagagatctaagagaagtgttctctaaatatggtcccattgccgatgtgtctattgtatatgaccagcagtctaggcgttcaagaggatttgcctttgtatattttgaaaatgtagatgatgccaaggaagtaagtaaaagcccgttcctttgtaaaccatcagttctattgttaacgccaagttatcagtgaccaattgctaggataaggacaaggacaagtcagtaatacttcgaactttttctccaacctcttgtggagactcaagatacatgcagaataacaaaattttgtataacttggggaagttggtcc

SEQ ID NO: 31173 - DNA, 2300 bp, Homo sapien
ccgatctgaatctaggtaagaaagactgtcttgagatttcctcgttactcttagctctgaaattggtgcgtgttttgtaaaccaggaaggtagagagggttagattatttgttggcctattaaatattggtactagaagtgaacttaagttctgggaggcaagactaaaagcggttaagagcctgggcttttggagtcagggttttctatttttgctggtttgggcagattaacctttcagctttagcttctttataaaaggcaaattagtaatacagtaccagttcttcagggttgttgtgaggatttactaaatgtaagtaaactgcttactagtatggcaaatatactgcagaacattggctttcagtaattagaattcttgataaataagtatatatatggtgcgcttttttttttttaatgttggtcaaaagtaggctatatatacatcctggtttgcctggggcgataccatttatgcctgtggtcaggcataattaacagcaccccttttcttaaatgtgtgtcctcgtttcgatgacaatttagagtcactctagttagtcaagagccactcaattttttgtttttttaactgctggggaatactccttgtgattttgttactgtattaaattaatggtgggcataatgggagacagaaaagtagagaatggtcttctgagggggaaagatgggcacaagccaagctagtaaaatgctgcgtgccttgatttgtaaaagataagtaatatgtctttaattggaagaaatactggaggagagcttgtggtttttagaacgcttcctagcaaagttgaaatgactaaataattagagaagaaaagtattgatcctactaaattggtaaccatgttagcatattcctggattgttccctcttttggagtttaactttagaacagagtaataaagaagacaatatttgttttcagtcataaccttaggaggtctttgtcttgcaggtctagatccagaagaagctcccgaaggcattatacccggtcacggtctcgctcccgctcccatagacgatcacgtagcaggtcttacagtcgagattatcgtagacggcacagccacagccattctcccatgtctactcgcaggcgtcatgttgggaatcgggtaagatgaaaaactggttttgaagcagtcaactgcctaaatttactttttcttaaagttagagctgattttgacaatagagctttagcagttggtgcgtgagtgaaatcttcagaggcttttttagtgttttgagagagtcttttaagttaatcttccatgacggggtctgcatttgggctgcctgtcaattaagcataatactgacacaatggtgtaactccttagcccatcaaaaaaaaaaacttccgactgcattactatactgtagtatagtattagtacattagttcaaaatatagttctatgctaacattaactctttccaggctgcataaacctagttagatgctctcctgactttcccatttaatttgaagctaatttcttttgggtgttgttaaggcattttttacatttcatgaaaggcttcaaatgagatgatatttattgtgatttcactgtataatccaagtggtttaggaggagggtgcagggggggacttaatgtttttagagtagagtagaatttttccctagtaaattgttagtttatgaaataaatggaatctttaggtaaattcatcacagcatctggaatgttagcaacatatggctcactctttattctttcctcttgtcatctttttttgagacagggcctcactctgtcgcccagtctggagtgcagtggtgcaatctcagcttactgcagcttctaccttgcaggcttaagcgatccgcccacctcagcctcctgagtagctaggactagaggcatgccaccacacccagtaatttgttatatttttgtagagacatggggtctcactgtgttgcccaggctagtctcaaaactcctgagcttcaagcagtccaccagccttggcctcccagagtgtttggattacaagcatgagccactgcgcctggccaactcttgtttcttacgattgcaagctgtttatgacctgtaaaatggtttggtacgcatcccctcaggcttcgtttatgtacttacttgtgtattgtgtttctgaaaaaatcgaaccatacatgctcatctttttggcaattcagagcattctattgaatggaaggtgtgtcaacattacaattttttctagctgatagacacagtgtggttc

SEQ ID NO: 31174 - DNA, 2300 bp, Homo sapien
gttttttagggggcctcccaccatggttagatgcaatagggttttacagggtttagtgtccttcaagctagcctttgctttccactaggtttctgcttttctctaggatttgaaactgagatcatcatctttatctcttatcactgaattataagtagtaacttgaaaggtcaaggtctttttaaaaatcaagcatttttttaagtaaattatataaattatataggattttgttttattgattgcaacttgattgaaataggtataaagtataggtgtcatagttaataaggttccgcctcaccctagtctttatggagtaacattctgaaacacagtccttggacagttcccttaactgcttgactttggcacccctttctgaaggaagtggggtcaaataactcttatccctgctccaaaaaggtggaagaaaggacaagttaattgacttatgtcatttggagcaatgaaactattaacaccaggtatattcagttcctgcccttacctatattttcttatcttggaaggggattgctgtccctcaccatttatctcacagcagcttatttgtttttaaagttgcccagaaagtgtgcaaattaaacttttaacatctacgtgtaggaatcccgttctgcttccagaagtggaagtgctcacggatcggggaaatctgcaaggcatacccctgcaaggtctcgctccaaggaagattccaggcgttccagatcaaagtccaggtcccgatctgaatctaggtaagaaagactgtcttgagatttcctcgttactcttagctctgaaattggtgcgtgttttgtaaaccaggaaggtagagagggttagattatttgttggcctattaaatattggtactagaagtgaacttaagttctgggaggcaagactaaaagcggttaagagcctgggcttttggagtcagggttttctatttttgctggtttgggcagattaacctttcagctttagcttctttataaaaggcaaattagtaatacagtaccagttcttcagggttgttgtgaggatttactaaatgtaagtaaactgcttactagtatggcaaatatactgcagaacattggctttcagtaattagaattcttgataaataagtatatatatggtgcgcttttttttttttaatgttggtcaaaagtaggctatatatacatcctggtttgcctggggcgataccatttatgcctgtggtcaggcataattaacagcaccccttttcttaaatgtgtgtcctcgtttcgatgacaatttagagtcactctagttagtcaagagccactcaattttttgtttttttaactgctggggaatactccttgtgattttgttactgtattaaattaatggtgggcataatgggagacagaaaagtagagaatggtcttctgagggggaaagatgggcacaagccaagctagtaaaatgctgcgtgccttgatttgtaaaagataagtaatatgtctttaattggaagaaatactggaggagagcttgtggtttttagaacgcttcctagcaaagttgaaatgactaaataattagagaagaaaagtattgatcctactaaattggtaaccatgttagcatattcctggattgttccctcttttggagtttaactttagaacagagtaataaagaagacaatatttgttttcagtcataaccttaggaggtctttgtcttgcaggtctagatccagaagaagctcccgaaggcattatacccggtcacggtctcgctcccgctcccatagacgatcacgtagcaggtcttacagtcgagattatcgtagacggcacagccacagccattctcccatgtctactcgcaggcgtcatgttgggaatcgggtaagatgaaaaactggttttgaagcagtcaactgcctaaatttactttttcttaaagttagagctgattttgacaatagagctttagcagttggtgcgtgagtgaaatcttcagaggcttttttagtgttttgagagagtcttttaagttaatcttccatgacggggtctgcatttgggctgcctgtcaattaagcataatactgacacaatggtgtaactccttagcccatcaaaaaaaaaaacttccgactgcattactatactgtagtatagtattagtacattagttcaaaatatagttctatgctaacattaactctttccaggctgcataaacctagttagatgctctcctgactttcccatttaatttgaagctaatttcttttgggtgtt

SEQ ID NO: 31175 - DNA, 2300 bp, Homo sapien
ctctataaaaaatacaaaaaattagcctggcgtgttggcaggcgcctgtaattccagctgctacggaggctgaggcggagaatcacttgaacccgggaggcagacgttgcagtgagccgagatcgcgccgttgcactccagtctgagcgacaaagcaagactccgtctcaaaaaaaagaagaaagaaagtatccgacttggtcttgggctcttctcactataatccaactatattctcttacgaaatggcagaattaatcttccctccttgtgacacccctgtagttatacatgcctctggcacttacaatcattttttctaattgtgtttaacggttctagcacattactttgtaactttagaatagagattgtgtctgattcctgtgtattaaggtccgaccttttttatttttatttatttattttttagacagagtctcgctctgtcgcccaggctggagtgcagcggtccgatctcggctcactgcaacctccgcctcccgggttcaagcgattctcctgcctcagcctcccgagtggctgggattacaggcatgcatcaccactcccggctaatttttttgtatttttagtaaagactgggtttcaccatgttggccaggctggtctcgaactcctgaccatgtgatccgcctgcctcggcctctcaaagtgctgggattacaggcgtgagccaccgcacccagccgatctgacctttttttttttttttttttttttttgagacggaatctcgctctattgcccaggctggagtgcagtggcgcgatctcggctcactgcaagctccgcctcctgggttcacgccattctcctgcctcagcctcccaagtagctgggactacaggcgcccgccaccgcgcctggctaatttttttgtatttttagtagagacggagtttcactgggttagccagaatggtttcgatctcctgacctcgtgatccacccgtctcggcctcccaaagtgctaggattacagcgtgagccagcgcgcccagcccgatctgaccttttttaaatgaagacgtattcaggaaggaaatatctacaagtaagacaaaattaagtaagaacccaatgtacgaacattcacttctctaacaaaggaaagacacaaaacaagaaactaataaggcggagaaaggaattgagattgggggaaacagcatctccttcctccctgcacactcggcaggttccctggaaagttctagaagggattcagaagtggctggtgacatcactgtggctccgtggcgcccactacagcagccaaacgacacgctagctttcccgcctcatagaggctcgtgaatgggggtggggccctgcgaggggcggggtcacgtcacttcctgtgcgggacgcgctgcagctggagaggaaaggcagagcgaggaggggcgaggccaagaaagcgcgcgtttctgggaggggaggagcctggctaaggagcgccgcgtcacatccggtagagttagagcccgtgcggaggcggtgcggagcatttcggctctgagcggctgggcgaccggcgcgtcgtgcggggctgcggcggagcctccttaaggaaggtgcaagaggttggcagcttcgattgaagcacatcgaccggcgacagcagccaggagtcatgagcgacagcggcgagcagaactacggcgagcgggtacgtagagctgcggtagggggtggctgtgtggtcctagctccttgcatctttttctaggcccgtcggcctcgggccaggaggcaggggcgttttaggctccgaagtctgaagccgggagggcaggcaagggagacagcatttaaccaaaaaaagcctttgtggatagtgccttagtgcctttggtcgtgaaggagggaggcccccggcgggtttatgtggcttctgcccgagacggccgtttttcccgttataagagggggaagatgaaaatggccgctgcgtccccgcggtgttgggggaggggagcgatatcttatttcggcgttgctctcctgcgaaggtccgccgcagccatcttgggctggcgggctgggcgagctgccagaggcacaaaatggcggagaagccgcgcggcaacgcggacccgacccgcagcgggccgcgcttcgtaaggccgcgtggtggggtgcaaggggacagacgacgttcttttgggtctttgggccggtgtttaggttaacgaaggaccgtctttgcctccacggaaaggacggagtctgggatgtctttggggcctcttaagatggaaactaatccaagg

SEQ ID NO: 31176 - DNA, 2300 bp, Homo sapien
tgattccattcatataaaatgtcctgaataggttaatctattgagaaagaaagatttgtgattgcctaggactgggagggttgtgaggagtggagaggaggagggatgcaaaatgactattaatgagtgtttcttttcttaatgtgatgagactactctaaaattgtggtgatggttgcacaattctgtgaataaaagccatttgaactgtacactttaaataagggaactgcatagtaggtgagtcgtatctcaataaagctgttaaaaaaaatcaggagttggggatatggggctgaggcaggaggaacacttgagactgggaggtgcaatgagccaccgcactccagcctgcacgacagagccagagagaccctgtctcaaaaaaaaaaaaaaaaaatcaaatgaccctttaccagtatcaaagtgcctcatcagccaggtaccaccttttcaatggatggggagactgaagtgtagaggaattaagtatccgacttgggggttgggggaagtggctcacgcctgtaatcccaacactttgggaggccgaggtgggaggatcgcttgagcccaggagaccagcctggccaatatgccaaaactccgtctctataaaaaatacaaaaaattagcctggcgtgttggcaggcgcctgtaattccagctgctacggaggctgaggcggagaatcacttgaacccgggaggcagacgttgcagtgagccgagatcgcgccgttgcactccagtctgagcgacaaagcaagactccgtctcaaaaaaaagaagaaagaaagtatccgacttggtcttgggctcttctcactataatccaactatattctcttacgaaatggcagaattaatcttccctccttgtgacacccctgtagttatacatgcctctggcacttacaatcattttttctaattgtgtttaacggttctagcacattactttgtaactttagaatagagattgtgtctgattcctgtgtattaaggtccgaccttttttatttttatttatttattttttagacagagtctcgctctgtcgcccaggctggagtgcagcggtccgatctcggctcactgcaacctccgcctcccgggttcaagcgattctcctgcctcagcctcccgagtggctgggattacaggcatgcatcaccactcccggctaatttttttgtatttttagtaaagactgggtttcaccatgttggccaggctggtctcgaactcctgaccatgtgatccgcctgcctcggcctctcaaagtgctgggattacaggcgtgagccaccgcacccagccgatctgacctttttttttttttttttttttttttgagacggaatctcgctctattgcccaggctggagtgcagtggcgcgatctcggctcactgcaagctccgcctcctgggttcacgccattctcctgcctcagcctcccaagtagctgggactacaggcgcccgccaccgcgcctggctaatttttttgtatttttagtagagacggagtttcactgggttagccagaatggtttcgatctcctgacctcgtgatccacccgtctcggcctcccaaagtgctaggattacagcgtgagccagcgcgcccagcccgatctgaccttttttaaatgaagacgtattcaggaaggaaatatctacaagtaagacaaaattaagtaagaacccaatgtacgaacattcacttctctaacaaaggaaagacacaaaacaagaaactaataaggcggagaaaggaattgagattgggggaaacagcatctccttcctccctgcacactcggcaggttccctggaaagttctagaagggattcagaagtggctggtgacatcactgtggctccgtggcgcccactacagcagccaaacgacacgctagctttcccgcctcatagaggctcgtgaatgggggtggggccctgcgaggggcggggtcacgtcacttcctgtgcgggacgcgctgcagctggagaggaaaggcagagcgaggaggggcgaggccaagaaagcgcgcgtttctgggaggggaggagcctggctaaggagcgccgcgtcacatccggtagagttagagcccgtgcggaggcggtgcggagcatttcggctctgagcggctgggcgaccggcgcgtcgtgcggggctgcggcggagcctccttaaggaaggtgcaagaggttggcagcttcgattgaagcacatcgaccggcgacagcagccaggagtcatgagcgacagcggcgagcagaactacggc

SEQ ID NO: 31177 - DNA, 2300 bp, Homo sapien
catgcccatttcagtcttccaaagtcaacagctccagcgtgcctggtcagtgctgagcccaggactcaacacgggtgctgcaggttgcttaggggcacgccaacatttcaagggctataaacgacagaccaagtgtccgctctgtttaagagacacaagtggagataggaaagaacctttgacttaagtgtgggggtggcaggggcaggaactgccccagagttggccaccgtgggacccccattgctaggggctctctcctgtcacttagcatctttcctccccaccgctggcacgcggcgtgaatggcagggcactccagcaggacgagaacagagctccgtcacaggcccccagcatccccggagagaagatagagccgccccacggccttcacaggagggggtaagggggcggagaggggagaggattgtttgtttatttgtttcctggaacaccctgttaagaatctcagcaattgcagttagtgccctatcgtttggcaagcagagccgcttctcgtcgttcccagctgcacgggatctaattcgcaaatacaccatcttgcattcaatacttaaatggaaaacaagcagcccggggagggaggcaaaaagtctgagtctgcatgcccgtttcggagggatttaggtttccaggtcggtggactggctgctgctgtccccggagaggatttctttgagcccgaaccctgtctcacctcgactacagaacccactctggcggaggttacgagccgcagttaaagagaaaacgggatttggttgggtcttaggccttgccagtacaaaatagtaacaaaaatctgtttgagagctgagattttaaaaggagatgctgcttattcttcccactggaaacctggttaaaagaaattaaggcctctcttaaaggtaactaagattagagggctcggtttccgttttctgtgtttctgtgggctaaacgcccaggtcggtcagcgagtttgtgtggaatgacgaattcctctcccctgaattctaaaatgataactttgcttggtgctgcagctgcgaacgtctggcgccaagagacccaattctggtcggggctttgctggatggagaagtgggggtgagtgggtaagggggaagagtcgtgcctcggtgaaaagtcgggagagcggcgagaagggaagtaacggcggctcctcctggcctcggcccctttaagtgcttcactgactcagctaagcttccccctcaggtcgcgttttttatgaatgaaaaacgtccttacattcattatataaacaagcctgtgctgattggccaatggcccccggtgcataaattatgtaaaacagacccctgagggggtggagagagatgcaccgctggccaatgggggccggagttgatggggcggcttggttggatttgcccgcagacagggtaaacaagaggtgatggacagccgcgggaacggcctctggccaatgggaacaaggctgggctagggccgcgggccaatggcggcgggcggagcagcgagccgcggggggccgggccagcgctccagcctggttggcagctgcggcgcagagtccagccgctggtgcgcggagcggttcaccgtcttcggagcggttcggcccagcctttcgcccaggcgcccaggcccgctgcgcgcgtgcgtgagcgcgcctgcgccgccggggccgctgcaaggggaggagagaggccgcctcaggtgagggggctttgcgggggcaggggggagatcggaaggggcgtccggccactggtccgacaggcccagccggctagagttcacgggctgattcagaatcttcaaagtcggggtgcagtagctggggtgaccccccccgggttgaccgccccctccccccgcggcccggtccggtttggttcctgggaggcgtcgggcgggtgcggctaacggttccggagcgcggggagagcggctttccacacgtcgtgggggaggcgccccggagcgcgagtgcgggggctcccgagtggatgggggatcgcggagttgcgaggctttcacagtctctggagattcgagagccccgaggggacttggaggctcgcgagaagagacgcttggcggagctccgcagttgggaggagggggcgggaagcagtttgaggggaatgtctgagaggcgctgccccccagagcaccgggagggggtaaatgacacaggcaagtgcagcctgcgggggcgggggtcgaccaggaacttacgcaggccttgcaagtttcaggtggtggaaagtggacatcca

SEQ ID NO: 31178 - DNA, 2300 bp, Homo sapien
aggtccaaccctgtgaggaagttgctgtgaagcgtgcggcactgttttcctgtagccaaagttataaagtgtgattgatgtgttacggtttagatggtgaggatatgtggctctgtgggctgtaagccttccggagggctggggcctgagagacttaagggaagaggagtaagaaagctcctttggaaaaatgagtttagagagcaggatgtcatgggatgggatggggaggagcgggagtgggggtagacaaaattggggaggaggaggatctgggagcttacctgggcccttcatctagctagggagatagagctctcaggaatgtcagcaataagctcagagcacaactgtactagtgtaagatctccagccaccaaacagaaacggtaccacctggagaaagaaaaagggcactaagggaaaactggagtcggaagcaaaatgttctaccaggaaactagatctcaaggaactgcttgttacatgttcagagtactttccatccatcaactcatgcccatttcagtcttccaaagtcaacagctccagcgtgcctggtcagtgctgagcccaggactcaacacgggtgctgcaggttgcttaggggcacgccaacatttcaagggctataaacgacagaccaagtgtccgctctgtttaagagacacaagtggagataggaaagaacctttgacttaagtgtgggggtggcaggggcaggaactgccccagagttggccaccgtgggacccccattgctaggggctctctcctgtcacttagcatctttcctccccaccgctggcacgcggcgtgaatggcagggcactccagcaggacgagaacagagctccgtcacaggcccccagcatccccggagagaagatagagccgccccacggccttcacaggagggggtaagggggcggagaggggagaggattgtttgtttatttgtttcctggaacaccctgttaagaatctcagcaattgcagttagtgccctatcgtttggcaagcagagccgcttctcgtcgttcccagctgcacgggatctaattcgcaaatacaccatcttgcattcaatacttaaatggaaaacaagcagcccggggagggaggcaaaaagtctgagtctgcatgcccgtttcggagggatttaggtttccaggtcggtggactggctgctgctgtccccggagaggatttctttgagcccgaaccctgtctcacctcgactacagaacccactctggcggaggttacgagccgcagttaaagagaaaacgggatttggttgggtcttaggccttgccagtacaaaatagtaacaaaaatctgtttgagagctgagattttaaaaggagatgctgcttattcttcccactggaaacctggttaaaagaaattaaggcctctcttaaaggtaactaagattagagggctcggtttccgttttctgtgtttctgtgggctaaacgcccaggtcggtcagcgagtttgtgtggaatgacgaattcctctcccctgaattctaaaatgataactttgcttggtgctgcagctgcgaacgtctggcgccaagagacccaattctggtcggggctttgctggatggagaagtgggggtgagtgggtaagggggaagagtcgtgcctcggtgaaaagtcgggagagcggcgagaagggaagtaacggcggctcctcctggcctcggcccctttaagtgcttcactgactcagctaagcttccccctcaggtcgcgttttttatgaatgaaaaacgtccttacattcattatataaacaagcctgtgctgattggccaatggcccccggtgcataaattatgtaaaacagacccctgagggggtggagagagatgcaccgctggccaatgggggccggagttgatggggcggcttggttggatttgcccgcagacagggtaaacaagaggtgatggacagccgcgggaacggcctctggccaatgggaacaaggctgggctagggccgcgggccaatggcggcgggcggagcagcgagccgcggggggccgggccagcgctccagcctggttggcagctgcggcgcagagtccagccgctggtgcgcggagcggttcaccgtcttcggagcggttcggcccagcctttcgcccaggcgcccaggcccgctgcgcgcgtgcgtgagcgcgcctgcgccgccggggccgctgcaaggggaggagagaggccgcctcaggtgagggggctttgcgggggcaggggggagatcggaaggggcgtccggcca

SEQ ID NO: 31179 - DNA, 2300 bp, Homo sapien
cccaccccacagcaaactacttaccaatctttgcaagcatctcccctgtccaaatccctggacaacttggcaaccctgttgcctgttctcaggcaagttgcttggcaaccctgtcctcagagctcctcccctctcgttacccttccccaatgtgctctcaacgaagctaaggctccacactcagtctctgcatgtcttcttcatttgttccattcaatttatttccttcctgtcctaataggcagagcaactcaatgttgtcctaacacctatttgcaaacatgtaccccaagtccattatgatgctcagccaaacacagggtctccttcagtttagccttctttagaaggagtcaagaatagacagccagaatgtttttcttgtgacatgtatgtgcattttcctccattgagcatgcagtcaaaaaaagcaaggattgtgtcttccacatccatgcaacctagcagagtgaaaatatataccagaaacctgtgctcagggctcctctcttccagggatgaggacagttctaagccctttctgtctctcagttcttctttcctcccaagtaaggcccaggactggagttacggggaagcacctgaagacagagtaggagtttaataaatagctgtaaaatgaatgagtcagtgactgaagaggaaaaaaagaaaggacaaggaagaactttgaaggcaccctcaccaagattatttcagcctagctgaaggaaactttgagaagccacccagggtgatagaatggataagacccagaggataagaggagtcgcaaacacggggttctggtatcagctctgtcttcatcactgtgtggaatcttaaggagatctctcagctctgtttctcatctgtctcaccagcctgcctgcagatagcctagtatggacaccacccaacagggtcctcagggctgtttgacattcgtgtttgaggcttcttccccaaatgcacagacacccagagcccctcggcgcctccacactctgcggaaagcttttcttggctgcagtgctggcccggggaccttcactgcccactggcagaaaagaattctcggctgtggaaatgagtaaactccacatattttaaagatgacagtctaaactcctaatgactctaaatgtggtgtgaaatggacagcagtcatcttgctgtgtgacatgcctgaaatagtgtcaccaccaccatcaccccctcacgtggacatgcacgtcatggaaagagaagcaacaagtcatagtgccttggctaatgtagctcccctattccccccgacccctcaccccagcgtcttttctgtgctcttctacattttaaaaaaagaagagatctatttattctgcaggaatacagtccaaggtcacctaaaagcaaaggagaatgggaattaaacacacccagagacccgacccatccaacagagtccagctcaggcaggctgtgccagtctccaccaggctacgaggggaaaaccttttcgagttgaactgccaccaatccactgccaccgaagtcaaggttgtcagaaatgaccctctggacagggctagtgatttggatcctagagatactgagttcctgggaaacaaagagaacttgttgattttgtatttttattttttcttcgatttggtcgggatattacggtagccttgaccagagttgagaaaaggaaacgcccagtcggtatttatttgtcaaacagttgtcctttgcctccggggtcaggggccctctggtacccaccactgttgcatcctctccacactcctaagcctgtaactcctcctcccaaaccgaagccctgtcagtaaaaagcgtcctaatgatgcccgcgccctagttgcaccaaagggggtcaggttcccatcgagcggatccacattcgtgtgtgcgcacgcgtgtgcatgtgtggaagcgcgtgtctgtgtgtgccgtgtgtgtacgcgcgcgcgccggtgtgtgtggcgggggcgggctctgcgcccgggggcagggctccgcagtgagagtggcagctggacttgccaggctgcgaggggcagggcacagagccgcagtgccgtagtagcgggccacggagatagacagctttggagctgctgaactccgagcacagggtgaagaccccggcgctaccaaccacagcctggcagcctggtctccgcggcacccactggggctgcatccccctcccccgagagggctgcgcaggcgggaagacgcccagaggccagcttcggtcccccttctgtctctcggttcctctttcctcc

SEQ ID NO: 31180 - DNA, 2300 bp, Homo sapien
tttgtattttttgtagagacagggtttcaccatgttgcccaggctggtcttgaacctctgagctcaagtgatccacccaactcagcctcccaaagtgctgggattacaggcatgagccaccgcgccaggctgaattctttctttacttcctattcaggctcctaaggaaagaaaaccagctgacccagccaatccttttgggtcagatcaggtcaggccgtgtttagtttgtcttaaggtcagggatctactcctgcctactctaatcagctgtggccagcaggcaagacgggatgtgggagcaaagtgcattcccactttcgtatgactccaaagcccactctaaactcctgcactccatcctgcctctcagttaggtcagaagtctgaaaaggtctgaagtgacttttgtagatattacactttccaagaagggctttggtgaagaggtatttcagcttcctcctaaagtggcaccagcttcttctttttcttttctccccggccctccacccatgttttgttccatttctcctagtctccatacaaatccagcaaagtgattttcttgccggctagtaaaattataaaaacgatttaaactgctctttttctctcttaaaacagctttctccctgtcagtaagaagcaggaagatgaatgaaagaaaacaggtcagcatttctagcttttcaagctgtttttcaataaggaaagaggcaaagaaaactccagagatggatatgaattgcattgaaaacatttcctccaggagaaaagtcgctgcttccctgagagggctcatttattgatttaatcagcctgcaggagcaccttctccagtaaaagatgttgagttggagtggcctggtctgcagtgtgtgcttacggtgctgatagcaccactgccgctgatgccgacggtgcttttcacctgtgcccacacgtgtgatgggggaagatgcacctccctgtgaatgctggcgtgctccatgtcactccaggatgtcacttgtcctgatgtcctatctgagttctctgtaggcatgctacaagaaatctgatgactttgggagaaagaagatgatacattcttttttttttttttttttgagacagaatcttgctttgttgcccaggctggagtgcagtggctcaatctcagctcactgcaacctctcaacttctgcctcccgggttcaagcgatcctcctgcctcagctgcccacatagctgggattacaggcatccaccaccatgccttgctaatttttgtatttttagtagagtcggggtttcaccatgttggccaggctagtctggaattcctgatctcaagtgatccatccacctcggcctcccaaagggctggaattacaggcgtgagccaccgcgcccggccagatgatacattcttgattcccccaaattcctagagtgtaagagccagaaggaccctccactcaacccctttatcgtacagatgaggaaactgaggcccgagaggcaacctgcccacttgttgtgactgagagctgaacctcaaggaggactggtctttcctataaaactctcccctcagagttgctctggactgatagagaaaaacgtgcacccagtctccaggggcaagagcaaggccctataaaaaggatgatctgtgtatttattctgtctcttgttgtctttggcacggctctgcctgccagtccttaaccctttgcagagctctgggcagcgtctccatggtggattagggtctaatcactaggagaagggcgagggcaagctcttgaaagagtagcaaatatggaaagttcccgagtgagcgttaggggagatgtactgggggaccggggggacggacctggagggagaacgagggcgcgagaaaaccgtcttccaggacttcccaccagcggaatggcacttttgacagattttccttatttgtctgtgaaggggattcagatcattcaagatggactcaagtggttgctaaggcaacagtgttacagtcgtcactgtcatggaaacccgttctgtggcgtaatataaatattttcctttaggaatgagaaagagagttgagtgggcgacaagttgttttctaatgctcacgcgctatggccgaagtctgcaatggatgggagaaaggggaggaccaaattagctcagattctttacagttcacagcatcagctgttttatttatttgttttagatagcgaagccaaaaaaagttggatgggggcaaaaatgccaactaaaatagctcatagttctgaagtagagagaag

SEQ ID NO: 31181 - DNA, 2300 bp, Homo sapien
taaacttctgactttcatataaacatattgcttatagaacatcagaagactcgtctttgtgatgcccaaatgaaaaagttggtgaaggtagtaccattgtatgtatgttaatattaaagcaactgagtgtagatttgcaactatagtgtgtatcttcatttgtgtgatgaaagagttttattctttctagagttaaataagagttttatagttctttgtaactatttaaaaggaaattgctactccttttaaaaaataattggaaaggaagtatgatttgttggtatatagacatagaaatagttttatactatattttagtccttaaagtatggaacttaatgaaattgtttaaaaaaatctttatttttcacttcctgcttcaaattttcaataaacaaactctaaagaataatttcctttttttgtaaaagataaatctttagttttaattttagaaaaggtttccagtgtcatttctcaaaataactagtaaagtttacatttacttgggaaaaccttctttcagataaatgagtgaaattaccaaattaccaaatgagtgaaatgaatcagattgctgataaacattggttcatatgctctctggccatttaattagtatttctatcaaaaaactcttttgtatttctaaagtaaaaattaaccctcagaatgtttaattctaattgaagtttacatggtttttattttaagatgaaattcaaggagcagaccattaccaaataaacactggagtaatagaaatatattttagatattgctatttgttaatgaaataaatggtactcagatactttttttaaagttttaaagttttataaaattttataaaattcagaaaaccaagcatatagcttaatattttctcaataatctttatattaaggcacatttgccattttctgaattgaccataatacatcccatttattaaaatatttgttagttttgttaacagaaagatgaggaagtttgacttttgagaatatacttgattttgagaatatacttgatcagttaaagttaaaaatggagaaaagttaatttattgggtttttttgtatttacataagatgcaatctcattcctaaagtcagaggtgtattagggccaaaaaatgttctccgatcatgttccaatgttgtattgtgggcaaagaagaccacctagccagtagcttgttgtgtttagttagctaacccttggcaaattcaggagtcccacagtcacttttctacatacggtggcacccttcttatggattagagctctttttttaaaaaaaattgtgttttgaaaaaaattaaataatagttgcaagaataagtcagtgaactttaacataccctttatctagattccattcaccagttgttaacattttgctacattctctttaccactcaacatgatagtattgttttatttttgctcaacaatttgagaataggttgcagacatcttgaacctttcttctaaatggtagcatacatgtcctggaaacagacatactcttacctagtcatagtacaatgatcaaattcaagaagttaaactttggtacaatagtattatctaatttacagtccatattaaaatgttttctgattgtcccagcagtgtctttatagtgacttttttccccaaacacaagatcatgcattgcatttagttgtcatgtaagttttgttgcgtttagaacatgtcacttctgtccagaaatagaggtagtcttctgactcttacctctcacaagctttgttgaagaaaaaggacattaggaatttcaaagaggctgcttaaaaaaaaaaagagagactcttttgttcttaatttttacaactttgtctgggttttggtttcttgactcagcaaagtctgtaatgcagccctgcttggtaagcattaaaggcggtactgaagctttcctttattttataatcccagttgttttttctagaaaccatcaatagcgtctaaatgactgactcaatttttggatcctattctcatgactaagcaaatgtttgactgaaaccagcccatataaatgtcactgtgcctctaactctctgtagccattcctgaatttctttcagcactgggaaaaccagtctatgcaccaaaaatgtctaaaactggaaccaaggtaagtagtcatattgatttttagcctacccgcttttcacctaatgatgcattcaacacacagaaaagcttttgcttctttgcctagaggtgagtatgatagtggttagagaactgggattgagaga

SEQ ID NO: 31182 - DNA, 2300 bp, Homo sapien
acagtcaccatgttgtacattagatctcttcaatgtattcctcttagctaaccgaaattttgtaactgaagatgtttgatgtggcattgtttaaaaaaactgtggactagaaacaccccaaatgcagtgtatttatatgctaattatatgcctaacaatctttgaaagaatataaagaaattataaacagtgtttgtctttgaggaatgagattgggtgtctagggtgggagaaaacttcttaaaaattttattgagataaaatattaccacataacattatgggaagtaaattcacctttttaaagtaaagaattcagtagcttttaagtatattcagaagtttgtgcaactatcaccactaaaaaatctagaacattttcatcaccttcaaaataaagctcgtacacattgtaggccactccttattcctccaacccctacatttcctcttccccttagtccttggcaccactaatctactttgtccattttggacattttatgtaaatggaatcatataacatgtggcttcttgtgtctgggttctttcagttagtgtagtgttttcaagattcatccatgtagccatgtatcagtactgcattctttttcatggccagataatattccatcgtgtggatctaccattttgtttatctgttgatcagttgatggacatttggcttgtgtctacttttcagctgttgtgagtaatgctgctgtgtacatttgtgtacaagtttttgtgtagacatttgtttttatttctcatggatatatacctagaagcggaattgtgaggaatatatttaacttttaaaggaattgcagttttccaaagctgtaaaagtgtattttttgctttaaatatttacatttcttaagggtgtatttttttttaaagaatttagcatgcctgtaatcccagcacttcgggaggccgagacgggtggatcacgaggtcaggagatcaagaccatcctggctaatacagtgaaaccctgtctctactaaaaaatacaaaaaattagccgggcgtggtggcaggtgcctgtagtcccagctactcaggaggctgaggcaggagaatggcgtgaaccttggaggcgaagcttgcagtgagccgagagcaccccactgcactccagcctgggcgacagagcgagactccgtcttaaaaaaaaaaaaaaaaaagaatttagcaatatttattaataaatgctgagaattaagaattagcaatttggctgagcgcagtggcctatgtctctaatcccagcactttgggaggctgaggtgagaggatcacttgaggccaggagtttgagaccagcctgggcaatataatgagaccctgtctctacaaaaaaattaaaaattagctgagcatggtggcacatgcctgtaatcccagctactctggacacagactggaggatctcttgagcccagaagttcaaggctgcagtgagctatgattgcactgctgtattccagcctgggcaacagagcgagaccctatctcttaaaaaaaaaaaaaaaaattacaaatctgatggagattatgcaaaggaaatgtgaactataagcgggtaaataattttgtttaatcttcactgcttaacaattttttacattcatgtatgaatttctcttttattatgatctaacattacacctagcaaaaaggaatattattaactttaaactttgtgtatcttatcactctaatctatcatttgaccttgataatttatgtgattttttaaacgtagagttttaaaattatttacatgaagcaatagaaaattaagtgattaatattattttttctttgatcttcagggccctggaaatacaaggataaatggaggatggtgctcatcttgaaacttgaaactaaattgggaaggtgctattgctgcttaagagacattgggacttttctgtctttttttttttttttttttgaggcagagtcttgttctgtcgcccaggctggagtgcagtggcgcgatctcggctcactgcaagctctgcctcccgggttcacgccattctcctgcctcagcctcctgagtagctgggactacaggcgcccgccaccacgcccggccaattttttttgtatttttagtagagacggggtttcaccgtgttagtcaggatggtctcgatttcctgacctcgtgatccgcccatctcggcctcccaaagtgctgggattacaggcgtgagccaccgtgcccagccttctgttctatttaagaactttgatttccattccattttcattta

SEQ ID NO: 31183 - DNA, 2300 bp, Homo sapien
gtttaactatgttggccaggctgatctcaaattcctgacctcaagtgatccctcgcctcagcttcccaaagtgctaggattacaggcttgagccactatgcctggcctctttgtcttttttctacacataaattagatgttagtttttgaattttcacagttgtgatgttacatacacaattctgtactgtttcaaaagctttatagtattctaaataaatgtatcccattttattcaactcttctcccatttttagacaccttactaggtttcagatttttcacaaaaacaacataggcaaaatactgatcattattgaagtggggtaatgggtacgtggggggctcactgattctatttttgtgtatgttaaaaaatttcattacaaaagttcaaatgttgtcacaagtgtaaataatgctatcactaccatctttcttcatattttctgcattacgaattatttctgtgtgaaaattttcagatgtacttttgtgaaattaagtaattgacatttctaaagcttgtgaaatatatccttgttgcttccaaatgattttatcaaattgtaccatcctttgactctggtacctacttcactgtgcactcctcaacattagcaacatcatttttttaaaaatataaaaactaatttaaaaaatcaattatatgactgatgaaaattttattgctattattatattttgcatttgattctaagaaaactgtgcttctctcttttttttttttttgagacggagtctcgctctgttgcccaggctggagtgcaatagctcgatctcggctcattgcaacctccacctcccaggttcaaacgattctcctgcctcagcctctcaagtagctgggattacaggctcccgccaccacgccaggctaatttttgtatttttttagtacagacagggtttcaccatgttggccaggctggtcttgaactccctgacctcaggtgatccgcctgccttggccttccaaagtgctgggattacaggcgtgacccaccgcacccggcctgccaactgtgcctctctcgagaatcatctgttcggaaaaataactgacatcaatcgagtgcttactatgtaccaggtatcatgctcatgattttgcatacttcacctcctttcatcctcacaaccacctggagatacagtacttaagactgtacacattttcgatgaaaaaaaaatgaggcttagcgaagttaagggatttccctaaggacacctacttagctggcacagctctagattaggattcaggtctgacttgagaactgcattactataaatgtactctaggaatccagttttgggagaatctcttaaaaacgggagtggatccagaagagaatttccagaataaagagtcttagacaggaagccaggtgaaagaaccagggagagtaaactcaaaagaagggcgtggaagggcaaaaggcagctgtcttccaatgtggagagactggagtcgttttgagtaaaaccagacgataaaagttaggcgaggaagacctcggttctctccaaaatgtaaagaggctgctctgtgaggtactgagcccctgtcaacagccagatcccagagatgagccctccattctaactccgagaatcgagagggctcaatccgtaaacaaacataaactggggctctgaccctggcggtgccctgaggttaaggtttttcaggtcgggagatcggcgtgggtccaaggcggctgtcctggggcttcgccgccaccttggacgcgatccggggtgggactctgcgtgggccgccccagcgtcgcgaccggacttcaggaacacagacgctcacgctgacagggtcggtagctgacccgagacgcggtaagcgcgaaggcagcctcctcgacccaagcctgaagcctgactaacccacaccgccctccccggcgcacccagtgcgcggttacctgctaatgcaggcgccgctccgccgcacttctccgcgcgccgccgcgcccggcgtccgctcgctgggcccgcccctcaccctcctccgcgcgccgctgccgtgcccactgcgcaagcgcgaggccccgcaccaccgagacctggcggaccccgttgctagagcggcagattgcggctcaagcgtctgagaaaatctaggctggggtcgagagtccgcaacagtggcacctggagccagacccaccgctttctggtgtcgcgcctttcaacccgggggggtaggaagctttctgttgctccgcataactgtggtcagctaatagctgctggtaaga

SEQ ID NO: 31184 - DNA, 2300 bp, Homo sapien
agcctgaggcaggagaattgcttgaacctgggaggtggaggttgcagtgagccgagttcctgccactgcactccagcctgggcgacagagtgacacaccgtttcaaaataaataaataaataaataaataaaaaataaaagtcaaatcatgtcactcccctgtttaaaagcctggaatggctcttcatttgcacttagaataaaatcccaactccatgctagtttacaaagccgtttatgctttgtaaacctattatactcctaaccatgctccagcaaaacttgcttcctttcttttttttgtatacaccgagctcattcctgccgagggcctttgtgctagctattgcctttgcctgaaacactgtactctccctcatgtgctagcatgggtgattccttctttaactcatatatcagcttaaaggtcgccacctcagggaggactttccctgaccaattaatcaaaattagcccctactgagttccttactcttacaccaccctgttttcttttctttatttctttttttttcctgagacagagtctcgctctgtcgcccaggctggagagcagtagcgtgatcttggctcactgcaacctccgcctcctgggttcaagcgattctcctgcctcagcctcccgagtagctgggactacaggcgcacaccaccatgtccgtctaatttttttgtatttttagtagagactgggtttaaccatgttggccaggctggtctcgaactcctgacctcaagtgatccacccgcctcagcctcccaaactgctgggattataggcatgagccaccacgcccggcctcctatttttttcatccctggtccctagacttacacactgaaatgccagtttcatgagagcatgaatctatattgttctgttcacagctgtataaaagagcaccttagaacagtgcctggcatggagtaggtgctgaagtacttttgagtcaaagttactgggatggtgatcattgtatggctggcttcttactcttcaggcctcagctcaaatttggcaccacaaagtggccttccctgaccccccgccccaattttcatagcatttttcactatttgaaattatcttattttattccttaatatgtattgtctattctccctgttatacactccaagaaagcaaggaccttgtctgttttgttcacttctgtcattctagtgcgtaccactgtgccagacacacagtggtactcaacaagtaacagcagggtcactgagctaataagtggtgcagcctggatcctaacccaggtatgtgtaaatttgaagcccctgctttcaggaagatacccagtagggacaatggccacacaaaagaggaactaaattgcattttacggtctaatttacctttgtatctatcacacctagagaggccataaaggaactaaaaaaagcaggaaatgtccagaaattctgaaatggaagtttaaaggaaggagtgatggcttctgcccggtaatctgaaaaagcttcatgaaggtggaaacacggcaggaaagctaacagagttaaggagctgacaccgaggggcggcagggagtgccagtcttgcttcagacgccctgggcttgaatcttggctccatctcttgtgtgaccttagggttgtgttattttcacctttctaggccctagtttcttcatcagtaaaacgaatgtacttaaagggctcttgacaagacttaggaaatacacataaagttgctttacacagtgctgagaccatagtaagtgctctataaatgcaaactgccattagtattagtagcatttctgatgaaagcgtgctgatcttaccagcagctattagctgaccacagttatgcggagcaacagaaagcttcctacccccccgggttgaaaggcgcgacaccagaaagcggtgggtctggctccaggtgccactgttgcggactctcgaccccagcctagattttctcagacgcttgagccgcaatctgccgctctagcaacggggtccgccaggtctcggtggtgcggggcctcgcgcttgcgcagtgggcacggcagcggcgcgcggaggagggtgaggggcgggcccagcgagcggacgccgggcgcggcggcgcgcggagaagtgcggcggagcggcgcctgcattagcaggtaaccgcgcactgggtgcgccggggagggcggtgtgggttagtcaggcttcaggcttgggtcgaggaggctgccttcgcgcttaccgcgtctcgggtcagctaccgaccctgtcagcgtgagcgt

SEQ ID NO: 31185 - DNA, 2300 bp, Homo sapien
tcagtgtgtaagtctagggaccagggatgaaaaaaataggaggccgggcgtggtggctcatgcctataatcccagcagtttgggaggctgaggcgggtggatcacttgaggtcaggagttcgagaccagcctggccaacatggttaaacccagtctctactaaaaatacaaaaaaattagacggacatggtggtgtgcgcctgtagtcccagctactcgggaggctgaggcaggagaatcgcttgaacccaggaggcggaggttgcagtgagccaagatcacgctactgctctccagcctgggcgacagagcgagactctgtctcaggaaaaaaaaagaaataaagaaaagaaaacagggtggtgtaagagtaaggaactcagtaggggctaattttgattaattggtcagggaaagtcctccctgaggtggcgacctttaagctgatatatgagttaaagaaggaatcacccatgctagcacatgagggagagtacagtgtttcaggcaaaggcaatagctagcacaaaggccctcggcaggaatgagctcggtgtatacaaaaaaaagaaaggaagcaagttttgctggagcatggttaggagtataataggtttacaaagcataaacggctttgtaaactagcatggagttgggattttattctaagtgcaaatgaagagccattccaggcttttaaacaggggagtgacatgatttgacttttattttttatttatttatttatttatttattttgaaacggtgtgtcactctgtcgcccaggctggagtgcagtggcaggaactcggctcactgcaacctccacctcccaggttcaagcaattctcctgcctcaggctcccgagcagctggggttacaggcgctcgccaccacacctggctaatttttgtagttttagtagagacagggtttcatcatgttggccagcctggtctcaagctcctgacctcaggtgctccgcccgtctcggcctcgcaaagtgctgattacactttgggtgggtgagccaccgcgcccgggctttttttttttttttttaaatcatggagtgagggacagggatgagcaacatatattaagatattaaggaagatattaagagtgggggcaaggaggccagttaggaggccctggccaggtgagagatacactgtgacccagaatcctggtaatggagatgtagtgaacagattgaagtatagttcagaggtaaagagttggatagcttatgcatgaaaggaataaaaacacctagagctttgtcctgatcaactaggtgttgtgtaactgcgatgagcaaaatcggggggaagatggggaatcaaagagttctgcttgaaccgtaataatggtttttactcgttgcctgcttactatacgcccgatgatttaccgatttttttccctgttaaaattcacagaactgccaataagtgctttgcctcagttttgttgataaacttaggctcagacttgggaggaggggaggggtggggggtctcaccactaagaagcggtggaagccgaatccgaacttaagtcggtctgtcatcactgtagcctttccgagacagttgtcttatggagttgcttggagaacgtaaaataagaggcctaagcaatgcgtctgatgtacacctgtcgtggaataactgttcccgctcattcggccgctgtacctctgctccctcattcggagcgtagctgggtatgaatgaaattccgggcttgtagcacagagaaaacttctctcccacaattggttggtgctggggaggaagctcctgattggtggaaagtccgaggaagtgggcaagccggagggatttcgtgtacctcaggtgccctcactctgaccggccccctatcattacgtaattttctacgactcgcggtagctcaggcagagcgggttcctgcagcggcgcgaccctctgacgtctccgcttctaattggtcaagagctgcgactgcagttctgaagcctaactggttgcccgtgccgcctcggaggtgaagtgtactgcgctgattggcttccaggcgccggccgcgtgtgatgtcccgggcaacgattggctctcgcctaccgggggcttctctcaccgggactcgggactcccgggaagtggaccggcagaagagggggctagctagctgtctctgcggaccaaggagacccccgcgcccccccggtgtgaggcggcctcacagggccgggtgggctggcgagccgacgcggcggcggaggaggctgtgaggagtgtgtggaaca

SEQ ID NO: 31186 - DNA, 2300 bp, Homo sapien
agtgagcggagattgcaccactgcactccagcctaggcaatagagactcagtctcaaaataaataaataaataaataaatgtgagctgaaaggagtgtttctctgtattgtatgttttttctagagctacagattttattcgtactttatcacttttcccaactcacctcataagcagcacccagatcctggaatttctcctgggcttgtggatcatcagggttccggtcgggatgaagctgcagggctagtttcctataggcctttttaatatcctttatagaggcacttcgaggcacccccaagatcttatagaaatctcgtctgggaagtagagggagagaatacttcattaaagagttacatgttacatttttcaaagtaaaagatttatttttcctctacatttaggtttgtatctgagcaaagaggtataaaaatgaaggtttatgtgacacatacacacacaaagaatgactaaagagagaacaccagaatttgtaatgaatcttatatattgaagtaatcacagtaagaggctatatacttcttttcggattattcaaaacatctgtggcacttttctttcagaaccaccttcggtcaagaaaaccacttccttattttatggtctcatgttatctttaggcaataaccatataatcaaattaactcttcccccctttccctatactggctccaaatgattttgacttttctaaaagtcaaataacactctcaaaggatgattttccttctttaaaaagattatgccacataaatgtcctaacagtagcactgccagaatgttaaagatgaagcaacttaagataataaatagctcaagaagctgggaagtacaagggctgtctaaagatcttcttgttcccatcccgcatccaatttcgttcagtcccaactcgggctggcatcatccacccactttaatgtcagccccagaatggctcttcgaaggcttggcatagagcatcgtccgcttctccacctcagcggggcacagcaactcacctctttgatcaaacaaacgtccatcccctcaacctcagcctggcactgtcactatctttccttacagtcaggcatccctctttcttccccagctctacgtgacactgcttcagctcgcaaccaccttctttccctcatcccccaaatgccgtttggcaatgcatccaactcccactcctctgggcaaatctagctctacctaagaccctctctggacctaaggccctctcactggtgtcacccacggttctcctctcaccccactagcctggcccatactaccccttcctccgccaccccgccaacccacagcgatgcccctctccactccgtcagtctggcaatgccacttcccccaccccctcccaccccccagcaaaggctgacccacaggccccgttgtctgcgagtgtctgttcctcacccggcaatcaccgccccgatgaggtatagcagcaacaggcaaaaggtgctcaggttctgcggagccatggttcctctgtcccgggtcctgttccacacactcctcacagcctcctccgccgccgcgtcggctcgccagcccacccggccctgtgaggccgcctcacaccgggggggcgcgggggtctccttggtccgcagagacagctagctagccccctcttctgccggtccacttcccgggagtcccgagtcccggtgagagaagcccccggtaggcgagagccaatcgttgcccgggacatcacacgcggccggcgcctggaagccaatcagcgcagtacacttcacctccgaggcggcacgggcaaccagttaggcttcagaactgcagtcgcagctcttgaccaattagaagcggagacgtcagagggtcgcgccgctgcaggaacccgctctgcctgagctaccgcgagtcgtagaaaattacgtaatgatagggggccggtcagagtgagggcacctgaggtacacgaaatccctccggcttgcccacttcctcggactttccaccaatcaggagcttcctccccagcaccaaccaattgtgggagagaagttttctctgtgctacaagcccggaatttcattcatacccagctacgctccgaatgagggagcagaggtacagcggccgaatgagcgggaacagttattccacgacaggtgtacatcagacgcattgcttaggcctcttattttacgttctccaagcaactccataagacaactgtctcggaaaggctacagtgatgacagaccgacttaagttcggattcggcttccac

SEQ ID NO: 31187 - DNA, 2300 bp, Homo sapien
tgttggaaatcagttcatccttgcctacttgctaccttgcaatctgcaaaccacttaatgagcaaaattattgttagcagagatagaaaaattcctgctcccatacccagagctgcctctctttcgtgctatcaacaagtgagggtgattataataaccagcattaggggaaggaattagggtagaggacctttatctcttgctttctgggagtgctgggtggttggaataataaacactttcttcctcactctttgaacctctctttattgagcatttgaatttccacattccctgatgattacatatactaagagactttaatctggggtttcaggtctgaaattataaacaaaaagatgttcgaatctgcatttttatggggagagttcattgttttcttcagattctcaaagggttctgtgaacccttccccaaaagaagtaagaatcactgttgcatatagtagttaccaccatttagtgcttggttgaggggcctggggtgggggagtagatttttagggtctgtaaagatgtgtgagtaacatgattaggacatcttttccccccgccaggatcaatttggctggctgaagtgatccctagggaataccagaaagagaaacagcttccccagcccccaccctgttctttccccttgcctttatttaagattcagggaattcattcacctgagttggttggtgggagagggagttatatagttatcatcttcgctatgctaatatacaaggcttcttaataacaccaaaaattaacattagattaaaccacctgtaggattgaaggtcaccttttttgttaatctcaagttactcttgttacttacaaaaattagtttgggtcttatagaggctagaacttccttctccttaagcactaggattttactaaggctgatgcttttttagcttatttaattacatactcaagatttttgtgtagagcagtagcttctttcaacaagttagcttctaaaaagcatgtaaagagaacactacatatgttaaaattaccgataaaaatttcttaaattaaccattacatttagcattacacaagtttatgtatactatactctttctcaataagtccaccatattcagatttttcccaatattgaaagattattatttcattggttgggtccaacattgaattcattggcatactgtgtgtgtatgtactgtactatatgtatgggctatattttgttaaaaagtggatttttttgtagtaagggaccgtatagttacaacatggttgatagtatataaatttaaaattatgtatgatagttgactccattgtattaaaaaataccttgtagttttgcacaatgcattgatagaaacaatagtttatcaacgtaaagaaaatgagttaattgtgaaacatagagtcttgatttttttttttttcctgatgattttgcacttatctttagcttctttggggattttggtttcatgtttggaggaacccctcgtcagcaagacagaaatattccaagaggaagtgatattattgtagatctagaagtcactttggaagaagtatatgcaggaaattttgtggaagtaagttcaaacaatatagctgttcatattgactcccagaacttgcacttttgactaaaaataagaggtttatatgtaccttctctgtctttttgagggtaagagagagtgatcaaatgcacaaaattgaattaattataatgcttggttcatgatacactgatgtcattgttttatcacccagcttaagaactaagtaaaacattaccatgacttaatctacctacatgctacttccctgttccattaccctgcctcccttcaaaggtaactactgtattgagttatgtctttattgttcttttgccattcttactttatcatgtatatatgaatacctgaataatatattgtttattatattgtttttgattttttagaaatggtattttattcattattttctgggactggttattttcactcactattatgttactaggattcacccttgttgcttattgctatattgtgaccataatttattaataggcatttttgtttcttccagttttattcaattccaaacagcgcttttatgaacattttaatccatatttccaggttcagatgaacaagaatatctcttgggtggatatgcttgagagtagaattgctgggtaatatgaaccaatgttcatttttacaagttaatactgtattgcttttgaaattgattgtactgatgcttctacat

SEQ ID NO: 31188 - DNA, 2300 bp, Homo sapien
taatcaaaattatattaaaatattattttacatagaaaaaaagaaaagatataaatgcatcaaaacattaacactgtttatctctgcatgatgagattgtgaatgatttcttttttgagacagagtctcattctgttggctgggctggagtgcagtggcactatcatagctcactgcaaccatagcctactccaggtcttatgctatcatcctgccttcatagttgggattacaggtgtgtgccaccttaccacactttattcaatttttcttttttttgagtcggagtcccactccgttgccaggctggagtgcagtggcgcaatcttggctcactgcaacctccacctcctgggttcaagtgattctcctgtctcggcctcccgagtaggtgggactacaggcgcgcgccaccacgcccagctaatttttgtatttttagaagagacagggtttcactgtgttggtcaggttgggctcaatctctaggcctcgtgatctgcccacctcagcctcccaaagtgctggaattacaggtgtgaaccaccgtgcccagcccttcaatatttttaaagattatataaagaaaagcatagcttccacacacagttcaggagtcagggccctgagtgaaatggagtataaggtgatggaagattgcccctggctttgaggatcatcttgctggatgaccagagtttgtttttcatctggaagaatcatggtccccctcttggagagaacctggagtcctggccacaccttctgagcttctgacattaagattcggtgtggtgtgtgagcagctgggagtaaatgtgagaacagtcctgccaactaccttctctgccccatcaccactcacttcacctccctcaccccgattctcaccccagaaaatcaatattaagcttccctttggaggggcccctcttctttcttttttttttaaccagtttttttttctctgaagcaatatcaaacattagaacaaattcacccacacacaatgatggcctctaaatatttgaagaccatgttggtctccatgagagggcttctttgcttcagactaaaccaaaccaggtccttgtgtgatatttcccaagcctctctttatcctgccaaccctccttggatgtcacacttggaattgtcaagggtcacttaataggcagtgcctggagtcaacactggccctctgttctggccagaaagacacactgtaattctgctgagtctgcaaagaatgttcaaggggtatttgtgtccgtagctgctcgtgcagcatctcagcctgcggtgtcagactcgaacccagagctgtgtcaaatgagtcaggactcccctctgctgcccttgtgcactggcaggggcactaggttactagtgctaggagactctggtcagtgcccatctgtgctgtcacatgcagggccctggcagtgaggtctggagaaggaagagaaggggcagggaaccccacacgttttgctggtcatttcccaccgtggtcctgccacgggaacccccttcttccacctccattccccactttaggcagaaacatctctcatcctttttcttttctccaagaatcttcccccaaaatcttggcatctcctatacacatctgtacctttgctatatctgtgggccttgttctccctgtaggactcctcttggaaagctaactccccctgacattggagaattttatcaaattgctgagtatcctcccttccctctcacagaccccatggcatgctcagatcacagtagaagacatttcctctgctgccaaacccatggcactctgaggctgactgtgtccacctcattccctcagctgtcttctctttgctgctattaccatgttccaagcagactttggagcatctcccccacagcagcatggactttggcagatttcttggggaccagcgatgtcctaacctgtttgcttttccagggctgatgtttgcagggtgtttttttttttcttttgaaccaaagcagaaatcatcctgtatccttatgcaattcttccggcaggctccaacagataaataaagcccaccaccctccatgggtctacctttcccagcagagcacctgggttggtcccgaagcctccaaccacctgcacgcctgccagggcctctctggggcagccatgaagtccctcgtcctgctcctttgtcttgctcagctctggggctgccactcagccccacatggcccagggctgatttatagacaaccgaactgcgatgatccagaaactgaggaagcagctc

SEQ ID NO: 31189 - DNA, 2300 bp, Homo sapien
gaggaaatcctgaaggtatttggaaatgcaatgttagaattcaataaagaggtccaatctggagctattaagttgcagttatctgggtaacaatgatagtttaaatcatgagagaggataaacttgccaagcagagtacatatttaagagaaggtcaacaacataatcttctgaggccaccaaattcagaggatgaggagcagcagcagaaagggagggcacttactgagaacctagaatgtgtcaagaaggtgtcatacataaatttgtagcatctcatttaatcctcccaacaccagtacatcagctgttatctatgtctggttgtataatgtgggcagaaagaagtgaaaggtgaagcagcttggctcaggttttgcaggtctatgtgacttcactgcttctttgagagacatgagatcaaggcatgcattagccagacacagaaaaatagacatagaaaaatcatctgcacgaattttaagttggagaggagggaaactgaggtaatgcaaatgaaacaaactagaattcactgcctcagtaaatgccccccccccacacacacacacacatctatccagttcacaaagccacaaatccaggaatcatcatccttcacgtctttctcactcccatatcaaattcatcagcaggtcttgggagttctacctccaaattataacctctttttatcatgtccactgcccaccaccttagaccaactcatgttaatcttttctctagaaagctctagtgactttctatcctgtggctactcttgcccagctacagcccactctccagtctccctacagcaacaacaccagtaaactcttgacaaccaggatgcccctagagcaactgcatctgccagtggtcaccatgacctcagagtcagtcgtccttactgctctttctacagcatttagcacagctgcccatagcttcttctctggcttccgtgacacctagtggttttcttacctttctggcctttccttttggttactggaatattggcaaaacctctaggcacaagtgataaggtgagtgtcaacacttgattcattctccttggtttaaagtgaagtcactcaactgggtgtcagtcctgccctctaaaattccatctgaaagggcccatcactgaggtagatcggaaaaacttaatgctgatggacaaaaattgaaattgcccagggaccatgctaaaatggggagggtttattcacatatgctatctgagcacttggacggtgtctacaaatgtccacgggattcacctgtccaggcatcctttatctaatgatactacaagtcacagctttaacttgggtccttaaaatagattggctaggaagaccaatcttgtgttataaaatgaagtgtatacagtacactcaacgtatatcttaaacataattaacaacagatataaagtgaggatcttgttttaattaccaatccctccttacctcggtactggagaaaatcaatggatagtttattctgtacaaagttcaggagcttggcccacctttagcaatattttctctctcttataaaatgagaagaattattttctcataaagaaatggtcatatcttggccaggtgcggtggctcacgcctgtaatcccagcactttgggaggccgaggtgggtggatcatgagttgaggagatcaagaccatcctggccaacatggtgaaaccctgtctccactaaaataaaaaaaattagctgggtgtggtggcacgcacctgtagtcccagctactcagggggctgaggcaggggaatcatttgaatttgggaggtggagcttgcagtgagccaagatcatgccactgcgctccagcctgggtgacagagtaagactccgtctcagaaaaaaaaaaaaaaagaaatggtcacatcttatgggttgtggaaagatcctagtctcactttttcctgtatctggcaatacagcaggtttttgttctcttttggttctcttttcactttgattttgattagggacactgtgtttgttggggtaaaaggctatgcatgtgaggggagctgggatgaagtcgcaataagcatgaccacattcagcttagaaccttctttattaaggaaggtctttcaggcactttcattaacaggcacatataagcttagcaagagcacctttcaaagtcacagttccaatggtttttgtaaggtcaaccagaggcagagaacacaatcatggtggcttaccgtcaaaatcatgacaagttgtcaacctaatgccttctgtcaaacataa

SEQ ID NO: 31190 - DNA, 2300 bp, Homo sapien
taacttccatgctgatactaaagttgttcccatatgtgatgggaaccaaacacaagtgtacctgggttgggcttctagggaaagaggaactctattctctttctacaggcaggtgcaactgtgcatgtatacatatgctgggagtgccattgttttatgaataaggaaacaaaatgctgtgtggcacacccagtgtcacaggccctcttaccgtgcagtggaagaggtggaatttaaacccaagactgcctgacaccaaaggctggactcttcccctgcttcctctcccagggctcccatactccacagcctaggagaaggccagctcaggttgtttgagactgggttgaaacccaggtgcataagtggtggtgcacgatttccatgttattggatctttttatctgtttgagtcctgccttttattttagttgcactcatggccttcacctatataagtctaatatattcctcaggtcccagaccattctcctcctctttgttctgcatcctcaggccccagatccttctcaacctctttctgtacgttgctcaagctcaatgaatgtttgtctcctcactggctgaagctaaacctttgttgtgccccagaatctgaatgtctggtttctgtacccattttgctagtatcgttcctatttgaaaacaatgcctacagcccacatccacagagctgggatctttagatttgggtttttcaatcaatcctcaaaaactatttctctccagaaattaattagggctgtgcctcagttagttttatgtagttataacagaatatcagagaccagggaatttataatgaacagaaattactttggctcatggtttggggggctgggaagtctaagatcgaggggctatacctgctgagagccttcatgctacatcataacatggtggaaggcatcacacaggtgaaaggaagagagaaggggaccaaacacatccttttatcaggaactcactttcaagataatggcatattccattcatgagggtggagccctcatcaggataggataatcctctcagcattacacaatagccaccactgtgtaccagcaagcacacagaaggattcagcagttcctaaacttatttgaatgcagaatccttggacagggacaggaaggaagagaagggctaggagtagggagagagttagggggtggttactcacctcatggactagggctttatagaatgcccttcatgataacctcttctagaggcttctttcccattttgtctcttttctctcatgacaaactactgctgatatgtgttttttgttgaaatacagtttttaaaagataattgtcttttgtatggtcccaataagtagaacctttctgaatcacaaatagaagctaaaaaaaaaaaaaaaaaaagaaggcaagagtcccaaccaatgtgttgccacccacctgcccttcagtatctttcttttagcaagagtatggggctttagtctcttaatgagcttgcttccatacatatgcataaaaggaagaataggcttgaaatacaatgtgagaactttttatatctctttgactttttccccttaagtaaagtcattgtttaaaaataacttaaatgatgataagtagaacattttccacccagatggccaaagtgcttaaggaatctcaactgtgcttctggcagatgactgtggggttcaactacctccctgatctaacaagggctttgcacacagagtgtcagccaggaagtctgaattcaccaagcaccactgggacataagataactattagagtggccaaggagacctccacagcaaaggtgttaggggagagggggagaatgggacagtcctccatattcctattcaggaggggacctgcaaatcagaatctaatcataagagccttgaacaaatgttatgatttctcaggaaacagttgggaaacttaaattcatttgtatgtacaggtggatatgaggttgctcaagggtctaaggttagaatcattgggaaatgctatccaaagtactgacttaggaaaatccaagttcagaattcaaggtgaacttggttagcccttccagttgtaacaaaaccgctcaagtctgccttaaagagccttacaagccagccagtccctgcagctccacaaactgacccatcctgggccttgttctccacagaatgggtctgctccttcccctggcactctgcatcctagtcctgtgctgcggagcaatgtctccaccccagctggccctcaacccctcggctctgctctcc

SEQ ID NO: 31191 - DNA, 2300 bp, Homo sapien
gcatcattagtactgtatcactctttaagattcagtaaagcaacaggaagaggatgcatgactccctgaggtactctgtagtctcagcagaacagcactgtaggaaaattatattcctgttcttgatgcctcttcccatcccctcaacattcccattcctttccctacaccagcatttggttcacccaggacaccccatttagggtgcagccaatatagccataatagaaaaacttcattaaggagctcaactcataataacaaaaactcaaaatagtttttgttttaatcaatagctttccccttccccactgggttggagcctcttaacaccttgaccagattccatacattcctgtcattttctgttgcactggactggtcccattgggtatttaaaagccagggttactgacattaaaagttcaattgcaaacattattcaaaacctgttgcactcattaaccctgtgacttgtggaaatgagatctacttttcatacacctcccttttctttctgtcttcaaatcctttccctctcttcagttcactctagaatcccagtaattctcaaccttgactgcacacactggattacctaggagtttaaaaactaccaataccaaagtccactcccagagattctgattaaattgtcctggaggagtccttgacatcaggactttttaaagctcctggggtgattctaacatgaagccgagtctgagagacatgactgcagactctcacagacactcactgcggatagaacagggaggaatggagatgctgcctaactggctgtttcttggcagtgaggacggaacctaggctgattccctctggtcccttctgatgctgctggctctgctggtctgagggttgcatataggtatacgggtttcttctgaagtgtgaaggtagggggtcagctgtatcatagcccagtccccccctgctgatcccttctaacagtgggatgggcatccaactatttgactcttactctcaccaccatcctcttccacgtgaatcaattctttttgcagggaattggggtggcatgaggtgtccccaacttctttgcaggcacactaataataaatagcatcacttattcagcatctactctatgccaagaattatactggttgctttctttttttctttctttcttttttagatggaatctcacactgtcgcccgagctggagtgcagtggcgcgatctcagctcactgcaatctccgcctcccgggttcaagtgattctcctgcctcagcctcccaagtagcggcgattacaggcatgtgccaccatgcccagctaattttttgtatttttagtagagacagggtttcaccatgttggccaggctggtctcaatctcctgaccttgtgatcagcctgccttggcctcccaaagtgctgggattacaggcatgagccaccgcacccagcctgatttcttatttaattatcacacaagcctgccaagaggtatcaatccatatttcgtaaatgagggaactatcagagaagttttgttgcttacccagcattacacagtaagaaagtaatagagccaggtgagaaattcagatttgacttcaaaacgacagcctcttcattgttctattttacctgaagtcattccttttataatggtacctgtttaacatgttcccccgcttagataatgcagctgccttctactgaggagttttagtgccatgatccatcagtccactgactgatgatggagatttccagctgagacaggcaggcagatggaggaaaattacccctagccccaccccctacaccaacataggcactgcttatattcaaagacgtactttagatctgctatctactagaaaaatccagatttgtgcagatcacagttccacccactcatcagcatttctcagctttctgcccccaggacccactaatcatttacagcttgttgatggttatttgaacccagggtcaaggtgaacaccctcagttacacaacaaaaatgtatcaaggttttgtttaatcaattgcgtgtgtttcagaaagtctgtataaaattctctgcagtggcagatcatagcaagggatggtttaacaaaatgaaggcactcattgcagcactgcttttgatcacattgcagtattcgtgtgccgtgagtcccactgactgcagtgctgttgagccggaggctgagaaagctctagacctgatcaataaaaggcgacgggatggctaccttttccaattgctgcggattgctgatgcccacttggac

SEQ ID NO: 31192 - DNA, 2300 bp, Homo sapien
tgtgtctgtgtgtgtgagggaggagtaggggaagagatacaacactcctggggaagggagtgcaattgctagtatcacataaaaagtatgaaaacttttccaagaattagggaggaatacgatttggcagaaaagtaaagtcatatccaattcaatcaaccttgaatgaatttaaaggtgctccttgtagttaggacgccagtgctgaggctcagtcattgctagcttttaatattagacatagcatctgggtgcggtggctcacacctgtaattctagcactttgggaagccaaggcaggcagatcactagaggtcaggagttcgagaccagcctggccaacatggtgaaacctcgtctcttctaaaaatacaaaaattagctgggcgtagtggcagtcccctgtaatcccagctacttgggaggctgaggcagaagaattgctttaacccgggaagtgcaatgagctgagattgcaccactgcaccgcagcctaggccacagagcaagactctgtctcaaaaaaaaaaaaaaaaaaaaaaattaggcatagaatctaagaataaatttaacctgaaatttataagtgtatataaaataagatgcaaaaccatgttttacatctctccaagaaatctttgttctattttataggtgagcacaaagattttctttacataattttttatcagaaacaaaaagattgaaaatagtccaaacatctatgtcctgtgtcaaaaaaaaaaaaaggaaaaaagaaagaaaaagaaaaattaggtttgtcctcatgaacatggctctacagactttttaaaaaaataaagtctgaacaaggagcagagtgaataggccgaattttttttttttttttttttttttggacagagttttgctcttgttgcccaggctggattgcaatggcgcaatctcagctcactgcaatctccacctcccgggttccagcaattctcctgcctcagcttcccgagcaactaggattacaggcatgtgccactacgcccggctaattttgtatttttagtggagatggggtttctccatgttggtcaggctggtctcgaactcccgacctcaggtgatccacccatctcagcctcccaaagtgctgggattacaggtgtgagccaccgtgcctggccaatttttactggagtaaggatgttgataccatcaagcctcacacttctgctgagattatcaactgtagttttccaatgttggtctacaggtggggaccattctgtaatatagtttccccactctgtgttgatgtgaggaaaataagaataataaagttttattgctggctttgagggagaagggttctatgacccgccttggggaagagaaattctagcttctgtggcctgccttgagagaagtggagcaggagaaagacgggcaggagaaagcaagaaagagactttgcttttgcagcctttttaatgtctttcagttcaaagtactcggcatgccaaagagccatatttggggctatctttttctgtgccaaaccaacaacaccaaaccagaaagaagcaagcatagggaatccagggcttcactcaacccatcccttcctatgcttttcctctatctccaccctgggagcaattttcttttacagaactaatgcaactgagcagagaaaggctggcctgtccagagagcagataggacgcccatattttattttcagttgtgccaatgtcctgcatgggactcctggaactcactggatgcccctgtgcatgagcttcttaggcatgtaatagaattaacagcagtctgcttctatgcaggtaggtatcctgcaaagaaactttgtatgaaatgtgtctgcacattgtactcattcttgcattgtttacccatgtagtgaccttcaaaaatggctttgcaaaagtcacaggggaataaccgagttagtaggcacttgtttcccctccttcatcagattctgctctgatttgctacataaagttgtataatcacctggaaatatgcactgtgctgccacgtgattttcaaatgcaaatgagcaggttaacaaccccagtgttgcaatgttctagctgtaaatatgtttggataacccagcagagccatttaacctttgggaacaaggcaactagcgtctggcagcaggaatccaaccagtgccctgagttctgaggcagagaggaggacagaagaaacaagaggctggagattgtcaaattcagtatcccagttggctcttgattcttggtgaaaccatccctcagctcctagaggga

SEQ ID NO: 31193 - DNA, 2300 bp, Homo sapien
tttgcttctctggttgctagatagctttagaattgtcagctgaggctcttgaagagcaaaactaaactaccttagttggcttagatagggaaataatctgacttttaggattatttgcagtataaatgatttcaaacactaaaggttgacaaagaagcatttatagttcactgagaaggctatcttatttcagattccaggtaagcagaatcacttaaatttaaaagagcacgctctgtgttgatatgcaaaactttgttaaagtatacgttttgatctttaattcatttattagttacaaatgttatttactatttagtaagcacacgcaaatgtggtaatcactgcatttattaggaatacactgtaaggttacaggcagtgtgggtgtggattttgactgtatttgaagttttcttaccttgaaacttacttagcacttgtaaacctataccatagagtttagcctttatttcctcttaagagacttgaaaatcctacaccatctagtgtagtgctaatcctaaagaaaacaaccaacgattaagtgttaattgttgattggtatcaccctatgatcaattgttttcaccctaaggctcaagtgaaaccaaacggttggtcactttttcgatttagtattttttcaatttcttagatctcaggatatttttagtagattttggatgagacaacaaggatgtctgacgaccatcattctcagaaaatatctggcatcacctcaaatctggatttcgaacattacagagggatgaatgaggagcagtaccactggactgagggcctggcccactttgccatcttggtattcttaatctttgtcctagttcctggcacgataagaattttcaaataaataaataatttttgtattaaaaaagtagtatttagaaccgaatatcttctataatatagaaaattgagtcagctttcccagtaatgattctttaagttggccttctgaaatatgagaaaatgttaccctgatagtctcgatgatattttgcaccatgggtagggttgtattttaaagttaaatgactacatatattgttttttgtttttgtcgagagacctgagatggggctaattgaaaacgtctggagcttaaagacccgtgcagtttacgcagcaaggatattattgctctgaatttcaataaatcaacatttcactatatatcggcaaagtctacagcctttaaaaaatgaccaatatagacggaatcaaaaccgatgtagtcccaaagcggcacagagctgtatctgccaaagcgtccatttaaattcgtgcgttccaaggaaaattactgcttagtttctatccatttgcaaaagtttatgatttttttcaggcattcctcacacctgttaggttaaaatcagtaacactcttaaaaagaaagcgagagaccggaaatgatatgagaatagaattggccactccagagacatctgcaaatgacactccatttttccttctcgcgctgcaaaatgtaccggtaaaccggacttcccgggactcgctgggtggccgacattttccctagcaggaattttacgtttccaagatctgaatggatgttaacggtcgggctaaatgccaggcaggtcttcattgtggaattaaacagcggtgggagcaagcggaataaccgagttcccctcccgcacctgagtgccggcagcgagccgcgagccgggacctgtcacccgcgggaagccccggccgcccgacgaacagcatctccggtttccgcctccggctccggcgcggctcccccggcccgcctctgcgtcagggacgcggaaaccccgtaggagcagggcgggcggggaaagcgaggtttaactaactccgcagctatattcttccgccgcgaggtaaagagtcccaacccaaccccgggccctaggatttccagcgaccctgtaatatcgagaaattaccacatttgggtttttctaccaacttgcttaggattttatccgaggtaacgaccccaggatcacaattttgtagctgaccgaagcacggcgagaaaattcctccgcaagaaacgggttccggccacgagcctataaaaaacgggtggttgggcgccgctgtcttttcagtcgggcgctgagtggtttttcggatcatgtctggtggctccgcggattataacaggtatgcagtctgttggcggtcgcggtctgtagtgaaggtcatagggcgccaggggagatgatagtggatggcacggaggcaaaaactctaaattaatggacgttttc

SEQ ID NO: 31194 - DNA, 2300 bp, Homo sapien
accccgatggtgtcatcgaggtaagaaacggttgtggatcttgaagctttggaaaggtgagtgtgttcatctcatttatgcgtgcattattttttctaacttacagagcaactggaatgagattgttgataactttgatgatatgaatttaaaggagtctctccttcgtggcatctatgcttacggttttgagaagccttccgctattcagcagagagctattattccctgtattaaaggtaaaagaaactggcatttttaggaaattgttctacatagacatgaaccataaaagggaaagtaacctctgggggactagcacctgtttgtattccttaaagtgaaatgatggcaatcatctttcgggactgacctgaaatgaagagaatactcattgctgatcacttgattatttgggcataatgttccaaatggaatacatggtgtgaagtagaagtgacaatttgatgtgggatcggtaaatgtgtatcctactttttttagggtatgatgtgattgctcaagctcagtcaggtactggcaagacagccacatttgctatttccatcctgcaacagttggagattgagttcaaggagacccaagcactagtattggcccccaccagagaactggctcaacaggtattgatagtgtagttcaaaaaaactgcttgcgtgttgcataggtttcaggtttcacaactgtgaagaatttaaaacttagtataaattggtcctaccagatccctccttttaattgtccatgcatgcagggagtttttgttgaaagttttaaaagaactgggtatgcaggtatggtttgtagggttgtatactaatagattgagaatccgaagcgctctcttggatgtactagatctgtccccattttttaagtttgaatgcagttgtgcaacatgaaaactgcagtgacatgttaccatttgactgtctccgtagttcgtgatgcatctgttgcatgctatgttttcaaagctcactgctatattggctttgaagtaaaccttcctaataaagctgtaggctttattgaggtcaggattatataaggcacaataccctctgggggaaaaaaatcatttgccctagctgtaattacagaacataaatttcactacgtactccctacctacagtgaagaataatgtaggaaacgttattcttggattgtctagctgatgcgtggagcagcagcatcccaagtttgacaaggcataagaaagacattaagggaattttaccttgcagcagttaggtcgtctgcattttaagcttggaagtagttttgtgctgtgcatgcataaaagctgttggcagaccagattatatttgcctttatgctttaaaaattagtcattgatcctggagttctgcggaataataattaaggcttgggttttagatccaaaaggtaattctggcacttggagactatatgggagccacttgtcatgcctgcattggtggaacaaatgttcgaaatgaaatgcaaaaactgcaggctgaagcaccacatattgttgttggtacacccgggagagtgtttgatatgttaaacagaagatacctttgtaagtattgtctttaagagagtattttttttaaaactgttaacatagttgaaaagtcaaattgtatcactgagtagatctagaaatgacagtatgactttgtttctaacagctccaaaatggatcaaaatgtttgttttggatgaagcagatgaaatgttgagccgtggttttaaggatcaaatctatgagattttccaaaaactaaacacaagtattcaggtaagcattacttcacccccctcttaaaggtagagatggggtttatttaatgcaggtactgttacaatacaactgatgtgttttgttgtcgttccccctgcttaaagcacttgatgcataactctgtctaccttcattccgtagtaagacagagacgcttggcttcagacattttcctttgggtattaatgtgtaagttgtgctacaacataattttctctttttaaggttgtgttgctttctgccacaatgccaactgatgtgttggaagtgaccaaaaaattcatgagagatccaattcgaattctggtgaaaaaggaagaattgacccttgaaggaatcaaacagttttatattaatgttgagagagaggtaactgtctgattgttagacattattttaccttcttgtataagcactgtgctaaaattgcagacactaggaccatgtcttggtttttgcaataatgctagcagagtacaca

SEQ ID NO: 31195 - DNA, 2300 bp, Homo sapien
caagctttgagtctggagtcagtccaagatgtggattatggctttgccacttacttgctattaacctttgttgtagtctgaatgtttgtccccacacccccaaattatagttattgaaattataactcccaaggtgatggtatcaggaggtggggcctttgggaggtgactggttcaatagagtggaaccctcatgaatgggagaaatgccttcataaaggagatggctggagaaaactagttagccctttccaccaagtgaggttacagcagtaagacagctgtcaatgagggagtgaaccctcaccagccactgaatcttatggtgccttgatcttggacttcccagccactaaaactgtgagaaataaatttatgatgtttataagccacccaatctatggcttataaacatagcagccaaaatggacaaagaccacttatccatcagcttgtctgtttttttgtttgtttgtttttgagacggagtctcgctctgtcaccaggctggaatgcaatggcgtgatctcagctcactgcaacctccacctaccgtgttcaagcgattctcctgcctcagcctcccaagtaggtgggattacaggcacctgccatcatacctggctaatttttgtatttttgtagagatggagtttaaccatgttggccaggctggtcttgaactcccgacctcaggtgatccgcccacctcggcctcccaaagtgctgtgattacaggcatgagccaccgtgcccagcccaacttgtctgttaaatgagatcataacatccccctctctgtggttgtgctgttccttcaggtagcaaatggataccatctattttcatagatcttgttttatcaactgtattgtggtataatttacatacaataaaatatacaagcattaagtatacagtttgataagttatggtaatgtaaaccggtgaccagatagataacctgtgtgttttttatactgtccagagattgtatcagactctgtggaaattacaaagtagcataaagcatccttactttggttaaacccttgattgggttaggcctgggatgtaagttctcacagccccctacttcctctgcataaccacacatcacattgtctgtcactctcctagtctgtaaagctacttgagggcatctcgagcgttttccctgctgtatctgcaggcatctaacacagtgcgtggacattctgtaagcatttgttgcaagataaatgaaaaaaacgtacaaagttaacaatggatatcatgctgagtttgtgccaaacaaaacagtcatttgaagaagacccggaacaaccttatgggttagtaattagtaaagaccagtagagaaggtggcctttgagaagggtcaggtttcaataggattaaggagcatttcagagctaaaccaagtacttggaagagataaaagcagtgggctcaggcaccagcctagcccactgtgcatgaagcttggtggggctaaacatgattatcagtcctttaacttttattgaacgccttcacttccagatttctaagtggggctcaggaattataatagatgtccacagctgcatggtcttctctctccacaacacgcagacactattagaagtaaaagccacgtgtcctcaagagggcaaggcaaagcatcttcagatgtctctgcccttaaagcacacgcgttctgctctgcgacgaagcaggacaaggaggacagggacctgcacctccggaggcccgcacctacgaagatagcgggctcgggaccttcggtggaccggcagggttccagaggcccgcgcgccgccgccccgccctcattgctgagcctgccaggtaagcagccccagcgccgtgcccgcgcgacctctactccttccgggagggtcgcgctcacgtctgaagtgggagcaatgcaccgggacagggacacctcctaggccatgcctgttccagtccagttctgcctgaaagtccggctggctcatcacctgcctaaataaaaccgtatacgggcaaactccctccgcaagcagcgcgccccagcaccggaagtgacgcgttacgtgcccgcgtattcctaccggcgtattcccgccctgcttttcgcccgccgttccgtggcgggaactgaggcgactgtggggacatcagtgatcgtaagtctcctgggcccgttattctcagattaggtgacggagctaagacttcgagaccatctcgtcctttttgtatcgcggaaacctgaggaacgagccggcggcggtgacctgcacgagaag

SEQ ID NO: 31196 - DNA, 2300 bp, Homo sapien
cttaggaggcgtggcctccgcgagcgtctgcctccgcccgccgcgctcgcgcaggcgcactaggggtccccgtcccgcgaggtccttcgccgggcggcgggagctagacgagcacgcagggcacccctcgggctcccgggaggcggccctgggcgtcccctttctgccgccgccgcggccccggctgctttctgcgtagctgggcagggcccgggcccccacatcgcctctctcgggaatgcgggcgctctggagccggggagccggggcgaccgcagggagggcagctctccggggtggaggtcctcgggcgccgcgccctcgcctggaaaccagccgtcgcccccgcaggagtcagccggcgtggacgccccagcacgctccttcttggtgctgccggtcgccctgcaattccgagaagaaagtcagagacgccgtggcccacagaggcgcttagttttcctcgctcacactcacgttgcttcctcatcgcgttcttctttttctccctgggtgctttctctcctctccaggaaagcggatttggaggaacaggtttcgtgactgtcatccaactggaaaaggccccgcgagctggaagggggggcggggggggggacgggtgcaccctcagagttattgctggaggctgtggccaggccgggcaatgtggtgacttccgctggcaggctgaggcccaccccagccctcccacctgggccacggggctctcagcgggagccccagttatgaccggacaccagcgcaccgccaaggagacagccacgtggggacatgccgggctagcagggtcagagccactttgaggactagtgacctcggttccctggcttaaccaggtccttatgggtgagaatcctgaagagggggagagggatggaggcgagggacagtaggcaggaggagctgatgaataggaaggaggaagaagatgaaataaacaagaaagaaagaaattacgttcagagcgctgctcaccttttccatgtcttctgcaccttcatagccttcaaaggtgtccatggagctaaactccctgctggagcagccttggggaaagaaaggaaaggatggggcctctctggggtgggaggacagcccctctgcccatggcagggtgtagcaggcagtgcctgttgcaggcggggtcctccccatctctaactcctgctctcccagggcctgcactccgctgggctgtgaagggagtctgattttttcaggctctttccagcgctgaaatgccttaattcactgagaagaagcgtccacatgcttttcatggccctacctccctgttcgtccaagaaaacagtcgtcttttttgcttgcctgtcttctaaccatgcctccgtcccttcttcctcccctgtctatttcccaccctcctccccttcttgcctccttttctttcccgtaattaatgtccatttcccatctccctggcagcctctgccaagtgtcactgctccccataagggaaaataagaggaacaagcaagtgcatccatccctgcctctctccgcagtgaactgataaacccatcagtcttgcccgtggtgcacctgttacatccccgggaggtgttggacactgtggggaacagcagccaccgccaaatactcagcaactgccctgtgcctggtgggatggtaggcgtttgtcaaagtttaagcctcacaaccctgtaagggtctcagccccctttacagttggggaaacagacagcaatggtcacttggccaagtcctcttggcctgtggcagggcagctggcttctccagccctgctgctctttaccctcgctctgagtgagatgcggtttctgcgccacacggctcacaagccagggtagggagccgagcatctgcataaagctcccagcacagggcagccccagactgaggctcggctgagtaatccacgcggcgggagccgtgctaggaaagtgtctgctcaggcgagaattcagggaggtttgggcaggccttgaggggcggacaggactggagagggagggccttctgggcagaggcatggcgggagggctgtaggcggcagtggagggagctgcagttatctgggtgagcaggcagcggacaagtgacgtctcccggcctgctgccccaggccccccacaagccgcgttctggggccgtggcctccccagagcagatcagtgggggctgtgtgagcaacactgggggcagctgggcagcgcctccctggaggcccctctgaaatcccgccggatgctggcaggctccaagggggctgg

SEQ ID NO: 31197 - DNA, 2300 bp, Homo sapien
cactccatcaagaggggtgaagggcatgaggaattagaaagcatagggatttttagttagacagatctggttcaaatcctagacttgtgccttgaacaaattatttaccctcattgaactctagattcattatttgtaaaatgaaagacaataatagttatctccaaaggaaagttgaatatgatcattcatttattcattaattcaacatttattattgcctactttgtgccaggttctattctaggaactaagggatacaactttgaataggcaaaatctctgctctcctgaagtttacttttttttttttttttgagacagagtttcactcttgtcacccaggctagagcgcaatggtgctcttggctcactgcaacctccacctcctgggttcaagtgattctcttgtctcagcctcccaagtagctgggactacaggtatgtgccaccacgcccggctatttctgcatttttagtagagatggggtttcaccatgttggccagactggtctcaaactcctgatctcaggtgatatgcctgtcttggccttccaaagtactgggattacaggcctgagccactgcacctgacctgaagtttatgttctattaaatagcaacagacagtaacataaaccaaaaataaataggaaaacaccataacaaaaatcaaacagtgatataattgagagttgcttctatttctttttgttgtcttcttggttcaatcagcctgctaaactatatggaacctcattttcatgggccacttatttaagccgggggaccttggaaagtctctcatgtctctcatctcaacggcctaatgtgacttctcttgaaatatttggacattagcaggaagctgaggctttacatcagatctttactttaatggtggacttgactttactggtagatttttaggctctgtgtggactgtggagatgatatctggggggcaggcagacacttgccctgcctctgtctgagaaaattctgttttggatgtcttgttgaagttggtgctggcatcctaagcccttgctggggtcgtaatttaattcatcagaatgtgtggcttgcaagaaccggctcagatcctgcccttcaaaaacaaaacatgagcgtgccaagaaagtccaaggtgttgaatgttgccacttcaagcctaaactttctaggaacacctaagtgggtggcagcttccagttctccaggctgcttctaggccagagctgggttccacaagagacagaataggcatatatatgcttaaggaactggaaaaacaggctctctctctctcacaaacacacacacacacataccaaggtagctgtcaaaatgttatccgaaattttggaaccaaaaaatcttgaaagatggtattccaatatcacattttatgtaagttttctattatattagattcaaattacgattcgaggccacaagctttaagaattcagggcctttttaacttgccaagccccacaccactccaggaacttccccacaccccagttctcagaattcatgtgcaaggtctttcctaaatccagggtccaggtcagagagtggaggatgtgctctatttcttacctgattgcagacccctctgacagtgctcccttctgaagcactcactgtctgaacgtacacagtctcagacttaatcatgcacagtgagcaagactgtggtgtgataattggcgtccctgacttattagggcaaatctatgggagggggagacctcctggaccactgagcaattaattcatttacattaggaagtttctccgtcagatgcaggaaaaaaatcttgttttcctgctgtggttttgacttttgccccatcttctgttgctgttgtaggaggcaaaataagggtcaaggcctggaaacacaagtgctttgactgaagctccacttggcttccgaagcccaagctgggttgtaccaggttccctagggtgcaggctgtgggcaactgccagggacatgtgcctgcccaccggcctctggccctcactgagttggccaatgggaaatgacaattgtgaggtggggactgcctgcccccgtgagtaccaggctgttgaggctgggccatctcctcctcacttccattctgactgcagtctgtggttctgattccataccagagggtaagagcaattctgtgaagttccaggctgggtgggggatgcatgcatagcctctggctgggatcacccaggctctcccgtccgtagtagtgtgggagtggatacaggtggatactctggtcag

SEQ ID NO: 31198 - DNA, 2300 bp, Homo sapien
gagagggagagggagagggagagggagagggagagggagagggagagggagagggagagggagagggagagggagagggagagggagagggagagggagagggagagggagagggagagggagagggagagggagagggagagggagagggagagggagagggagagggagagggagagggagagggagagggagagggagagggagagggagagggagagggactatttgcaatatttttcaagtatatatgaggaagaggccaagagtgttcctttttttctaaataactaaagtgcataaatcttttatcacatattaaagttccacatatcttagggtctaattctggtcactcttatctttcattaacctgtctgtctattcttatgctagggatactctgttttgggggggcgcggtgggggtttgaaatagagtctcactctgttgctcaggctggagtgcggcagcacattctcagctcactgcagcctccacttcccaggttcaagcaattgtcctgcctcggcctcctgagtagctgggactacaggcatgtccaccaagcccggctaatttttgtgtttttagtagagacagggtttcaccatgttggccaggctggtctcgaactcctgacttcaagtgatccacccacctcggcctccctaagtgctgaaattacaggcttgagccaccgcgcctgagccaggatactctgttttaactgctatgattttgtaatatgttttcagtacctagcaaggttagctgcctatcccacctaaattactgtttttaaaaatcttatacagtctcacctgtgtgctctttcaaatgaccatcaaaaaagaaaaacattaacacccctgaaaattcaccagaagcaaaattaagaaaagggtgtaatgacaagtcacagacttcaaaacatggctattgaggaaggaaacaaaagattctgccagagcatggcaaggcttctaatatcactgtagcctcccacccaccaagactatactaaaaagaagaggattggacaaattcctgtgagttctcctcaacctggggcaaagaagactcaacaggtaagtaagtatcccaaggaaaagtctagaaaaaacctgtcagagtacagactcctgtcagagtacaaactagcatatctcaagatctctgtggaagagctgatggttcctaggggttactaggaacctgtggacctagaggtattccaccatgggaataggatgcatggccaacgagatgggttaatttgtggtaccaaacatttaacagcattttagaagagagagtaaaagccaggttacccaacaaaggctgcacaatccccagagtctgcttctattctctcttccctccgtctcagaaaagtggaaagaaaatgagatttcagctcttgctctgtggctgggaggtgagacatgcaagtatcagagatggcagtcatgctcactgtatcagagcaaacaaagtctagaaagacccacgttcaacacaagcaagctggatcagccaggtatactacagaaaagcaacaaaaaaaagaaatgaacaacatgccaagaacccagtctgggaaatatatatatatgtaatatatatatatatatataaatatatttgctatacatacattatctatatttgctatatatatgtatatatataccaaaatttagaaaaacccacaaaactctccatgaattcctgtttttggaagactgtgataagaacatgaataaaataaaacaagaggaagttcaaagataagaggacaaatcaacggaatttcccagaacattgttaaagttagaatggtgaaagcaagcacccttgttttgtaccaattttaatggggatttatttagtgttttgctattaattataatgttggatattatttacaatttgttattctttatcataccagggaaataacattctatctttaagttatagttttttttgtttgttttgttttgttttgttttgagatggagtctcactctgttgcccaggctggagtacaatggcactatcttgtctcacggcaacctccgcctcccaggttccagtgattctcctgcctcagcctcctgagtagctgggattacaggcgccagccaccatgcccggctagtttttgtgtttttagtagagacgggatttcaccatgttgcccaggctggtctcaaactcctgatctcaggtaatccattggcctcggcctcccaaagtgctgggattacaggcatgagccaccgtgcctggcc

SEQ ID NO: 31199 - DNA, 2300 bp, Homo sapien
ccccttcaactacccaccctgggaagcgggaacccacacccttgatccccaggagtactgggcttgtgttgcaaatgctcaggagactcttttttttcctttacccagacacaggctgaaacaaatgagttgctttgttttttttctaggatgagggtgggaagagcattgctttctagtccactcttattatgttctgaattctcacttcatcagggcacaagttccttactccttgcattgtaatgtgttaaaagccatgcccctgggttgctgagaccaaggccccaagacagccttagcccgagcccataatgattgctccagttacctctctctctatttttggcccctggtgattttcttcacttttctgttagttcaggtgtgcatttaaaagaatgtggacgatattttattcaactctttcagaggttttgaagagggaactactttaggttgtctagtatgatgtcattcccttgtttcaaagctgccagggcacatattccccagaatgcaggaattcctggaggtttgttctgcatccccacactgaggggtttctgtgctgggttggttgctctgtatctggcctctgtcttatggggagggaatctgctccacagacagccccatgagtcgtgctcaagttcattcttaccatgctcaggacagtgaccctgggacccagtctatgtccactcctcatcagtaataggagccccttacccacccggacctttctgatttgaggactgggtcaataatcgtccataatgattgcaactggaagttactaatttattctatgctagtgggtcaataaggaatggctgtggtctgagaaactatgtgtttctcagggtgggggaacaggaattcatatggaattgcaagggaccccaaagagtcaaaacaattttaaagaagaacaaagttgaaggactcattttctaatttcacaacttactaccaagtttcagtatcaagacagagtatcactgacaaaaggatagacatatagatcaatggaatagaactgagagtctagaaatagatctcacatttagagtcaattgatttttagcagaagtgctaagacaattcaataaatggtgctgaaacaattggatatgtacatccaaaagaatgaagttggactcttaccttataccacacacaaaagttaactcaaaatggattaaagacctaaacagtctccctctcccattaaagacctaaacagtctgcctctgcctctgcctctgcccctgcccctgcccctgcccctgcccctgcctctgcctctccccacggtctccctctccctctctttccacggtctccctctgatgcctagctgaggctggactggactgctgccatctcggctcactgcaacctccctgcctgattctcctgcctcagcctgccgagtgcctgcgattgcaggcacgcgccgccacacctgactggttttcgtatttttttggtggagacggggtttcgctgttggccgggctggtctccagctcctgaccgcgagtgatccgccagcctcggcctcctgaggtgccaggattgcagacggagtcttgttcactcagtgctcaatgttgcccaggctggagtacagtggcgtgatctcggctcgctacaacctccacctcccagccacctgccttggcctcccaaagtgccgagattgcagcctctgcccagctgccacgccgtctgggaagtgaggagcgtctctgcctggccgcccatcctctgggatgtgaggagcccctctgccccgccgccccatctgggaggtgaggagcgtctctgcccggccgccccgtctgagaagtgaggagcccctccgcccagcagccaccccgtctgggaagtgaggagcgtctccgcccggcagccgccccgtccgggagggaggtgggggtcagccccccacccggccagccgccccgtccgggaggtgaggggcgcctctgcccggccgcccctactgggaagtgaggagcccctctgtccggccaccaccccgtctgggaggtgaacccaacagcccattgagaacgggccatgatgacaatggcggttttgtggaatagaaaagggggaaaggtggggaaaagattgagaaatcggatggttgctgtgtctgtgtagaaagaagtagacatgggagacttttcactttgttctgtactaagaaaaattcttctgccttgggatcctgttgatctgtggccttacccccaaccctgtgctctctgaaacatgtgctgtgt

SEQ ID NO: 31200 - DNA, 2300 bp, Homo sapien
tgagagagagaatgcaggggaaatgccagacacttatcaaacaaccagatcccgtgagagctccctatcacaaaaacatcatgggggaaaccgccccccacgatccaatcacctcccaggaggtccctcccctgacacatgtggattacaattcaagatgagatttttgggtggggacacagagccaaaccatgtcagatctccaaatggtagctattatttagatgtccttttcttctgtcttgttacagtcactgacacagttcaggctcttattatatctccattgatgtcagcttccaatctagtctcttgcattctctgcttctgccatctattttccagtgtggtgccagaggaatccttgtaaaatacaaagatgcatgtcatgctactgcacagaatcttttaatagcctcctttttttttttccctttttcgaatagggcctaaaatcttcaatgtagcatccttccagaaatagtcttctgaacttggctgcttctattcattcacgcatacatacattttactgtcaggagcaccttctatatgccaaacactaagctacgtgtttcacgtaggtcatttcacaggatcctgaaaacaacgctttccttaatatctccattttgcagaagaggaaagggaggctcacaggatgtggaactcacccaagaaggcacagcgagttggtcataaagatttgaattcactctggctggcactcccttcaattggagctctttgtactgagcaaaaatgcctcaggggcagcagggaagggaatgacagtatcagcagaagggagccaggatcaggacagggaggaagcagtgtttggaagaagggtgctggggacagggtgcggatgtaacttccctttccaaggttggtgatgtggggtaggcacctcatttggagacagaactctgggcctgggcttcaggcactttaagtgtgcactggactttgtgttcccagaggacccccaaaccttccagtatctccttcctttcccctttcccacccagcacacagcctggtgcctagtgtgcactcagtagacaactgggatatgactattgcctctggtagtcacatcctctctttgggctatgggaggctggactggaggccttaaaggccccttccgccctcctgttgggcagtttttctttcttagggaaatcgccttggggctatcggggatggtcagtacgcagcttggttaatcctctttccttccccagcagccccaccgtcgtccgggtgaaaagaaagaacctcgctcccttcaccatccaggctgaggcttcagtctttcagcctgcagcttggggtggaagcctctgggtgcaggggttcgaggacgctcctctccttctgtatttgccatttgagagcgcccagtaggagtcatgcctcaatgttaggaggttaatgccaaacgcagtgaaagattttgttctttcctattctagataagagcaacacgagtcttcggagaggttaagcgacttcctcagggtctcgcagtcagccggtagcagagaccgggtgtacagcacccgcatgttaggaccaaaagccggacactgctggattgacccctcgcggccaagcggggaagaggcatttaggggtccttgcgcagccgcgtggcccctcccactcggccctcgatccaccctccttgagagcaggcaggattctagcatcacccagtgccttcatcaagagtctttaaccccaagcccgctcgctagcgacctccaggccggtttggggcgcggtgtggccggtggcgagaggtggagtgggggcggagaccgacccagtcttcgcaactctatttgcatacggaggcgactcgcttccttcccgcccctccgccgcgctcttcttccttccttctccagtcccttccactgtgcgtcttctgtcccccgttcttccccagcggacccctctttcgagactccctagtggggtccccagctcccgggcgatcctgcccttgccgagcgcgttttctggagtcacctgggggaggggagtcctgggcagggccgggctggggaagacgcctggggcactgcccggcgttaacaaagggagccgataccgaccggcgtgggcgcggagcgggcggccgccaccgagcgtgctgagcaaccgcagcctccgcggccgagagtgcagcgagtgagtagggggtgcggtgggcggcggcgcggcccgggctatcccgggaggagtgtgatgcaaaggggcgcgggaggatagcggaggcgcgg

SEQ ID NO: 31201 - DNA, 2300 bp, Homo sapien
agtctaagaacagaaagtttgggttctaaggtccagatgagggtgaggtttgtgcactaaagattaaggagatgaagatcagggcagagtaaataggtgtcaccagaaggtcaatacagtgattagcaactgtagttggtgtgataaagcagagaggctcgcagtagcccttggaagggcctgagtagagggacataggatgaagagcactaccagtttgttggttagaataatctggtcagccgggcatggtggcttatgcctgtaatcccagcactttgacaggctgaggcgggtggatcacgaggtcaggaattcaagaccagcctggccaagatggtgaaaccacgtctctactaaaaatacaaaaattagccgggcgtggtggcgggtgcctgtaatcccagctactcgggaggctgaggcagagaattgcttgaacctgggaggtggaggttgcagtgagccgagattgcactgcttcactccagcctggtaacagagcgagactctgtctcaaaaacaaacaaacaaacaaaaaacaaaacacaccgtggtttcaccatttacagtgacatcttgagcaaatgacttaaactctctgagtttcaatttctttatttaaaaaagaggattgttaataccccaccccacagggtggtggtaagaattaaatttggtaacatctataagacctgctgttcattacagttgattcttaaggcagcatccggtgatgcctttgaaacatacatcggcaaagtcttaatcagatgaaagccaaaacccctacacctgtgtaaggcgccacattatctggctgcccctgtgtaggtattttgctgttccctctacttgcaaccctcttttctcagaaatctgcatggtagcctccttcatctctgttaacagaaaaaccaaattctgtaaaatattttcaagaagtttatcctgaggcaatatgagttactgtagcttagagaaaacacaaacccaagaagccttgagtgagtggccctgaggcagttgggccatagtctggttttatacattttagggagacaggcattacaggcaaggatatctggaaatcagtacatggaaggtaactggtagttctgtccaaaaaatgtgagacatctcaaagtgggggagggtgcggtgttaggatatatgtattggtggtttttttttttgtttttttttgagatggagtctcgctctgtcacccaggctggagtgcaatggcgtgatctctgcccactgagcctctgcctcctgggttcaagtgattctcctgcctcagcctcctgagtagctgggattacaggagcatgccaccacgcccggctaatttttgtatttttagtagagatgggatttcaccatgttggccaggatggtctcgatctcctgacctcgtgatccacctgccttggcctcccaaagtgctgggaatacaggcgtgagccatcatgcctggactatgtgttggtttccatgcatgtttcctggcgcatagccccatagcccttgctacagtcttgctagaatgctgggctttttagacttcagggacaggccctaagaaacagtctctctcctgccgtcctttcacctgccccaaggcaaggtttttatgttttctggcctgactgtgggccttacaaccctcccatgaggccaggcatagtggttcatgcctgtaatcccagcactttgggaggccgaggtgggtggatcacctgaagtcaggagttcgagaccagcctgaccaacatggtgaaaccccgtctctactaaaaatagaaaaattagccgggtgtgatggtgggcgcctgtaatcccagctactcgggaggctgaggcaggaagaattgcttgaacccgggaggcagaggttgcagtgaatcaagatcatgctactgcactccaacctgggcgacagagcgagactctgtctcaaaaaaaaaaaaaaaaaaaaaccttcccatgagaggttcctaccctatgccctgggggaagaaatgctgacgtcaaggaagcttctataaaaacccaagaggacagggttgggtgaactttctgatagcttaataggaggaggttcctgtagggcggcacaaccagggagggcgtggaagctctgcatcccttctcccataccttgctctacacatctcttcatctgtatcctctgcagcatccttgatgataaaccagtaaatgtaagtagggtgtttccctgagttctgtgagccgctccagcaaattaattgaacccacggagaggggaaccc

SEQ ID NO: 31202 - DNA, 2300 bp, Homo sapien
aaaacaaaaaatgcatttctctctcatgcaaaagaagtccaaaagtagacattccaaacttaatatggtgttccagtgtcagaatccaagttctttctactttgtgggtttgccgttctcagcatatgacttccactttatggtccaaaatgactgctcaagctccagccatcacatccacatttcagccaggaggaagaaggaacaaggaaaggcataaccttgcctctaaggatagttcctggaagccacacttgcttacattccattggccagaattagtcacccagccatatttatctataagagaggctatgaaatttttttatttcagggagtctattttaggttgccatgtgcaaaagtaaaaaccagaggtgttggtggtcaaggaagaaatagcgaatggatgctgggtaacatctggcagtctctgccacacactcacacattcaggggtttgcacgtggttccccgtgtctcagacaccccctctctcatgcttacagtctctgcttggcatcttcttttttgccccctaacacttgctcttttttttttttttttttttcgagatggagtctcactgttgccaggctggagtgcagtggtgcaatcttggctcacggcaacctccgcctcctgggttcaagtgattctcctgcctcagcctcccgagtagctgggactacaggcacccgccaccatgcccggctaatgtttgtattttcagtagagacggggtttcaccatgttggccaggatggtctcaatctcttgaccttgtgatccacccgcctcggcctcccaaagtgctgggattacaggtgtgagccaccgcacccggcccaacactcgctcactttatggccatcctcatactacctctgttgttgcaccatcacagcgtgttaaccattgttcaattgtccacctttcccactaccctgtgacctcctggagggcagggactgtgtctttcctttggctccttagcacccagtatagctgcacaatctccagccaaggtagaccgaccaccaatatttcttgtctcaaagatatattgaggaaatgagagtatattcttcaggcttccaggaacttccttacatctgtaggaaggtatgggcatggggatagctcagtgattgtagaggctcgtggcagattgcttgctattctttgggttgcacacaggccgtctctcttgccatagttttttccagatactgcagtgacattgattaggtctcagccttggcgatgtagactgaggtggagagggattattgtcatgattcttgctttcgtttcagtcagttcttgatttgatttctgccatttattcctctcaatttttacctgggcaacatcatctcccgcctgctttttaaggtgaatgttgacagctgatttcatatattaattctggctttcttaagagggacatggctcccttcattcttaagcctttggggctacttttctttctcattcactcatgatctccatttgatccgcaagacagctcatatttgagagagcagagcaaatgtgttattcccatttcaccgatcagaaaatgagggccggccgggcgcggtggctcatgcctgtaatcccagcactttgggaggctgaggtgggcggatcacgaggtcaggagatcgagaccatcctggctaacaaggtgaaaccccgtctctactaaaaatacaaaaaaacccccaaaaaattagccgggcgtggtggcgggcgtctgtagtcccaactgcttggaggctgaggcaggagaatggcgtgaacccgggaggcggagcctgcagtgagccgagatcacgccactgcactccagcctgggcgacacaggctgtgtcgcctttttttgagactccgcctcaaaaaaaaaaaaaaaaaaagaaaaagaaaatgagggcctagtaagattactcttatttgctcaagatcataggaaagttagtggcaaagccaagagttgatcctggatccttttgtatccaagaccagtatcttttgcaaatacttttctttattttgataaataattaacatttacatgcattattttcccccagaatttgaattttttcttaggatagattcctaaacatggaagtattgagtcaaagagtataaatgtgctttaaaaaaaatgctcttaatacattttgcagaattcttcaagcaaggttgtcacactcatgtttaaggcaggtataactacccatgtgcaggccagcccaggagccagtgtggtggggagaggccataaccag

SEQ ID NO: 31203 - DNA, 2300 bp, Homo sapien
cgagacgagcctggccaacatggtgaatccctgtatctactaaaaatacaaaaattagccaggcatgttggcatgcacctgtaatcccagctacttgggaagctaaagcatgagaattacttgaacctgggaggcggaggttgcagtgagattgtgccactgcactccagtatgggcgatagagactcctcaaagaaaaaaaaaacaactatatgaattaaagcttacattaacaacaaataagagtttgaatgtgttatcctgcatatggaaatcagataggtctttgaagaaaaactgcaacctccgcctcccaggttcaagcgcttctcctgcctcagctttctgagtagctaggactacaggcacgtaccaccacgtttgactaatttttgtatttttagtagaaacagggtttcatcatgttggccaggatagtctcgatctcctgacctggtgatccacccgcttcggcctcccaaagtgctgggattacaggcgtgagccactgcatccggccagaaaaacattttaaaatactttgtacactatttgaaatgactatggaatgcttgtttcaatcaataaaaaaaagaaatatgaaatgtgaaatgcttgtttcaatcaataaaaaaaagaaatgtgaaatgtaaaatttaataaaatttaaattttagatacatttaaaatgtcaaagtcctccttaagcttcaagaaaataaaatcaatctccttaaaatgaacaaattatgatgaattcgtcaaaaatatttatattgtgttaacctcatttaccaagacatttcaaatttacatctttgtgtctgttaaagacagatttagaaatacactaattttattcaaatacagtttttagttatgatgattagatttaaagatatgtgtgatcggtcagtttatgattatgtagaataacatgtcaatatttacaggataatgcaggtaggtaagacacctgttctactattgcatgatttcatgatttaactggtgtaattaggaaaggttttagatctaattcgaactgtcatatccacttttttttttttttttttttttttttttttttttttttgagatgcagtctcactctgttgcccaggctggagtacagctcattgcaacctctgcctccagggttcaaccgattctcgtgcctcagcctcctgagcagctgggattacaggcacccgccaccacgcctggctagtttttgtatttttgtagagacagggtttcatcatgttggccaggctggtctcgaactcctgacctgaagtaaaccacccaccttggcctcccgaaatgctgggaagatatacttctaataacagcatttccaactacattacttggttgaaacagttgaaactgccattgcagttgcagtaaaggtaacaagaggtaaacttctaatatgtaacaggagatttgacttttctcatatgtaacaggagatttgacttttcatctagaattagaaccaaaatcgttaaatttgtatagatatttgcattagcagaaatcccattttgttcatgttgtttttaaataaagtgactcgtttaaaatttagttgcattttaaaaatctgtgttatgggagtggtaatactgactccaggcagggaaatgagacaattgttagagacgcagggatggagctgagaggtcctcctggtctccaatggcccggcggtggctcgatgggagggagagcgccccctggaggcattggcggttcctggctcgtgtgctcgcgggaacccaagctgtgagcctctggccccgccagggcgtacgaatcctttcctcgtttatccagtattaagtcacgctgtgtgctaagtaccgtggccaggcagcagctagacaacgcgctgaggtaaaatagagaactaaggaagaatgggggaccccaaagtcaacttggtgacacatcacacgcaggagtcggacccacggctccccgagccacagctcagtggggcgggaccgcccgggcctgggcggggccggggcggggcctgtcacgggggaaatcaccgccctagcatccggggaaatcgcggtcttagcatccggcgcgcggcggttgaattgctgcgcccagcgaggcaaccgcctccgaacgccaggtgggggcgaggcgtctcggagtctcagagacaccaaggcccctgcgacaaggtggctgcagctaggccgggggcgtcaggacgacggagcgggttcgggtcggtgacacgcagacctgagggagctgggcccgccttttcc

SEQ ID NO: 31204 - DNA, 2300 bp, Homo sapien
gctatatagtaagtgctatatggtgattgctgttactatgcaaattaaaattatattcacataaaacattaacacgtattttttactaggatgaaaagatacagattatatacattagaattgctacctatgagtctatatggaaatttttttttttttgtaaaagcagccaggcacggtgactcatgcctgtaatcccagcacttggggatgctaaggtaggcagatcacctgaggtcaggagtttgagaccagcctggccaacatggtgaaatcccatctctacggaaaatacaaaatcagccaggtgtggtgacgcatgcctgtaatccctgttacttgggaggctgaggcaagagaatcacttgaacttgggaggtggaggttgcagtgagtcgagattgtgccattgcactccagcctgggcaacagagcgagactctgtaacaacaacaacaacaacaacaacaccacaaccaggcaagccattctaaagcccctgcttttaatcacagcagatactgttttgttattatcccactgagaagatgaataaactgaggttaaaatagtgtaaatcaaggcatcaaacatccatgaagcggcaggagaagcacttggaagatggtttctggtatcagatgggtgattttaagtccctctttttcatcactaaacttcaagatctgctggctgtccaaaattcatactgtttgaagagcctgctcagattctgctagccacaccaagcttttggagagagtggagtcaagagacgtgttttccaattgtaggaagtgttgtttctaatgcatgcgatgagcttcgtcaacaagtttatacaaatagatgggaagagtgtaatgtgagaaactgaaataaaaccaaaatgccctaaaagacaggattggctaaataaattatgcctatccatataacagaatataggtagcccataatgtactactacggaatatgacctagaaaaatattcatgacgtattattttttgaaaatgtcacaatgtggtatatagaatgtatgtggtgtacagaatgtgtgtgtatatacacacacatacacttgtacatgtacagaaaaatggtaagcgggatgtacatatcgtaatgttaacagtagtcatctcgggtggggttttatggaagagtcttacttctcttttctttcatctatattttgtattttttctagaataaacccatatgattttttaaaaggaaaaataatttattaaaaatagcagcagaggcatgtatagtaaaggctgttttgcctgtgggtggtgctcctcttctgcgcttctataatcagcttggaaataatcttgtctgctcctgcctggctgatgcaatgctcctacctttgtgcacaggtggctgttcttgcacaaggccattgcagcatggatcctattgcacagttattcagtacacagtcagctacaagcactgacatagagcttggcacatgtctgcaaaccctacccacatgctcggatatgtttgaaatgaatgaattaatgaaccggtctggggtcaacagcttgaatttgtatacaggctccgccatttataggctaggtgagtcctaggctcctgatctgtactgcagcaatagtaatcataacttaagagacctccaattgtgttttgaaaatggcaaagtgctggtcacaagatggctggggaagccgagagagagtttattattattgctccatctactaacaaatttacatctccccatccctcatttctccttggctgcctaaggcatcatggttaccgtagcagccagatgctgatgatgcctccaggggacggcaaggtgaaactgagccagttcccagtcctcacctccccatactctttccaggccagggtgagatggtctgaagctcaatctctggtcaggtcccccactctgtcttggatcatttagacccacaaactctgcctctgcaatctcagttcagggccttgaaacacctcttcagagactccctcctccccaagctctgtcttctggcaacctgcctggttgccgtggaaacaggttccactgcggacaaaggagggagctgggtcctgcttcctcctggtcttgtcgatgaggatttttagaccgtggagactgcgctgccctgccctgcacctaccctcactctccgtgttctcactaaggtggaaattgccttccctcactactgacgagaccatgtgtaaaagcgtgaccacagatgagtggaagaaagtcttctatgagaagatggaggaggc

SEQ ID NO: 31205 - DNA, 2300 bp, Homo sapien
atttccctgaggagtttatttataacacataagatacatctaacaagttcattatgtggcatgtggcaatgtgtgcaaagaaagaactatcacagagaaatctttgccaagacagaagcaaagcccatgagcaaacccagaattccccatctgcagcaagtataagaggcagtaagagaggcaggtgaggcctccttagattgaaacatcttcctagcagatcaggaagagtcttgggaaacagttctggactaaaactaggtgagacttggatgctttgctctaccatcacctgacagtaggccccggggttagttactcccacactctcaccacattttgtcatttttgaaatgaagtgattgagcctctaatggttcttccaactctaacatcccatgactctgtaaatacttgcttccctaagtagactttgagaatcataaagtcttgcagttggaaggagaccctatgaaatggaaagcagagggaaatatacttgttcttagcaggagcatctattctattcttgaatggataaaatgaagaggaaagagtgtaggctggaaacggaatgagttggaattagcctggcaaagagaaaagaggaacagatggaacagcatgtgtgaggtatcattatggccctgcgtggaggccgggttgtaggaagacaagaacagggagaacagttgagtgtgttgcagtgaaatggcagacgaggcagatccaaacccatgttcccctcatagaaacattaaaacaaccagaaactcaatgaaattaactttataggagtgttggaaaatggtaaaaggtccacagcaaagaagtgaaggctcagtcaagaaaaagccacattcaaaacatcaggaaattcatggtgtttttactcacccttgacccacactttccctggtgtggcacagggagatgcagcagcccatgcccaatatcctcctttagaacagaaggagcagatcagaccttatttgcaatgttttaacatctttgtggggctgcctggagggctaatctccctctttaacctagggtcgcaggcatgggagtctgctttaaaaagctccacagacacctgtggcgagacattacaggtggagctacacaatagatcatctaagacccagaggagaagctggagtgagactctgggaaatgaagacattcaaaagcaggcctgtatactgggaaattgaaaaagccataggcccagtcaagatgcatgctcataaaagaactgaaaagactttaagctttcacctctggctgatccctaggtacagggcacgcccagctaattagtgaagggcttctctggcacaaagccagtctgcaaagactggaagaggtggctatactccaaatgccccatcttgaacaactacaaaattacctaaagaattgaaagcaagaattcaaacagatgaatcattgcccactaatgtttgtggaagcattattcacaataggcaaaaggtggaaacaattcaaatgtttttcaatggatgaatggagttttaggtatcctgttagaagcaacagaaaacagactaagagagaaaattgctaccaaggagtggggtgctgcttgtaatgaatacctgaaaatgtggaattggctttagaatcaggtaatgggcagaggctgaaagaatttggaggagcagtctaggaaatgcctagattctgatgaaggcttagaagacaaaaagactagggaaagtttgaaactctttagagactggttaagtggtcatgaccagagtgctgatggaaatatgaacagtaaaggccattctgatgaggtttcaaatagaactgaggaacaaagtatttgaaactggaataaaagccatctttgttataaatttgcaaagaacttggctgaactgtgtccacactcaagaactctgtggaaggccaaacttggaagtgatgagctaaggtatctggcagaataaatttctaagcaaaacaagcagctgcatggttacttttggcagcttacactgaggctgaggaacaaaaaaaataattggaagaatttataattaaaagggaagcagagtggaaagatttgaaaatttatcagcctggccatgtaaaaagtgaaaaagcaaggatgtagcccagaggccatttgctaaagagattagcatggctagaagggatccaggtgctattcctcaagacaatggaagaaagacctcaaaggcatttcagagattttcaaggctgcccctcttatcacagacccagaggcctaggagggcagaatg

SEQ ID NO: 31206 - DNA, 2300 bp, Homo sapien
agctacattgcagaaatgtcaaaagtaatatatagagctgagatttcagaggccccccgtaggaacaggctagcaggactctgtaaaaatgcctgcatatatctatgattgcggcatgaacggcacttgctatcttttccatacactgtccgtacacgccccttgtttcaacccactccacaccaagactccatttttgaattgaagagttggaagggactgcatggatcctttacagagcaccctaatttgacagacgatgaaaaggataccccaagagatgtcacatcatgctcaataccatatggtgaattaacttcaacagaagaagggaataaaaagagctcacagaagaagctgggtccatgcccatatcatgcccaggcatctggccaaagcaattaatcctgtgaaaaataattgaaaaacccatggctttacgtaaaaaatttaaaaatattaatgccaaagtccctcctcaggaggttctggtttaattgctctggggtgaggcctgagcactggcatgtttcaaggcagcacagatcattccgacgtacagtcagaattatgagccgtcagtttagaataatacacttggctgaaagtctagtggaatatagtagaaaaaatcctgaacttggagcccgaagacccaaatttgaatctggaccttttcatgatcatcagtgtggtttgggcaagttgcttaactgcttttatacccactacttatccataaatccttacttcatccagaatctgaaacccccatgagacagtgctcttgaaagtgctctgcaaacactgaaatactgtatccatgtgagacaagacctgctggagacttttctagcagagcacctttctcgtagttgcttggctattcaaaaattgaattcaattcaacaaataggtattgaatggctggtaggaaatagacattatgctaggtgctggccatacaaagatgaagacatagatcatgtaacttaaggagtgctgagacttgtaaggggaggtggacatttaaacaaggggatactacaaggacaataagagatgcagcttcaagggacagaaacagaacaaaggacaaaggaggggatgctcactctggaatatggtggtcaggagagagaaagagatatttgtgccagcttgaacaatcaggtcttctaggtggaaaataaagaagaaggttgctccaggttgagggatgagcatatgcaaagatacagaattgttactcagccaagtagtttgatatgggctggggcactgaatggtagggtgggattcagaccagatcattgacagataaatgagattatcattcaatgtagattgacataaatcacttttttttggagaaagaaaaatgatgtttaatggcaggtttaaaattactatggctttaagaagaacagaattattgcactcactttttaaggacctggttatctctctgaaccacaggtaatcggagttcaaagagttaacatagtctgaagcctctcattggtctcaggtccagaaaagttgctaggttactttgcagaagagaaacaaataaaaacactttcccaagtgaaaagaaaattaatagtaaaagatgtgtttagggacttacacatctgcagagcattgtgtgtgtgtgtgtgtgtgtgtgtgtgtgtaacagcattaacacttaactaataaaaataactagggtggttgggttttcagacttgcaggatagaacttgtatgaaaggtctggtaaggagtgtcaagtataatgaggaataagaaaggttaaagagtttaaaaccaattagaatttgaagttcttgatttcagaactctaaaatcctttttttttttttaagtatgatatctctttaagagccatttggtgtacttcatagcctgattcatgccaccagctgcctctgatttcaatgagaaatgcagaaaatttatagggaactgtaaaatggggacagatttttagttttctaaattgaggtttaactggcaaacttgtaaaggttgaagaaaccacagagccaagctatgggaagctggtttcttttctggtcagaaggaatgaacacacaaacacatatctaactcacaaagtgctggaagagagaaagcaatgctctttccagaggaggaacacggaaaaatcagccttgtgggtgaacaggaggagagtcacattcgccagcaggcagcaccctgtgcaggcagtgggagaaatctgagcttcagcagcgtccggagcaggatttgcacgaagtctcccgtttc

SEQ ID NO: 31207 - DNA, 2300 bp, Homo sapien
cgaatgctttccattgaacattggcagccttgaagaaacatggctagaaaattattccaggaggcctaattgctctgtgacactttccaaggagaagctgatggctttctcgcccaagctcttccctctgtacccagaacaaatgactgcagttcccagtatatgccctaaattaggagagggcaaactccgtggcagcatgaattgagggaatgtctttactgggcaggggccctcttcccagcacagtgtgcattttgccaagctctttctccttcagttttaaaacccttgtgtattccaagagaaatgtcgtccatgtgtttctgattcatttacacgtaaatcattaaaatgttgttttgtgagagttatttaatgtgtgcggagcctgtgagtcttcttaacgggaatgttaaaagctttttttcctgtgctgactgagacagaacacattttgctaaaacagtgcctgagttcaaacatatcctcccatctcatatacttgtacctgctttatcaaccacagcctcttgataatgccaagcttggcaaggctggcattcaaaagtgtgaaaattagagaaactggagagaaaatggagtaagaagtacagtgagagtcaagccactgttccccagaacgtgccaaaggaacgttatctgagggtagacagtgcatgtgtctgccgctttggtgagtgtggctggcagccctctctctggtactcccctggacacttctacaagcacagtcttatttaagcctcatagtaactcccattttccaaatgaagacacagaatcagataccttaagtattgtgcccaaagtacacagctgtcttgggtagaaaggaaagattacagctaaactctgagtctaatcttcttttcaaaatgactcagattgagtttctctatgaatgccgtctgtgtgtgtgcatttgaaattccatatgcattataaaatgttaatgagtagcagtgtaatacagtggctaacacttcaaattctgcctctattactttctagctgtgtgaacttgggaaagttacttaacctctctgggcaatttcctctgaaaaatgagaatattgccagccatgtatacaacatataaagatgactgaaaagaattcatatattaagtgcttagagcagtgcctgacacgtagcactcaatagctgttagcttctagtgctagtggcagtggggagtcataaataactggatgatcttggcaagtggcatattctctctgagccttagtgtcctcacttgtaaaatgagtataacagcagcactttcaccagtttgcaaaagtaacttgagatgatgttaatgactagtactgtgtctaacacagaaaaggtgcacagtcaaacttaacttttacacccagatacacctctccctattcagtgttggttgttgttgttgtggagggggtaattttcttattattcagctcatcttagatctagtgttgatttctccggaagccatgggtatagacatatatacaggcccaggtctttctacacccctggggaggtgagatttcttgctgcgatgggccctttctgggctggagtagagccgcacacactccgagcaagtaaacagtgccacaggtattgctcatggggaggaacaaccagccaacttcaggacttggtgcttccccagttccgggcccgtggctctgttcacaggaaaacctgtcgttgtgtgtgactctgatcacgagaaaacctgtagttatttggggctctgctcacaaggaaacctgtagttatttgcagacagacgctctgggatttagaccttttttttttcttctagtgtaggtgctagaattgccttcttagttggttgtttctatttaattgcttttctttcatgggtgtcctgaagaaaagcagaaaattatagtcatctggcaaaaaagactaaagagaaattagactttgtcccctttcactctctctctctctctctctctacacacacacacacacacacacacacacacacagagtgatacaaatacctgcttgagcccctcagttattttctctcaagggctgaagtcagccacacaggataaaggagggaagggaaggagcagatcttttcggtaggaagacagattttgttgtcaggttcctgggagtgcaagagcaagtcaaaggagagagagaggagagaggaaaagccagagggagagagggggagaggggatctgttgcaggcaggggaaggcgtgacctgaatggagaatgccagccaattc

SEQ ID NO: 31208 - DNA, 2300 bp, Homo sapien
ccaggaggacaaagcttactctctggaatctccgcgttttagacttacaagtgtctttaaaggtcatctcatctcaatcccttaccccaaaatgggaattctctgtatcctaccactgaaagacggcccccacacctgtgcgtatttgcccttccacataatttacagagtggagggcagagtttgataatcccttcatgcagctgacctcctgcctcaggacccaggaaatctccctacggttcctctgacactggctccagtgtgccagcctggaacctgaaatgccattctcagcttctcttcagggagtgaggtgggcggacacatggcaggttttggagtcacacagacccgggttcaagtctcacttccactgctcgttaactgaggggatttggacaaagtaccccagctttctgtgcagttaacctgcaaaactccaagaataatccttcgcgggactggtgaggatacatggggtgtaggagatgagcattaaacacgtgctcccctacgctgctcctaacctccctgtctccacctgggtgtgagcatctgtgggggcaggaattgtttcttagctacaggatactcttttcccagtgccaaaaacagtgcttttgtgtccggaattggtgggttcttggtctcactgacttcaaaaatgaagccaccgaccctcatggtgagtgttacagctcataaaggcacagtgcccagagtttgttccttctgatgttcggatgtgttctgagtttcttccttctggtgggtttattgtcttgctggctcaagagtgaagctgcagaccttccgggtgagtgttaacagctgataaaggcagagcagacccaaacactgcgcagcagcaagattcattgcaaaaaccaaaagaacaaatcttccaccacgtggaaggggacccgagccggttgtcagtgctggctggggcagcctgcttttattctcttatctggccccacccacatcctgcagattggtccattttacagagagccaattggtctgttttacagagagctgattggtccgttttgacagggtgctgattggtgcatccacaaaccctgagctagacacagggtgctgattggtgcatttacaaaccttgagctagatacagagtgcccattggtgtattcacaatcccttagctagacataaaggttctccaagtccccactagactcaggagcccagctggcttcacccagtggatcccgccccgggggcagcaggtggagctgcctgccagtcctgcgtgtgtgcccgcacttctctgcccttgggcggtcgatgggaccaggcaccatggagcagggggtggcactcgtcggggaggcttgggccatgcaggagcccagggtggggagactcaggcatggcgggctgcaggtcccgagccctgccccacagagaggcagctaaggcccagcgagaaatcgagctcagtgccggtgggccggcactgctgggggacctggcgcaccctccgcagctgctggcccaggtgctaagcacttcactgcccagggctgggggcctgccggccgctccgagtgcagggcccgccaagcccacgcccacccagaactctagctggcctgcaagccctgcatgcagccccggttcctgcccgtgcctctccctccacatctcccagcaggctgagggagccggttctggctttggcctacccaggaaggggctcccacagtgcagtggctggctgaagggctcctccagcgcggccagagtgggcaccgaggccgaggaggctccgagagcgagcgagggctgcgagggctaccagcatgctgtcacctctcactttgcctattataaaaaatgagagagagaaaataaaagcgaatttatatgtgaccccagaatctagaacagagctctttatctctctctcagcaaggcctattaactaacacagttttgctgctgtctgttttcagaacaaagacttgttctgtgtactcagacagtctaaaatgaaggttgaaaaaaacagctcatgtccatacacagaaacagaaactgaaccgaacaccgaaactgaaactgtttgtctcttcctgagaaacgagcaaacctgaaagctactctctcagcttcagagggaaaaaatggttgtagatttctggacttgggagcagacatttcaagaactaatccaagaggcaaaaccccgggccacatggacgctgaagttggatggcaaccttcagctagactgcctggctcaagggtggaagcaataccaa

SEQ ID NO: 31209 - DNA, 2300 bp, Homo sapien
aggatacagagtcaagagaggagacaaaagaaggattgagtgaggaaaattctgaaacataaatttgcagaaaggttaaggaaaaggaggaataagaaggaggagaaagtgtagagggagagcacaaggatgtggaaggaggggagcaagcgtctggggaaggagacagaagagatcctagagcacaggggaagatggggagctgctatttgttcttcggctggctcctgctttggaaaaatcctcgtttcctactcagtgggtatgccaaagaccacatcctgggtacaggagatatgagatcatttggaggtacctagagacagtcacagtgatagaactaaactctgagtccttagaggccagagagagttgcaagatttagagaatataacatgtatttcctaggactgggttccacagctccagattcattgatctcttagactactccaacacatgtgaatgactttttaatgccccactttgtgcttagtcttggctggccttgtcaagacctggaaactttaacacttcttgctgtgcatttccgctttgccttggattacaagcacaaaaagaaatagtgacaattattcaagccattcaggatacttcccaaacccttctgcctctcaacactgtggttcgggtctaagtactgagaatattttaatacctaatatgagcttcgcatggtttccagagatgcagcatatctttttagctaatattggcttttttgaagctcataagataacagctcttaaagatcctgtagggatcatctcgtccatgctaggaaattagctggtccttcctcagtaaggaactatttagataaaagcagtcagaactctggcctgaacagtaaacatttaaccagagttcaatcagaattcaaggacaggttttcttaaactttctttgtttctaggagatcaggcagagctgaatttaaccaagaatcttttgatcctttccacatatagatatacaatagtggtcacatatgttctgggagttcctagaccttatatgtctaaactggggcttcctgacataaaactatgcttaccggccaggaatctgttagaaaactcagagctcagtagaaggaacactggctttggaatgtggaggtctggttttgctcaaagtgtgcagtatgtgaaggagaacaatttactgaccattactctgccttactgattcaaattctgaggtttattgaataatttcttagattgccttccagctctaaatttctcagcaccaaaatgaagtccatttcaatctctctctctctctttccctcccgtacatatacacacactcatacatatatatggtcacaatagaaaggcaggtagatcagaagtctcagttgctgagaaagagggagggagggtgagccagaggtaccttctcccccattgtagagaaaagtgaagttcttttagagccccgttacatcttcaaggctttttatgagataatggaggaaataaagagggctcagtccttctactgtccatatttcattctcaaatctgttattagaggaatgattctgatctccacctaccatacacatgccctgttgcttgttgggccttcctaaaatgttagagtatgatgacagatggagttgtctgggtacatttgtgtgcatttaagggtgatagtgtatttgctctttaagagctgagtgtttgagcctctgtttgtgtgtaattgagtgtgcatgtgtgggagtgaaattgtggaatgtgtatgctcatagcactgagtgaaaataaaagattgtataaatcgtggggcatgtggaattgtgtgtgcctgtgcgtgtgcagtatttttttttttttaagtaagccactttagatcttgtcacctcccctgtcttctgtgattgattttgcgaggctaatggtgcgtaaaagggctggtgagatctgggggcgcctcctagcctgacgtcagagagagagtttaaaacagagggagacggttgagagcacacaagccgctttaggagcgaggttcggagccatcgctgctgcctgctgatccgcgcctagagtttgaccagccactctccagctcggctttcgcggcgccgagatgctgtcctgccgcctccagtgcgcgctggctgcgctgtccatcgtcctggccctgggctgtgtcaccggcgctccctcggaccccagactccgtcagtttctgcagaagtccctggctgctgccgcggggaagcaggtaaggagactccctcgacgtctcccggattctcc

SEQ ID NO: 31210 - DNA, 2300 bp, Homo sapien
agataggacacaccttgcatttgtcctggatctatttcctggtaaagaaatattataaaccactagctcattttactcaatcttctttttttgtttttcatttttggcctccagtagcctgtgggacaacatatcccatcagtaacaatggctggcaatagaagggattcttcccaggactggagtaggtggagagcaaatttgtctcctcaagaacatgtattgaaatctctgaagcagaggtgtatacagttttcagaactctccaggtgattttgatgtacacaccttttcaactcttcattactttgtcattttaagctccacactggcatttcttacattactctaataagtaaaattgaataataaatattttacaaagctcttcattaacttgcattccaaattgaaggggaaaagtgattcttttatccatcccctcccccttgctgatttgtttgcagaatacaggtgctcagtattttattttataaagaaataacaatttctttatttgaaaaagtattgcctagacaaaatatgtataatgaagctgccagagtgtgatgtggccacagctgtacacaatatacatttgtgagctcttaaatcgtgggttctggaataagatagtgtcattcgcggaaaattgaagtagtaattgtgctcactgattgtatgaaaagtgaaaacagtgctgttacacagaaagatgaattctattggtctctgcttagaagctgctatgctaaattaaacctgatactaggcctaaggggattgcattatttgaggaaaaaagaaaatacaggtaaaccctgacaattctcatcctctttctgtttttcctttattgccatttgttctgggaacaagggtatactatttctcagaggttctttcctggcacgagggtctaggccaggccataagctcatctcagcttcgttcagttcctggccattcatggatccctctgtctcacctggtctggtaactggcttctaagggaatccccagtgaggtttgagctacccagtcctgagagcctgggccagtaattttccatttccaggcctcagttgttttaattcaatgtcaataaattttggttaagaaatgaagagttcaagaaataaaccagatttttaaaaataaaagagctcttctagagctgtcagtcaatggttcaaagacaattgtgtcctttctgaggtctttagcacaaagccgctagagtaacacttttcatttcaagagagaatccagtgacattgtccctgacttcacacttcctgaaaaccacttggcaactcaacaccaagagcttccggttcttagcaacctgtttcacttcttgaagctctttactgttggaactctgcgtgtctagggatccagacttccgggttaaagaatcgtaagatgattacagttggaagttggaccaaagctagggtaagcagccatatgcctggtcttttccatgctcaaggcagcctcccttcaggtaaccgtgtcttcacttggattaccaaatttgaagtcagattcccctctggtttctaaagaatttgaattgggcatcacagagctacggatgctctcttgctccagctcagcagtaatggaggcagcaggagcctgcagcacagaacaaactcattaccccagcagccaccttagcctggcttgggaccaggaactgaatatgggctctaacagttctatgacgctatgaatctgaaatgttattactgtgctttgcatggcatatgaaattacattctagctcaccaactggtctaagattgccctgggcaaagagatgttacttctcactcaattccctgttaggagcacaatagtactaaaataaataaacaaatgagctcggtttcagaaggcctagatctgaatcttggatgagccacttaggggttgcataaacttcagtttcctgatctgatctgctttggccagcacacaggtcaagcggtttgtgctaggcacatggtaagtgatggtcacagcatatcagggggtgtggaagcagcaggctctgcctttccctgtccctcatttctccttgacttcctagggtgtcgtacttaccatagcacatgatgtggagaatgctagaagagcagttgggtgaagcagggccaccaaatagtccttgcctcctggagacctctggaaatccagatgagtgtggtctgaggttgggcctcccactgtgcttgctcctctcaggcctacccagcgctgcctctgaagcctaactcagggccctg

SEQ ID NO: 31211 - DNA, 2300 bp, Homo sapien
gagtgccagtgcgcgcgcaggggtcggggccccggcctttgccgagtccaagctgtgtctctacggtttcggggaaatcggattcggaaatccttacggcttggcagctcctgttctaaagactttgggcggaaaccaagtggagctgggttcccgttcttgccaacgtaggcggaaggggctttctgtttagtttttctccaaccttgcctggggcgcctatgatggagaccctcagcccctagggactccatcttttgaccttgaagtctcgctcaaacattcccctaaaagaacgggggtgagggagaatggaaggcaaaaagagggaaaaaagcaaataaacttcggaatcggacaacttaaagtctcgatatgagcctcggattgtattcgaactcctgggttctagacccagctctgctactaacttgtctgaccttccccatttataaactgttgtgggtgagaggtgggactaggtgaactctgagagccctgcactcggcgcggacgagggatttaggggaaagtgtgctgtattccccgcgagccttccccagcggccccgcctccctgggtgaatccccggcggccagcgcagcgcaggcagcgatcctggcggctgccggggccggcagcttcctggaaagttacttcttgttggagccggcaataggcaaagtgtgttctgtgaaatccgcagagccgagattgactacgttccgggaatgagagggctgtgtcattcccctcattgcctgctgcattgacggcgtaacaggaaaaaaaaaaaaaaaaaaaaaaaggcatacacacaatgttagctaccgaggtgcaccaaaagttttatttgaatgtaactaaattaagggccgccacggtcataccacaaagcctccgtcgcgccttgcggggggcttcgaggtggatcgcccaggggcgggcagtccctggaagacaggtacggagtggtcggggtggggtagcgaagtctgcctaggcttgccccggcgcgcagggctggtgtttgtgctcttatgtgtgagcgagaaaatggggctttctggtgccagcccaggggaggagggaggaaaaggatggggtcttttgtattggcttgctctctggctcttaacctcgcctctccctcttctctcattttctctctctctctctctctctctctctctctctctctctctctctctctgtcgtttctgctgtcttctctctctctttgcttttttttttttttggttcctgttttcttcttcaatggaaagctcttttaaaggatctgtcttctcaaggagcctagttggctatgcacaaggaaagcgccaaaagagctaaagggaggaagggaagagaaaacatttaactctcccatggtggttactgacccagcgtgggtgcggggagattgggatgggaagtccaggtctgggggcagccagcagttgtcagtttctcattgacagccctgctccttggagattgtttttgtgggtagtcttgtgtgtggcattggtggaatggctgaatctaggagacgcggcgtgtccagaacttgctggaaattggttttgagattttgggcaaggcctctcacccggagcctcagttccctccctaataaagcagggctgttataaggataagatgcaatcttgagggggtgggaaaggactaagagctctgtaaaaatacaaaccaaatgctggtggtgcttccacacctgcggcatttggggtgggggtggtgacaacattgcccacactcaacccacacactcaggagttggggggggctggttcttaagacgagttggcttgcaaaggagtgaacttgagaaggacctgcgcctcgtgtatgtacatttgtttttggccaggcagaggcttacggtgaaaagcccaaggcccagctgacagtggacacaggggaatttgtttgtttgtttcaatccgcatctggagtgagtcattgccacttgtcatggtgaaatggcaaatctgggcttcctgtggttccagaagcctgcgactggaaatccacaagcgagctggtggttgaagctggttaaagaacagcctaggtattccagaagtgtttgaggatcccttccatgaaggaagagaggaaagtttttaagtaaacctcccactcccatgtgtcttcagctttcttttgcaaaggagaaaatccttgaagtttggtaaagaccgagttagtctatctctctttgcctatctcgagttgggctggggagaggaggagataggttcttttgtctt

SEQ ID NO: 31212 - DNA, 2300 bp, Homo sapien
tcagcgggttattggagttattagattaccaataatccaacagcctctgtagcctctctggctggagaggaggggggaagggcggaaggcattctccaaatcgggaggctctggccaaactaggtcaatgggaaggaggggaggggcgagaaaggggttgacggtttcaaaccttgatggagggctctctctagcgttaggcagcggtaaaaacaccattcggtttgagctcccggaaccacgggactcctaatttccaataaatgcacttacttcattttaacttcccagattctcatccctaccccttattaaatcccaaccgtctctttcacctttatcccaccgggcgaaggggtgagaaagcctcaatgtaggattttgaggccaaaggctcgttctttgcagaccgactctgacccttccgcttgccgcagaagggatgagcggcgcagtgtgacgccactggctagttttaggaccagactgcggcctttgtggctgagtctttcgctgtcccctagcccccgaaagcgcaccccggagcctgctaccgagaccaattaggacatggcacccgggggttataattcccgggagggccacaggaaggcgaggcaactttggagagtgccagtgcgcgcgcaggggtcggggccccggcctttgccgagtccaagctgtgtctctacggtttcggggaaatcggattcggaaatccttacggcttggcagctcctgttctaaagactttgggcggaaaccaagtggagctgggttcccgttcttgccaacgtaggcggaaggggctttctgtttagtttttctccaaccttgcctggggcgcctatgatggagaccctcagcccctagggactccatcttttgaccttgaagtctcgctcaaacattcccctaaaagaacgggggtgagggagaatggaaggcaaaaagagggaaaaaagcaaataaacttcggaatcggacaacttaaagtctcgatatgagcctcggattgtattcgaactcctgggttctagacccagctctgctactaacttgtctgaccttccccatttataaactgttgtgggtgagaggtgggactaggtgaactctgagagccctgcactcggcgcggacgagggatttaggggaaagtgtgctgtattccccgcgagccttccccagcggccccgcctccctgggtgaatccccggcggccagcgcagcgcaggcagcgatcctggcggctgccggggccggcagcttcctggaaagttacttcttgttggagccggcaataggcaaagtgtgttctgtgaaatccgcagagccgagattgactacgttccgggaatgagagggctgtgtcattcccctcattgcctgctgcattgacggcgtaacaggaaaaaaaaaaaaaaaaaaaaaaaggcatacacacaatgttagctaccgaggtgcaccaaaagttttatttgaatgtaactaaattaagggccgccacggtcataccacaaagcctccgtcgcgccttgcggggggcttcgaggtggatcgcccaggggcgggcagtccctggaagacaggtacggagtggtcggggtggggtagcgaagtctgcctaggcttgccccggcgcgcagggctggtgtttgtgctcttatgtgtgagcgagaaaatggggctttctggtgccagcccaggggaggagggaggaaaaggatggggtcttttgtattggcttgctctctggctcttaacctcgcctctccctcttctctcattttctctctctctctctctctctctctctctctctctctctctctctctctgtcgtttctgctgtcttctctctctctttgcttttttttttttttggttcctgttttcttcttcaatggaaagctcttttaaaggatctgtcttctcaaggagcctagttggctatgcacaaggaaagcgccaaaagagctaaagggaggaagggaagagaaaacatttaactctcccatggtggttactgacccagcgtgggtgcggggagattgggatgggaagtccaggtctgggggcagccagcagttgtcagtttctcattgacagccctgctccttggagattgtttttgtgggtagtcttgtgtgtggcattggtggaatggctgaatctaggagacgcggcgtgtccagaacttgctggaaattggttttgagattttgggcaaggcctctcacccggagcctcagttccctccctaataaagcagggctgttataaggataagatgcaat

SEQ ID NO: 31213 - DNA, 2300 bp, Homo sapien
taaatctgaacttgacaatatcatgtgtctttgggggtaaaacgtacatttcaacaacagtgacaggattaggcctatgtatatttttcaaaaaccgttcacaagacaggcttttctgcagaggctgcagtaatccatctgtcaataagtattaaaatattcagatttcacagggacagacactttaacgcatatttcctaagctccagcccttgtggaaaataatcaacctctttgcacctttctgggttttaaaacctaaaatacagcctttaaaaatgtgtgtgtgttgtggggtaggggggtgcattgccaacaacattttcggtgatagatggaacttcttacgggactgtcaatgaaagagattttccaaatatcccagcaaacagcaatctttcacagctctgatcactcctccattataaacccaaattttgggttgagataggtagattattttagacatatctttattagaaattaacaagtgacgagattttgtggaagctttaagaattcatctgtaatttaataagtcgcttgaaggactctcatagccaaggctcagaacagcctgacctttgaaagctgcttctggtccaaacattttgggctaattcttgaggaatctgaaatattattttcccctcacacccttcttttaagagagagacataaaagaaacaagagtctcccttattcagggatgagtaggaggggaaaaaacccgaaccaacatttaaataaggaaactagcagctctgaacaaacaaactaggacccacaatgaaatgattctgcactgcaattgcctttaaaaagaaagtaatagagaaaaagagaaggaaagaatttctccttcttctctaccccccccccaccccaccccccaactcagcttcaaagctaagaagactgtgctgcgtgtagtgcattgtagttgtggcagtctgttctaaatacaggcagtatctgtgatactggcacggcaggcctttagaattccctccggctgatctcttaaacacagactgaagagatttttttacaacgaccttgaaacgagcctcgaaaacaaaaatctcaagaccttaagagaaaacaaaacacaaacaggtatttggctcacagaattttgtagaaaacacacacataccaccccgccacccccaccctcccccccacacacacgtttcttgcaacaagaaatttcccaagagtcaacaataacagattaaacccaccacttgctgtcctggaaagaaacaaaccaaaccaaaacaaatcctttgaacatttctctgaagtgcaggagagacacacttcagcaaaagtccaagggggaaaaagaaaattgcaccaaaggaaaaaaaaaaaaaaaaagtgggggctgggattgttacatatggccaaaaatttaagcttctttcaatagtattagtattgaaataatacatctttaaaacgcttgagggattagatagggaaagaaaaggcacgtacaaaaaaatccaaccgatgccgatcctgtgatttacgtaacaccacaaacttgcaaaaggcaaaaaatcagaagcaaaaatccataaaccatcaaaatacagaaaccaaaaatcccaagccaccacaccagaaagaaaaaaacccagaacaacagcaaaaacccctgtcctaaataaaaataaagcaaatgaacccaccgaaaactgcttggcaaatatttttctcgtggtgcctaatattctagttggaaagagctgtgatgtttattttattttatttttctcttactcgcctctctaaccctactatatatataacatacttttcccagtggttcaaacctctcgctcccttttgtgcatttagctcgatctgctgagtttatgggtaagaaagaaggaattagccccagaccccgggaaagcaaagcgcactccccctcttatgtcaccgaatagcaaattagttctcagaattccagaggccgagctttgctacagcgaaggcgccgacgtcacagaggaggagcccacgtgatggtggcggagcaggccataccatcgtcttgggcccggggagggagagccaccttcaggcccctcgagcctcgaaccggaacctccaaatccgagacgctctgcttatgaggacctcgaaatatgccggccagtgaaaaaatcttgtggctttgagggcttttggttggccaggggcagtaaaaatctcggagagctgacaccaagtcctcccctgccacgtagcagtggtaaagtccgaagctcaaattccgagaa

SEQ ID NO: 31214 - DNA, 2300 bp, Homo sapien
ctcagtggatagaaacaaaagcaaagaaggtcaacctgcttggggtcatttacatggacatgcatttctggagaagggataattgcagcatcattgtggatattacagtcatggagacaggcctgggaataggcagatatatgggactgacagcctctgtccactgctgtccaccacccactgactctttcaccttctgtttctcagactaaaactcacccttcctgatttaaaaaccagggcttttcttcccattgtgtaaaatatgaagcataatccaaacatgtaaaaaaggatgacaagtactgtaacaaacatccatcgtagtgaagtttcacgctgttagctaaatatttccagttctttccatttctgggaacatggtagaattgcactcctggcccttgagcaaggtaaatccaggtgctagtctgggccacttagctgtgaaaggagacagcgtgtgtcacttccaatctggagcatgtaattgctctctctttccttctggtgcagctgccagcaaggaggtggtgactgctctgtcagccttggtccctgagtggcaacaacaagcagcaccttctgccaacctacaatgtatgaaataaaaaaagaaatctttgctcttttaagccattgagatttggggtttctgttattgcagcaaaacctaacttatactgacccttacattcacattcccaccaccatgattttttgagaatgttaacatttccttatacctggttcagctttttaaagaagcgaaatccaaaaataactgtatcctttgtcgcttgcctccttccagcccttttccttcctccccagaatagctaccgtctcaaagatgtatgcgtctgtcctgtccatgtttggtagatttactccgtaagtatgtgtacaacacaatatatagtattacttcatgttactaaaatttgcatgaataatattgattattctaaaaattgcttttgtattcaacattattattttagatgtatcaatattgatacgttagtttcagttcactcactttaaatttgatataatatcccttcatatgaatgtatcacaatttataaagccttttcctactaatgaacttttaaattacttttttcttttaaaaacaattctcttaaatacaaggctttttatgtaggtatgcaagagcttctcttggttgtatgcaagagcttctcttggttgtataccaagagtggaattgctaagatataaggtctactaaacctcaaatttgatagatattgccaaatttctatccaaaatggctttttttcatttacagtcctatcatcagtgtctacatgttttgtcattgctttatcatgtcaaacatttcatgttgtccgacttttaaaattttagccaatctgatgggtctgaaatggcatctcctaattttttattttgcatttctttgagtatcagtgaagttaagcatctttccatttcttttaggattatttccttttcagagttttccttgttgatatagactgatcatttatttctatgtttttttctccttatggatgtgtagaattttcttcctcctgtgttctgggtactaatccagttacataaattgtaagtgcattttctgcatctgtgacttgcttttaattttgttctttgcccagttatccttctctcgcaagccattggctgcctgcttgtgcacacacttgatttttcagatcatagcaactacatggtaaaaatggcttggaggcgtgttttgaaaaacctaggtgaataaatgttgcttgctctaaatatctgtagtaggatatggaatgtgtttttacaagataatcggtgaaggacctgttttgcttactcaaggatctcatttgctaacacgattgtgtggtgaaagcaaaagaaccaggtgtaagtggaaaaaaccttagtcattaagagttgtttgggctgctcaatggtgagtatcaggggtgactggtttccccctgccatgatgaatcctggcatgatttgcctggctgttttgacattttgtagacctagcatatgtgggagggcacttgaaagacgtctcatactcaagtggtctctcctcttcccatacacaccttacggattcttcacagggtgtgatgatgggaagcctagacacgcttatcagaaggtaggaaaaaatggtgtcttggaagtgcttgtagctttccaatgaggggagtcactttaaagctttgtttatctttctgtgcctcagctaaccccagaggaaaatcttagctcaggac

SEQ ID NO: 31215 - DNA, 2300 bp, Homo sapien
tacacctgaaattctgtgttttagcctctgaattggtaaaccagtatttttctaccactgagtgcaaattcatacaacctttccatttcacgcaagcgcctgcacgtagaaagttgtaacaggaggttgagaaaagtaagagtacgaaagaaaccagaacagtaaatgggaatgaggcttttggtagggttagcactgacgacaacactgtatgcagttcactaagcatccagattatgacttgggtggttgtactcttgggaagttcctcatgagtcagaattatcttttgtagttaactttatatgatgttcatgctaacaccatgctcaccatgctcacctgagcaattcataaacatttcaggaggagaaacacagtgacttccccaacacacccatacaacagtttcaacataattagtagcatttctggatccggcacagtactcttataatgtatatgatggaagaaatgaacaactctaattacaccttattaaatcttaatcctcattaggaccctattattccttataagtgagttactgaaggaaaaaaaaaaaggaaatgctggtcaagtcccgttatattccatgaggattgagataatccatttttacttcatgtaacactggaattcttttcatactaaacagtagtactcagaatgtgagtacgctgaaatgtttgagtgagtggattgtgttttgataggatctgaccttttcagaaccccagaaaaaactctctccaagagcccgtatctcccatttcaaactatgttagttgcaaagagataaattctttattagtctgtggaatgggtggttattctcgaccttatctctctgttactgccttcatatatatatatgtatgtgtgtatatatatatgtgtgtgtgtatatatatatgtatatatatgtgtatatatatgtatatatatgtgtatatatgtatatatatgtgtatatatatgtgtttgtatatatatatattttttttttttgacaacagtcttgctctgtcccccaggctggagtgcagtggcgcaatctcggctcactaaaacctttgcctcccgggttcaggcaattctcctgcctcagcttccggaatacctgggattacaggcgctcgccgccacgcccagctagttttttgtatttttggtagagatggggttttgccatgttggccaggctggctcgagctcctgacctcaggtgatttgcccgcctcggcgtcccaaagtgctggaattacaggtgtaagccaccgcgcccagccatgttcatatttttgtatgtgtacattagatagttgagaggaacacagaggttaagtagtcttacccctgaaatgtctgaattcaaacacttattaagcacaaggaaggtgcttaataaatccaataacatgtgtttttacattatttccttaattcctggtcaaaagaatcccactaaagtccatcctcagaagaaccactttttggagtttttatgaatcagtagctcatggtgtactctcaacagttatgaatggaattaggtcctgctagaggtcagggccaggtatggaaagatgaagggattagtcaggagacctggatgggaggaggggaagacaggtgcttggtcagtcagttgttttgtgttgggcgagtaacgtttcttaagtttttgtctgaggtgtaaaggggggactacgctctgtcctatctaactcacctgaagatgcaatagccgggtgagagactgctttcattatgtgctaacgtgagggattactttagatattaataggagagaagtgcaaggaaaggaagtctcagggtatggaatgctttcctggccatggctgctgcgcgtcataatcccctaacacagttaagtggtggttctcatcgtcgttcacccttacagatgtcagaggggaaagaaaaatccaactcaaaacttccaatgacaggcttgtctgtattcaaaccagttcatctcgttcgcagacttttttgaagctataagcacagagcaagctttctgggcggggctcagaagtaaacgttaaactccagggattcatttatttgagcacaggacagaggaagttgccctgaagcaactgattgtcattgatattcagggctcgctgtcaaccaggaccttccaggaactggctctgggccaagagcagtagaaatcactgggtggtccgcacagctcgcgggcatctaacctgcttcaaggctcagggctaaaagggagccagggcccttcctggaggcgggaaccc

SEQ ID NO: 31216 - DNA, 2300 bp, Homo sapien
ctcacagactgcttcacattgccatcagagattgtcctgcaacaatattatgtttagttctactgcagaatgataactggatcttaccccctttgcctgatctggccacaaacttgtttttcaggtctttccattaggctctcttcagctaattaaaaaaaaaaaaatcagttaacccacatttattgaccagtgctgtgtgttcacaactgtatttagactagtggtatagcagtgcagtagtctgaaaacattttctcatctgtaaacaaagacagtcatacctcctaggactgcaagaagtcactgaacatatacctggcccttagtgtacacattactaaagagaataagatgtggtctgcaccctctcatgcaccagtggcttcttgagcagtatgatagagagagacagctgagatttagtggaaaaacacaaggcttagaattgggagagctgggttcaagccccagctttgccactaaatggctgtgtagtcttgaacaagtcacctgccctctctgagctataatttgaaatagacttagcttaagcaacaggaaagcagtaatgagctagaggaaggatagaaattgggaagaagtataaatctgcttaggagatggcaagtttggggctgaggtggaattgatctgagggagagacctggtagaaagagctaggcagtatgaggctgagtgtctgaaggggtagcaggcctgggggtggtccagtgatggttgaatgggtgggccagcccagcgaggggatcgcctgcaatccagtagagatgccctcattttcatggcagggtccccctgtgccagtagacagacccaggcctgggaaggagggctggttgaagtgagatggataccagtcttggagcatggttggagaatctgtccagggtgatggcatctgttttggattggggccttgaggcacattttcagttctgctccctggaccagcataggagggtggcagacagtacagtgatttgaatacaggattgatcctgccaccttgatttctgcctttatttagcggcaaagacactagatcagaaaagtactggatgtgattgctgtagtctttcatgattgatttaggagctgggagaggcctggctaggagttggaggatccctgggaagatgaagattaggtcttacgtgagcctcagccctctcctctgtaaaatgggagtaatgatggtaattatgctgatgttacctattctgactggagtaaggattaaagtacttgtctggaggaaggcacttcatggttaaaacatgaaaagagaagtgcacagtgtttttattacagggaaacaccaaagagctggaaaggaatgagggctggagagatggagctgccctgaggactctgggaggtcatcctgggggcagaactttgacagttgctgcccgaggtgggacagggatgctgggaagatgtgacgatgtgcataagtgtgtcatgttcaagatggttctaagccctggccaattccatacatgctcttttcctttctcatccatagaggttttggcaaaggcatacttgggagtgttgatatagctgacactgcagcaccctcagtttacaggtgtgagaagagtgaggctcccacagtctcacttggacaggtagtcagggctctgatggagctcctggagtttctaggttctctgtcacttgatagtcagtgctgggagggacctcagggaatcagccaatttcacagatggggagagtgaggcaggttgggaattctggccccagtggagggcaccacatgcccacagggaaatgtctttcccagccccctcctcatgcttctcctcttttctgtctggaagtcctagttctcctcctcacgctgagacccaggtagggtgattgtccatgtttcttcatttatctgttttttttctgttgcccagggactactctaagcaccatgctggttgctgactgttcgcttttgcaagatcttggaatctctgtttgttcacatcacaactcaagaggatacgttctcattctcccaatgtttgtcttctgcccattgcatcaaattgctcttccttgtttggaattaaacttctagcaatcatttacctttatggttctcttaacttcaggtcacactgttgtttagtcaatgtgagaatctttcagatgttctgcactttgcaaaaggatattcacagccaatgtgtgcggcagtgaaggacacttgttgattccttatttattgtctgctgttccagggaccggggactaga

SEQ ID NO: 31217 - DNA, 2300 bp, Homo sapien
gacagaatgaagaccacccctttttgctctccagacctaattttgacgtcccacgcccacccgctgaggagggttgcaatggcgagatctctgtcctgaattctggttctggcatgcagtggaaggccctctgattctgtttccttacctattttaatagtaacttatatttgtgttccttcattaaatgtacaataaataataaatgtttgcttacggcatgcttgttaagtataaaacaaataatcaaaatgaatgtgtaatgaccctttggatagaccaagtagaagctgcttttaggacacatgattggaccatttctagatatctgcctaatttgtaaatgaaaaatatgtaagctacacaaggagcactgactcgtctaaaatcttaacgactgactgatttgggcttggggtttggggcttgggtccttcatgccctgatcagagctgtttatagcttgaagacttcctgggggtgagaacaagcaacctcttggtgcagtccaaagccaggaaatgggtgacgattttgaaaaaggactcatctgacctccagaaagcctttacaaccaacagtagaacgagatcactaagaaacagaaccaccgggaagccaagatgtggtacttggattcccatctcggagcacctcctatatcccgacacaccatttcccctagtgtctgatctctctttctcctcctttaattcagtctggagtcattttagatcagattcattcctgattggcttcactgctccaacttagtcatcacagaaccttagggttggaatccatgttacaagttaaactgagcaattcacccccacttttcctgacaacagtgttctcttgagagtctggttttattctgagtcttccagcccggtgtctgtgcccatgaaggactcatgccaaattacattctcaggaggactcccagaccaagagactctgggcttgggcgtgagagacttggggctgttctttttctttttttttttttgagaagaagtttcactcttattgcccaggctgacatggagtttcactcttattgcccaggctggagtgcaatggcacagtcatggctcactgcaacctccgcctcccgggttcaagtgatactcctgcctcagcctcccaagtagctgggattacaggcacacaccaccatgcctggctaatttttgtatttttagtagagaccagttttcaccatgttggccaggctggtcttgaactcctgacctcaggtgatcctcccgccttggtctcccaaagtgctgggattacaggtgtgagccactgtgcccggccgagaggagttgttttgagactcacctgccatcataggaaccatagcttaaattcttgtgaccttttcaggtgcatctcccaaaatatctcccctccaccaaattaatgatttatttcataaatttagttgcattctggatggtctcattcttaagatgagcttaaagcctttcagaccagtcacttccttgtttggggtggaggaggttttttcctggaataggacagtgtatggaagggttgagaatccacttctttagcggttaataatttactccgagtaaggaattctttgttaaagtggggcatgttcttcaagtgccagagaagagagaagggtgatttttctgacatcctccagcctgcttctccatatttggaaatgtttacccaccaggctgatctattggaagagagggaggtgactcagggtttaggagaagcaggatttgaattcttgtttccagaaacaaagtcgtccccccaccctgcccccacccttcccccttcattcctctgtcccttgttctggaagctgaggcgagaatgtctcagttctgttcccttcaggcttcgagaccaccgccttgctgtgtcccgtagtggactgagggcctgcaagagggagtgagggctagtggagggccagctgcctgtgggggctggacatcgtgtgagtacatcattactgccatttctgctcacagacctggggcttacagcctgtgggctggctcacttgcatggtgatgggacacgttgctgggagtgctggtcacttttatttgggggtgtggacagctgctttcccaggggagtacttcttacagtgggatttcaagacaagatcggcctgaagaaaaattatatttgtatattttttaaaaagtaggtatttcctctcatctgaggcctaacttgagttgggtagaaagacaatttgggagtgctgttgtctgatgattaaggctaaa

SEQ ID NO: 31218 - DNA, 2300 bp, Homo sapien
taatgttcagcagtactgagagtattgaaacgttatgatacaggctacttaggttttgtgtatttgaacataaacttcagaccaatttctggtgatgaccacgggtaagatattctgtgttttagttaagatgatttccagttaagatgttgaaatattaaatacttttcttgggtcactgaataattataaaatatattaaaataactttgatatttatttcattcatagaagttctagacaatccagtctagagaagagttatgtaaaattctacaccagaaatagaaccctaaccttgaaagacagggacacttattcatatatgtatgtctaacacaaatgggcctcataattgttgacagccacttattgagcattgaccatgtgccaagcagcatgctgaacacttcacatagctggtcttacttaatgctcacaacaggtaagcattcatatccggatttttcagatgagaaaattgagtcttaggcagttcagtaccttgtccaaggttatacggatatcaagagcctagatcttcataagccaagtctctgttctttttgctcagcaaatacctatttttaatgaggatgcttttctcaactagctactatattctgcaaccagtctgcattttacactgctatcctttctgtgtcattcctaatactcattcatagaattataagatcatagattgttaaggctggaggaaacctgaggagtttcttggttctcagcataaagactcagaatcacctgggggagctttatcacattcaaaactacacacccacacacatctaccttgtatttacaatgaaactctgatctactgacataaccctagatccactgagaaaatattattactcggagaaaatttagctgatggagtgtgccataccccacgtgtgatgagataacaaaaaaagttgacaattactgatctagtccaatcttacatcacaaacatgaaaacagaatgaagagtgacaatcactttctaaagatttttaaaatgtcacttataactatctgcaaaagaacctgcgtcttttgacttataatgttaagtgattttcttgtttattccttaaaactgcctttgtagaatgcactatgttatttgatggttctggagtaatacaaaagaagagagtgattaatttgcctgggatcctacaacaaaccagttgaccaagagataataagcttattatattatgcagatctatacctattcacttcgtttagttaagaaacagctcatcaatatggaatacacattttcatagtagatttgtgggttgcatagcttttttgtgtctgttttcaatttctgttcctttgataactgaacaaataacagagatggtgaaacccagcaagcaaattatcttccagattttatgtgatctcccttctctagtgagttggtatgtctactaatgacacagtagattataaggttatttggtttaagtaaatatttatgcagagcctatgatatgtccatctctgtcttaggtggggtgaattagaattactataagtgctttctgaaaaaaaaaaaaatgtaccatgaacaaatttagaggtctctgcccccaagaagtccatagaccattataggttagagaataaaaaatatatgataatcccttttcccatgtgataaatgttataaaggagctctgtacctatgattatgagagggaatgtttgagagctctaggaaaaacctccctagggagattaagaggtgatatctgatgtcttcatgaaggaataaaatgtttccaagtagagaaagagaagaaagatgttagatacagaagaaacagcatgtacaaaggtatagaggtaggaaaacatggtattctgggaacaggaagatgttacttcctaacagaacttctctgtggctgaagccacattgagttgagggacaagtagtgggacaaggaaggatagagagtctggagttcagtgataaaagatcttgtgtgatagtcataggaaggatgttttggatgtttacctgtgcaaaatgggaaattgttgactattgtcaaacaatgggtaacatcagattagtgatttatgtaaaactgaagggataaccatttctactgctgtataccacttggataaccttataaagccacttaatagggaataatggggctggaaatttaatgggaatagatttaaagtgcttgtgggataagaaacatgatattgctctcttttgttctctttcagttcaaaacaggaagtgcctaggtatg

SEQ ID NO: 31219 - DNA, 2300 bp, Homo sapien
ttcctttacattccattcaccaaaaacctctctggaactgtcaggttcagaatatcaaccaagaccatatcatttagaattcattggcatgtagaggtgactcgattcctaaaagaagcctctctcccatgaaccacgatgtacgttccacagaggcagaaaccgccgtaggttagcaatgcattttagtctttctctccattcacatttactgagagcacaccacgtgcatgttgctgcaacaggcatttccgatagagccgatccatgagctaacaatgtctgaaaacaaatgttatggaactgttggcatttctgagatttggcctttgccatttgatagactttgcttcccaggatgctgtcattttgtgattttttataattacaaggaatttggtaccatgttgttttcaaaaaacctcctagaaagtctccatgtatgctctagaagttgctctacgtaacagttcagcaagcaagtgttccttctcttgagctgcgtccctcaggaagctgtacctttagggtgtgctttccactttttatttcctctcatttcactcctttcattgtttgctatatcctaaaatatgtgaagtgagagaaaaaatatcatttcttctcattaaatctcctgcattaaatctaagaatcctttaaaataatcacacctgataagtgttttatgcatttccctccctggagtgttatcatccatcaagccagtatcatcatccacctgcttattccttgggactaatgagagccaagttaaatagcaaatgacttctcaccccttcctagtcctcatgcctgaggaataagggcgacattaatgggagcgggagagtggtggctttggttgagatgcacgttcacagactagaaaagtgcctcacctccatggtgtatatgtgccaccttttcttaatccagtctatcattgttggacatttgggttggttccaagtctttgctattgtgaatagtgccgcaataaacataagtgtgcatgtgtctttatagcagcatgatttataatcctttgggtatatacccagtaatgggatggctgggtcaaatggtatttctagttctagatccctgaggaatctccacactgacttccacaatggttgaactagttcacagtcccaccaacagtgtaaaagtgttcttatttctccacatcctctccagcacctgttgtttcctgactttttaatgattgccattctaactggtgtgagatggtatctcatagtggttttgatttgcatttctctgatggccagtgatggtgagcattttttcatgtgtttcttggctgcataaatgtcttcttttgagaagtgtctgttcaatactatgcagccataaaaaatgatgagttcatgtcctttgtagggacatggatgaaattggaaatcatcattctcagtaaactatctcaaggacaaaaaaccaaacaccacatgttctcactcacaggtgggaattgaacaatgagaacacatggacacaggaaggggaacatcacactctggggactgttgtggggtggagggaggagggagggatagcattaggagatatacctaatgctaaatgacgagttaatgggtgcagcacaccagcatggcacatgtatacatatgtaactaacctgcacattgtgcacatgtaccctaaaacttaaagtataataataatgaaataaaattaaaaaaaaaaaagaaaagtgcctcacctccctgtgaggcttgatgaatattgtggccagtgagtggaaaatgattcttgtcgaatagacagagtattcccaccccaggaatggattaatagaagacacaatttgagcacttctcagaattatctagtatgcctgagtagagactcacatgggtggaatctgtgttgtctcatcagagggaataaaaagacaatgaggtggtaaatgtgaaaaaagcagccttttagaaaaacattattttcaaatacctttataaatcatctaatttatcttcacataatataaagaaaaaactaataaaaattttcgtatttcactttacataatatgttctcccatatttagggatcatacaattgtattgtcttcaaaacacacacacacacacatacacacacacacacacacacacacacaccccttccaagaaagctgatccttcagaaaataaatcttatttttaagcacttgggttttcaggccagaaaattaataaatcctaaacctgacccatttttgtaacagctaaaaaggagaagaaaaa

SEQ ID NO: 31220 - DNA, 2300 bp, Homo sapien
ttgcttagctcccagtgtgctttctcattctgcccctgctcattctccgccggcactatgttctctgaatgctggcaagcttgctgttctctaaatcctccctttcttttcctgcttttgggtctttgctcttgctgatccctttatcaggaacttccctcacctctacctccacttgtccaaatgctaccaattcttccaggatctgttcatgctcctttaccctcactgcagccatcctgaacccttctccccaccttggggagtatctgcttgttcttccctggtgctcatggcatttggtttattgtgctaatcagagcgctcatcatccactgactggtattacacagttacttgtgtatctgtcctaggcccttacctacttatctccaacctaaaggcatgtctattatttctgcatctcaaatagaagcagacacagttaatgcaaaaccatattattgaataagtgctcagtaatgatgactattatgcacttgagactggagacctaggacagagacaggagcatatctggatttaaatcccagttctactgtatgttagctgtgtaaccctgggcaactttatttattaataataaagtatgtgagcaatcttatatcactgtacagagtgctcatatatgttatccagcttaattcctagaacaaccctgtgtgagaagaactactgagtgctgacactagtcatagtgctagactcatagctgaattcagattccaaattaagtagcctgattgtagatacaaccattcacatgcgaacattttgcttttttcctggctcagcactgccagtactgcttctttgaggtacaattatgcccattttacagatgagaaaactgagacttagaaagcttaaataatttgtcagtattgtaaaactacctatctttgttatcagagaaacatgactgtgaccaacctaggtatatacaattttccacagccatgtgaaagttttatgactctttaacatttctggttgtctgctatgctcggtgcattgggctggctggaccttgtatatgttgggaagaaggaggacttacaaagactaagatacagtctttgcttccaagaggtaaataaaaaacaactaaaatattctatcatccacacctattccctctcccttcttttttcagcatgttactggatgctgcctctttatccatctgccctggtggagatcttgaggttacaggaatagccaagagagacacaggcagagttaagtccaaagcagtcagcaaaggtggggagacatagatgggtccaggtggtaagtaggattggccttgttattggaagctgaatgtagttactggacttggagatttcggtttctagagaagacagcagctctccatgcccagtttaatactgtggattagcgtgggagtggccccagacccacaggcagaaaaggccaatggtcagagtggagatcctcaggacactccaggtgtctgagggaacgtaggtttatccctctttattactaagtggattgctgctcccccttgcaggccaaagcatgaatactggacatagcccacatcgagggtagagaacttggttttggctctcaagtcgaccactcatcagcagatgactgtgagcaagtcacttcctccctccaagactccatttctacagggattccataaaatgggcataagaattttcactgtgctcgtatggactggattaggccatcatgtgcattaacacacttggctgtgagcactaggtgcagccaagatgctgatgggaaagaaaagtctaggttttgccccctgcgtcgttcctcgtgacaggattatgctgagggagggcacattagattgactcacacatactgaaatggtcatagttattgaggttacccagtttccaggcctgaactagtaaacccagcaatgagaatcagccagcattagcaagttttccgtgtgggagtggggtgggggtggggactggagggagcaggcgctgaaccaggaaaggaggaggatgctcatcattggctaaagatccatgcctggaaattaacggcgttaaagtgagacttgcttcaggttccaacccggtaaggcaaatggagaggctgtcaggagaccagaagtttacctcagctattgcaccgacgcaccacgtgctctggtgcacatccaccgcctcttcctgcctcagtttctccttttgtaaaacaacagcttgtaaaggcctggggatcttctcatccacgggagttttctaaggatg

SEQ ID NO: 31221 - DNA, 2300 bp, Homo sapien
tgaggttttccgtgtggcattactcctactgcttgtgcccctcctggatgtattatgttactgcaggctgcagtatggcggagctcagcatgagctgggaggagtgttcagtggccgctggaaacctaacgataattagatggatgccgtgtgaacaattgatgtcttttcacagagtttcttgccctttaaaatagcatacttcaaacagcagtgcattgcttagtccttctcttaagagaccaggctgggatccagcatgtctccactcctcctgccttttgtgcccccaccctgagctgtcataaagacatttggagctgagtgggaacggtatttgcctcgcaattatttctaattgccctgtagttttgtggcgtctaagtggtgtgacctagataccggttctgtaaaactctcttttcagcctggggtctgtattagggagggggcataaatcagtttgatcaggtaactgtggctgagtccatctcaccaataacatttatacccaactctaccatctgtgcttgttgaaatcctggctcttcttaacagcccggatctaatgccgcctccaccgctgtgcagccttcctggagttgctccctcctctggattaccatagtacttgttaggatcctgtctgtggtgctcatcatcttctatatcgtgcaatgctaattcacttacaaattttatcttcttgagctccttatgccagagaatgtgtttggttccttttcatatccttgtctatgtggataactgagaaagctcaaggtagttgctcagttaactactgttgagttagtatacatgacgtcctcgacacggtggaagcaggtaaaaggactgtttattcattgtgacctctcctgagtggcgagttgccagtttgcacttcatttcctgtggaatcgcttcatgacctcagtattcctggaactttaaacaacattttttgaagggtgaatattagttatttttcttttaaaagaatggaattcaaccaatttactttgtcagcgcacacccgttcctccagccatcaaacaaatacaatctgatttggccagagtctgctgaatgaagtagagaatttaggatagaagattgaaattcaatcatacacataacagcattttgttttctgtgctctcctttctttcagcaatccacctacttgtgcagttcatactttattttataccaactctgtatgtagaacacacttgcttaggtttcagaatgtgttcattaagattctatttcatttttttagcaccgttgctatgtcaaatcttatcctaggtttattctcatatgcttcctttcaagttctatctgcatttctgaaggagaaatgatactctcaacttacagatgaccaaaattaaaaaacctcagaaagatagattatgacttgctataggctgcaaagccattaaatgacagatcaggattcactaaatagatattaatggatcatcattaattcaatgtgtatttatttattacctactatctgctgggtgttttgaggagtatatgagagaataagatgtagcattgccctcaaggggccccccatctagggagggggatacacacttacatagagacaatatcatgtggcacatttcctaataggaatactgaccagagattgtgtgtacatgtgtttgttttcagagatacactgctctacatgtcttctacatttttgacaagagtggtagtgatgcttaaaatcacaaatatccaataaatcaagccatcataaagaatattaatgataggagtgtaggcctcaggcttaagcttaattataactacttggaggcatacagaagccatggaggaatggatgataggctgctcctgctccctcagctggatgtgtattagagggagttggcagaaaaatgcaggacttcttgagggagaggacaggaggtaaaggtgtgtcattgcagaacaagaaaggccccacccacaaacccaattctctgcctctgacgggttgagttccaccctgtaaacatcctcagtcctttcatttgactatttgagggtggcagtgtaactctcagcctacttggtgaagtgagattcagactgagtggggtcacagcacagggcactgtcttgcctggctttatctgagccaatcacacctctcctggccactatctgtggtctagccccctttgtgcagaaagagaaagaagagccttgaggaccagcctagtcaggtaagatcaagtggcttgtcactggttctgcagagatgggtt

SEQ ID NO: 31222 - DNA, 2300 bp, Homo sapien
tgatccatgaacgcgctgctacactcagtctgggtgacagtgcaagaagctgtctcaaaaataataaataaataaaaataacttttaaaaaacaaaaattaattaaattttaaagacacaacacactagagatgtttgcaaattgattatttgggagtctatatccctggaagttaatttaaaatatttagaagagttcttcctcatttcctagagacgtcgaattgtaaatatcagagctagaaggaacactagggctcgccactccaaagtgtggtccaaggaccagcagcatcaagtaacctgggaacgtgttagaaatgcagagtcttaggcctcaccccagacctactgaaccagaatctgcattaacaagatttctaggtgcctcacgggcacattaaaacttgagaagctctgcactagaaatcttcactccacctttcattataaatggaatcacttggctgtggtcacaggaaattgattatttttaatttcagaaccttctatttaggtcatctatatttgctaatagcagggaagaaagccaaactctttaactgcaattaacaaatctataattaattagttaagcaatcttccctttaagttttacattttgtggagcaagctgtttgatttggctggggctcaggctggcctgtttgtgaatttcacaattcacagatgttagccgctctcgggctaagtaaaggaagagaatgtcaagttttaaatagcttctcccttccatcctggctgaagcaacaaataaaatatttttatgaaacacattttgagttagatttacttacagggaaatgtcaaatttctctgaaagggctttagattgtctcacaactttgacatctactgatgtcacctatttacaggtgtgtcctgtgactagggggtgaagggaagatgtgaactcaccatgttagtgaccgttagatacacagagtggttttttttccccctgttggagtctatcctaactgagcttctgaatcatatttcattcaatttccaaatccacaaaaccaggataagtttacagcccatattcagaaaggaaataaattattttgtgtgtagactttcctgatattacactgatttgggaatatatgaacaattttatggtttcctttcgaagtaggtcaagtcaaagcaaaaccaaaaacagcaaaaactgtaagacataaagaatagagtggagccgactgagagattaaaataaactagaatatttttattaacaggcaatttgaaataatttgtgcacttcagaatattctacaataatatattatttccaattttaatatctttaagaaaattactatattatatgtaagtacatgtgcatgtgtttgaggtaggatatttaactcaataaaggttattttcttttattcgggtcaggcaaagcttctaaggggatgtgaaagggatatctctttctcttagctgagaggaagagtgagttctaagttaaatataatcaaggaatttccctgtctttgctatttgagattgtgaccacaacaggcggttggctgaaagggaaactgaagggcggggagggagggaaatagatgaaaaaacaaaacaaaacaaaacttccctaagcagctctacaaaacattttagccccagaaatagtcacagaaatcctcaaatcaaaccagtatccagatacaaggaagtgttatgtagctggagcagggtggacactcatcagctcagttcagttacaaaagtccaggctgctgaaattaaactctgatgccattcatgccagcatccaatcacgacagagatcagaagttcagagatgcctccagctccaaattgccaacaacaagtgtggctactatacgtcaaggactctgaagccgtgagagagggggaagaacaacagtagagaggatgcccagctggtaagaatcgagtgtttatgaagttttagtcaattgatgaatctcattggctaaaatcaagaaacgctccgcctctttgcaaatatgtatgaaggagagaagtgcctaaacttctatgtctgatagcatttgaccctattgcttttagcctcccggctttatatctatatatacacaggtatatgtgtatattttatataattgttctccgttcgttgatatcaaagacagttgaaggaaatgaattttgaaacttcacggtgtgccaccctacagtactgccctgacccttacatccagcggtgagtttgaatgtgacataacttctctcaaaacttaattgaagtgcct

SEQ ID NO: 31223 - DNA, 2300 bp, Homo sapien
tggaaggaatctgactttttcatctttcaaatcttgctgggaatcttttgacttcgtgaaaggtgaagtttgtttacatttttagtggatatcaatacttgggaccctgagccttagatttaggtgttcaaatggctacatgatcccattagtgtaaaaaacaatttaataatgactttggtaggcagttgtgctaacagcatttcctctagatcattgattcccaagcgtgactcatccagaaccgcctagcaggctgtataaaatccagttgttggggctgtaaccctgcagagtctgattcaggaggtctggggccacgtccagaaatctgtttttaaaaagcaccctggatgattttcaggatcatccaagtttttgggccacaggaattatgcatacctttaaggaagtaaccatctgctttctactgttgactcttaagctgtcagtaggtgtagaatttagacacattgtacaaaaaattatactgtattttgtaagtaggtttttttttttttgccttctaggcagtgctcatttggttaattataggtagaaagagagatcattcttcccaatatatgtgtgaagaaatgaatgttttgtctgatataaatttgtagtgttacagagtactgtcatattcttgcatactcaagatcaaattatattatgggagttttttggtttttgtgtataaaagaaggaagcattattaccagtaacctatgggtcttatatatcagccaatgaccacgtcatcctttaagtgcataaattttatggatgcaaaagtagaagtaaaggggaggcaaatccgaagtcgtgaacgtatttgcaaactttgtttctgaaatgtatgttctaatctcttctggcttccaattctcttctaaactttgtgtcttctaaattttagaagaaatcacaattttcacttatagttatcttggccacttacaacctttcaagcaaaatagaggaaattgggtccctgagtggggggtgggggtgtaggatgatgtcaagaaataaatctaactgaattacaaatactcagcagtaaagagagtattttaatgaatcagatgataaccatcagggtgcatttcatctccactaaatcttcgtaccaaggccagattctacatgaatgttggtacgtatttatgtaaatgtatttttaaaacaaaagccaattgatatcttatgctttaatacttattccactaatcatttacatagatgcatcacgtgcagtaatcatttttattacctattcacaagcaaaaatattagtataaactgggtacaataaaatagagaaaagaaatattcaaatagataagcgttttgttaaaaaaaaaaaaaagaagaaagaaaggacacatttatcaggattcctatttcccgtacataatatggatgtttgtttgtttttgtaagttaacgggaccggtggtttaacttgttattgaaacatgctcgaaaaaatcaggtagcttattttgtaattgcttgttatgaaaccactggcatttctctggggaaaataagttaaaaactctttagctatcaggcagtgggttttaattttttatattggttaaatgtaacagtggatttgcgtactctctcctaatttctaactttgtgtaatcattcttgaaaccccaaatctagattttaaaaaagaagccttctaaaagttttcctgaagtttacttttcagttacaaagagtaaaataactttctgaaatgccttctgtaaatcgtggtggtggtgcggtttgtttggggagatttgttttgtttttaaaagacagtgcactttcttatgaaagagacagggaaagttttacctgtctgtctcctgggtttgttttttttttctttctttctttttcttttaaagattggtgataaggaattctaactacttaatgagatgggagaggcctcactccattggagtggaggagtccaggtggaagttgatggattggacaggtaaagagaagagtcccgcctcctcatgcctatagttgggtatatattaggaaaccttaaattatgtacagagagagaaagagagagagggacttgagttctgttatcttcttaagtagattcatattgtaagggtctcggggtgggggggttggcaaaatcctggagccagaagaaaggacagcagcattgatcaatcttacagctaacatgttgtacctggaaaacaatgcccagactcaatttagtgaggtaaggattttagattttagcactccatttagag

SEQ ID NO: 31224 - DNA, 2300 bp, Homo sapien
cctccaggaggcaggctgggatccagggtccaaccaatattcttgtgagagtgtgaagccaaggaacacgaaagaggggaacaccttggctaagaatgtattcgtgacagaggagaaggggaggaacaggaagcctccagctagtcgtttggaatctggcaaccatttctgtcagctttctcattcctagattgatgcagattgcttaattccttgaggtaagggatatactaaattgcctctttgttcaactcttagaataagaatttccctctcctctcccgtcccctcccctcccctcctctcctctcttttctttttctttgttttttttgtttttgagacggagtctcactctgtcacccaggctgcatgatctcagctcactgcaaccttcacctcccaggttcaagcaattatcctgcctcagcctcctgagtagctgggtctgcaggcacgtgccaccacgcccagctaatttttgtatttttagtagagacggggttttgccatggtggccaggctggtctcgaactcctgacctcaggtgatccacccgccttggcctcccaaagtgctgggattacaggggtgagccactgcacctggcccacagcaagaatttttttctgaatagcattttacgtgttaggcgtctggctgtttaggagatgaggaaactgaggccctcagttgccaaggtcacacagctggtaaacggacggagccagaatgcgagtacagctcctcctgcctccaaaggttctctgggccctgtaaaaccacgggctgcacaggaaaggcaggctatatattgttcttcccctggcccagcgccctgatccaatgcccggacacacatccacaccaagttggacgaaaaggtaagggagaaaccttccccaagagaagaagcggtaagctttggttctaaaggccctgggttgggtccgtcctttgccacttctcagctctatgcatttaggcaaatcacttatcttcttaaacctccgcatctgggcctacagggcctctatgggttttttttctatttatttatttatttattctttttttttttaactttacgttccgggatacacgtgcagaatgcgcagatttgttgcgtaggtacacatggcatctacggtttgattcagtctgaaatggcgctccaggcttcatttagaaggtgaagcactctgcaaactgcgaggccatacagagattccagaatatgattaaggccctaaccttgctaagctggattttctttatttcccaaaaagaagactaatactatccacttgtacaaccagaagggagctcacgtgtaaagcgcctcgtccccggccggcctcaagcggcgctagctctctggctggcgctggagtgtgccgcccctggcagccccgccgctgcagcggggagcctgggagagcggctctcggagtctcaggcagcaggaggagcgtgtgagctgtgggcgtccctttaagagcggctggccaggcacggcctccgcctctcagtacgcggagcgccggcggtcacctggggctcgcggagcggccagatcgcggcggagtcggcgcgcttccccgagggaaggtgggagaggggacccggacgcgaggtgccccgaagccctctcgagcgtaaccgtcccgcgcctctctgaggcggaggatgcgggagcgcatctgggcgccgccgctgctgctgctgctgccgctgctactgccgccgccactgtggggcggccccccggacagcccacgccgggagctggagctggagcccgggcctctgcagcccttcgacctgctctacgccagcggcgcggccgcctactacagcggagactacgagcgagcggtgcgcgacttggaagcggcgctgcgcagccaccggcgcctgcgggaaatccgcacgcgctgtgcccgccactgcgcggcgcgccacccgctcccgcccccgccccccggcgagggccccggcgctgagctgccccttttccgctccttgttggggcgggcgcgctgttatcgcagctgtgagacccagcgcctcgggggccccgcatcccgccaccgcgtcagcgaggatgtgcgcagcgacttccagcgcagagtgccctacaactacctgcagcgggcctacatcaaggtacccacagagcgctcctccactgcaaagcccctgcggctctcacacgctctcttgagccctccctgctgcccccgtcatctctgttcagtctttcgaattgggtctccttaaatatgtgtctcagtttg

SEQ ID NO: 31225 - DNA, 2300 bp, Homo sapien
aatttaattgaaatatattaaatgatgtagaaatgtcaccaaatgtacaaatagaatgtagcaaggtatcctggcactttgccctcagtcccacagcaggagttcctatcctgatgtgcttcaaaaccttccacaagtggactgataaccctggactagactccaaaatctttatctgaaaacagacaatctctagagaaaaagtctgggcagatgactgatgtgctaattctggaacactgaccatccaaggcattcaatatacattcagctccaaactggagctttttcatcagtgatatgagccgaattagtaacgtttggtgggaaaaaaaaagagcatgattcatcagtgtctcttggaattacacagccagggctgttcatggcctgagtggtcaaacctaacaaaatgaatgaaggaatcagcatgaatctctggcaagcccctcagcgtagtggtgattccacataaaagccttcttcggaaaaatcatagcaactagatacatgcgtgagtctttttcccattgcctgtccctctgctcaccattgcaggggctgaaagactgatgagattctcacaggcactagaagaccacagaaatgcctccaggaggcaggctgggatccagggtccaaccaatattcttgtgagagtgtgaagccaaggaacacgaaagaggggaacaccttggctaagaatgtattcgtgacagaggagaaggggaggaacaggaagcctccagctagtcgtttggaatctggcaaccatttctgtcagctttctcattcctagattgatgcagattgcttaattccttgaggtaagggatatactaaattgcctctttgttcaactcttagaataagaatttccctctcctctcccgtcccctcccctcccctcctctcctctcttttctttttctttgttttttttgtttttgagacggagtctcactctgtcacccaggctgcatgatctcagctcactgcaaccttcacctcccaggttcaagcaattatcctgcctcagcctcctgagtagctgggtctgcaggcacgtgccaccacgcccagctaatttttgtatttttagtagagacggggttttgccatggtggccaggctggtctcgaactcctgacctcaggtgatccacccgccttggcctcccaaagtgctgggattacaggggtgagccactgcacctggcccacagcaagaatttttttctgaatagcattttacgtgttaggcgtctggctgtttaggagatgaggaaactgaggccctcagttgccaaggtcacacagctggtaaacggacggagccagaatgcgagtacagctcctcctgcctccaaaggttctctgggccctgtaaaaccacgggctgcacaggaaaggcaggctatatattgttcttcccctggcccagcgccctgatccaatgcccggacacacatccacaccaagttggacgaaaaggtaagggagaaaccttccccaagagaagaagcggtaagctttggttctaaaggccctgggttgggtccgtcctttgccacttctcagctctatgcatttaggcaaatcacttatcttcttaaacctccgcatctgggcctacagggcctctatgggttttttttctatttatttatttatttattctttttttttttaactttacgttccgggatacacgtgcagaatgcgcagatttgttgcgtaggtacacatggcatctacggtttgattcagtctgaaatggcgctccaggcttcatttagaaggtgaagcactctgcaaactgcgaggccatacagagattccagaatatgattaaggccctaaccttgctaagctggattttctttatttcccaaaaagaagactaatactatccacttgtacaaccagaagggagctcacgtgtaaagcgcctcgtccccggccggcctcaagcggcgctagctctctggctggcgctggagtgtgccgcccctggcagccccgccgctgcagcggggagcctgggagagcggctctcggagtctcaggcagcaggaggagcgtgtgagctgtgggcgtccctttaagagcggctggccaggcacggcctccgcctctcagtacgcggagcgccggcggtcacctggggctcgcggagcggccagatcgcggcggagtcggcgcgcttccccgagggaaggtgggagaggggacccggacgcgaggtgccccgaagccctctcgagcgtaaccgtcccgcgcctctctgaggcggaggat

SEQ ID NO: 31226 - DNA, 2300 bp, Homo sapien
caaatttgaaagctccaccccaggtttagtgaatccggaactctgagatggaagtcagttaattatttaaggaaaaagtacattcttggcacactctgtgagaagttcaggagtataagagactcgtggatgactgtctgttccaacattgagtaagtaccactgggacagcatgacctggaatcagcttcttggcactgcatggctcttattaccataaggtcatgaactttttgtcctgatccagccttaaaaagcagatcagattggctttcctgggagggaatatctgggggattacacaaaaccctacctattctccaaaccctacctactcatgaattctacacagcacctggaaccccaactcatagacttattctttgggctgtggcattagctgtagacctgtggttctcaaccttggcttcgtattataatcacctgggaaacttctaaaaatcccatcgctcaggtcatatcccagaccaataaatcagaatctttcagagcagaagccagacacttcttaggtgattctaatgttcaagcaaatttgagttgtcaatgaatagtttctctcaagtcaggcagagattgtacgtaaggtagtaatacaaggcatattacttacttactacttgtagtaagatataagaaataaggtagtaggacatacaagaggcttgaaagaacctggccaatttggcaatcagtaggatgtggttgcattctataggctattgactgtgtgctaatgccaattatttccctaagtctttttagatccttctagccagaagctatctttgtaacctctgtgttcccagagctcttttttctttcttcttcttttttttttttctttttgttttttgagactgagtctcactctgtggctcaggctggagtacaatggcgcgatcttggctgactgcaacctctgcatcccgggttcaagtgattctcctgcctcagcctcctgagtagctgggattaaatgtgcctgccaccacgcccagttgatttttgtattttcagtagagacggaatttcaccatgttggccaagctggtctccaactcctgagctcaggtgatccacctgcctcggcctcccaaagtgctgggatcacaagtgtgagccactgcgcccggccaacactttcaatctaatctaacacgtaccacattctaccttgtattatagctgtatacattatatatatcaaatttgtttcctatacagtactgtgagcttcccaaaggtaagaatcctgacttatcttctctttcacctagaatatttactttaagagtaggcatcaaaaattgttaatttaattgaaatatattaaatgatgtagaaatgtcaccaaatgtacaaatagaatgtagcaaggtatcctggcactttgccctcagtcccacagcaggagttcctatcctgatgtgcttcaaaaccttccacaagtggactgataaccctggactagactccaaaatctttatctgaaaacagacaatctctagagaaaaagtctgggcagatgactgatgtgctaattctggaacactgaccatccaaggcattcaatatacattcagctccaaactggagctttttcatcagtgatatgagccgaattagtaacgtttggtgggaaaaaaaaagagcatgattcatcagtgtctcttggaattacacagccagggctgttcatggcctgagtggtcaaacctaacaaaatgaatgaaggaatcagcatgaatctctggcaagcccctcagcgtagtggtgattccacataaaagccttcttcggaaaaatcatagcaactagatacatgcgtgagtctttttcccattgcctgtccctctgctcaccattgcaggggctgaaagactgatgagattctcacaggcactagaagaccacagaaatgcctccaggaggcaggctgggatccagggtccaaccaatattcttgtgagagtgtgaagccaaggaacacgaaagaggggaacaccttggctaagaatgtattcgtgacagaggagaaggggaggaacaggaagcctccagctagtcgtttggaatctggcaaccatttctgtcagctttctcattcctagattgatgcagattgcttaattccttgaggtaagggatatactaaattgcctctttgttcaactcttagaataagaatttccctctcctctcccgtcccctcccctcccctcctctcctctcttttctttttctttgttttttttgtttttgagacggagtctcac

SEQ ID NO: 31227 - DNA, 2300 bp, Homo sapien
aacgcagaaaatgtcatttatttgtttatttatttatttatttatttgttgagatggggtcttggtctgttgcccaggctggagtgcagtggcacgatctgggctcactgccacctccgcctcccgggttcaagcaattctcctacctcagcctcccaagtagctggaattacaggcgcccaccaccatgcccggctaattttcatattgttagtagagacggggtttcaccatgttggccaggctgatctcgaactcctgatctcaagtgatccgcctgcctcagcctcccaaagtgttgggattacaggcgtgagccactgcgcctggcctgagccaccgtgcccgggtgtttaataatacttttaattcttaaatgtttggaacaaaaaaaagaagaaaatgagattatatgattcacatggtactgctctagtcctgcagcaaattccagtgccttctctgatcagggaatttttacaaaatcaaatgtgattgatacatcttcatccacactgacaggcacccacagaacatccactgagacctagacagtagtactgactgcaggccctaaccctgggatacaacacgaacatggtcttgtcctaaacagctgataggagaaagacagtattcactgtgttaatctcagtccaaattaattgtcttcatctagctcctgtcttacattcttcattgcttgtccctaaatcctagcacggccaagtcctttagttttaagcctacatgaaaggcatccagggagagccaggtggaaatgaaggtggtggggcttggcctttcttcccattcccaccttgagaatttgcacctttccttctctgtcaccaactagcagttgccatggtatataagggtatatcttattttatccttaatatgtttatttctgcttccaagatgcttctgtttttactaaaaccatagaagcttcccctcccaccacactcgcaccacacacaaaaagcagttggaaaaacatttcaatgattcctaaccacaacagcacttctgactaactacaaagaaggaagctttggagaaacatagagggaaactacagtcccagcgagaccgaaaccggaggggtgagatagccagtcacagtaaaagctggaaccagagcccagacttcctcaactccagcccagtccttttgccactggggaaacgctgtttacatgtcctcacctgcgacgaacaacatttgataactcacaaaattaacacctttcagggagagcggggcactggccaggtccctctgataatgaattgctgctctaagacataactgctgtggggaggaggttggtgtttggcggggaagggctgctagcctgcagtttcataaggacaataatacatcaaaaaggacaatcatagatcaaaggggatattttgggtcaacttgatatgtagtggaaagcagattgggaggggagccaagtactggatatgctccgtgcgtgagtgtgtctgtgtgtgtgtgtgtgtgtgtgtgtaaatcatgttgctctctgggtctgtttcccaatctgtagagtgtaaaagtctctgaggctccttgcagagacaagtgatggaacgaccttgacagaagagagcagagagaggaaagaagggggaggaagccaagcaaaggagagagaaatggtgtgatgggggaggagacgcggagttgggtagaaatgccttttaataagatattgggaaaaaagtattaaacctaaaactgcagctcttgaaggatcattttttcatctttgtgttaggatttacaagtacagtgcatagtaatttttggataattggagtgaatgaatgaaaagcgtgaaacgccttacaggagcgagaagatccacgagagaaagcgagcagggacgcagctctggtgcctggtcctgccgggtggtccccacgccgccagccgcgcgttccccaaccgggcgctcccggcgccctctcggtgagccgccctgaaaccgccagggggcgctccccggctgccggggctgaggcgggcggagctgctttaaatcgcggcgcccagcggttctgcgtctcagttcccgagcctgggagcaaccgcagcttctagtatccagactccagcgccgccccgggcgcggaccccaaccccgacccagagcttctccagcggcggcgcagcgagcagggctccccgccttaacttcctccgcggggcccagccaccttcgggagtccgggttgcccacctgcaaactctccgccttctgcacctgccacccctg

SEQ ID NO: 31228 - DNA, 2300 bp, Homo sapien
attcctgggtttgcatttataacaagtggccttacagagtccagtgtacactcaggttgaagaactactgccttggagtgcactgttagcaggtaaagtacactgtgaaaagtccctgtgtgaaatgtcagcaacaagtccaggacttttcctgcaaagggcatgtgcttttggaattggtttgctctcccagatcagcagagtaaatcttaatagcatttcagattttagggcacagggaaagattctctgtgactcaccaaagcagcatgtttgtattccgtgggcaatgacattctttgaatgagcacttaaaaaacaggtattttttttccaactgttaaacaaaataagtaaaataaaagcatctgtaatgtacctcgcagatagttataacgatcgctaatgtgtacagtaatcaccccttctccttgaggaatatgttcaaagaccctcagtggatgtcagaaacgaaggacagtactggatcctacacacactatacgcaacagtaggtcagatcaccgaggcagctattaagtgactaaggggtgggtagtgcatacaatgtggaaatgctggccaaagggatgattcatatcccatgtgaagtgggatggcttgagatttcatcacgctattcagaacagtgttcaatttaccactgatgaattgtttatctatgaaatttcccatgtaatttttgcagaccatgattaaccactggtaactgaagcctcaaaagggaaattctggatagcaggggtggtactgtagaccctatgtatagaaataattaagcttatattccacctatggttttccatgcagcttttacatttaaatttacgttttatatacttgaataaaatgaattaaaattagaaaaaacaaagtttagccacaaaaagtttattattgtaatatattttgaaaaatggtttatcaatactgattttagccttttatactgtatattatgatcaaataattttcaaatggaaaaaagtaatccttttataagctgttggtaaaataagaatcttagtagctgattcatgccagagtaattacctctttctggccttttctctgctcctttctttctctccctcccaatttctttctctcactctgtctcccctttgacattctctcctacattaagaatcaccactttgtttttactgttctcattcaaaatttttattttagtatatagaagtctacctgatgaagagaaaatgttgatatatgtgctttttaaagcatattaaagagtattggttatggaatttgtagacccattaaggatacctattcagatacagataaaattccagttgccccagttacatattaaaaacttttttttacaaaaaagaaacacactttcttcctaatataacagtttttttttcttcattagacgcgttttcaaacattggtccatgagggaaaagtaataatataggaaattcttagtcatgttaatattttccatttagctattactgacagatgctattctaagcgacttacaggcacaatatcttttattcctcatatgaagaacaagcattatataaagaaaatattaatacatgcattttcagaaactacagcccaagggctctcagaccataaattcagagcaagaatttccacccagagctgtctgcattaaaatgcacacttgttcccactctacgatgctgaaaggttaggagccttggctgtccctactgcccaggtgctacaagtccttcatggggctgttctacgcaacactttggaatgcagactcccttgagcgagcacttgtttagcatagtttcaccagtggcctgtctgtctaaagtagtcggcgaatattaaaatagtcctaacaataaaataacactcagtcaaccgtgtagccttcttccgagtggggaggagaatagctcactctccctagagggcctaagaaagatcagtttacaggttccagcatggggtgggacccttcctccttcccccgtcttggcactggcacttggtctggtgaccaccactagcccacagttgggtcagaaaacgttacagaactcctctctcccccacccgaaacacactcagcccttgcactgacctgccttctgattggaggctggttgcttcggataatgacctccaggaccccactgttggttacagcctgtttgtattattcttactgcaactcaagacacctgcagcagggcgtgagaaaaagtaaaagaccagtattttcacattgccaggtaccagaaacacag

SEQ ID NO: 31229 - DNA, 2300 bp, Homo sapien
gttggtcattattgcagtttctgaggcaaaaccaaatatgctgcccttatttccattctgtctcttctctagtcatctggcctcttcctttcccagaaattcttaagatcattgactccaccgacggaagtcaggcttctgactgcctaataaataagttcaccagtgaaaagcctatttttcattctgtttaattacaggcttcagagacactcaaaatggagcgtatctgggggataaataatactgtaggtttggtttacttttctcctattggcattggcaccaagccttcctctgctttgaaattcatggctgcgaccgtggctgcatactaaacagagcgtagtcaccacacagacggcttcacccatccagatgcagctcaactagtccatataccgcgatggccaactctgtgcagtagtttagatacctaatactgctggtttgtttctagagcaatctatgtgtgtgattgtaaatgggttcatacattacaatttgaattggatgtggtgaactacactggagcttgaattacgatattctcattctgcattgtggatcattgccttcaaaattggctcttagaagtgaatatatgtaaaaaataattagatgacatatagacattgtaaaaaatatcaaaaatacaaggaagtaacagtgaaaagtaaatttccttcccactctggtcttcttagtttgcaatttccctttcacagagcaaccactgttagcagtttcatgcagagacatcctatgcatatataagtatatatgcataagttttgtgtacggagagaatactatagctctaccttcctatttttgcatacaaatgtgacatgatgtacacaaagttctgtgatttttgttccttttattcaataactattacagacctctctatatcagcatctgtgatctgtctccaccttttaaaacagattcctagtattctgttgaatttatataaccattttgtacttagtctgtcacattttcatgaatatttgctgtttccaatattttgttaacaccaacaatgcttcgatgaacatcattgcatatagtaatttgtgccatgtgtaaggggtacattcatgtatcttgcaaggagaattcttgctctaagggcatatttattttttatgttgatgtatattgcctacttgttttccaaataagctgtacagttttcccaaccgtatatgagagtatttgtttcccagtatttatccctcttccctatattatcaattttttgaacttgccaatctgattataattctaaggtatgtttatctaattatgactgaggttaagcatcttaacaatcatttgttacattctttccacataaccatttagctcttcattataccctgaaagatatccatcttctctccactagtttcaaatggaagcttaaataaatttgtttatttgagtctaaactctccatttctaaactctctactcttttacatttaccttattatttacacatatcagtactaatttttgtaaaatgcatagattaagacatcttaatgtacaataggttagtgccttttctttttctcagaatttccctagatattcttgctttatttttcagtggtagtgatggagttgtttcataaaataaacattgaaatataccttgtttaaaagaggggtattatcacaataaaacaaggaaagctttatgcctaagtttgggttagacctggaactgaaaatggtgtgtaggagaacaaagagtaccaacaaagggaagaaaattgaataaatgttccaaatatgaaatactattagaaacccagaagttccctggaataaaacatgcacttgaatgtggaaagttattaagtagccagctagctctgtaggtcagcatttataacccctacttttaaaggccttgacaaacagtgctaaagttctcaccttaaacttaaattccttgggctcttagtacctgtaaacatgtacccaacattccttcccctagcatgcactttacgagtcacaaggagccattattaatgcatgtcctggtaggaagcataacttatagagaagctagtaagttctgagaaagaaggaaataaacacaggcaccaaaccactatcctaagttgactgtcctttaaatatgtcaagatccagacttttcagtgtcacctcagcgatctcaacgatagggatcttgtgtttgccgctattccaggtaactatctctctttctgggttaaggttttcagaggtactctgaggtactctgagga

SEQ ID NO: 31230 - DNA, 2300 bp, Homo sapien
attcctttcaattggtgttcatctctccacaacttttactcaaccttattttgtaagcctttttctttgtagacatatttccataatatgatagttatgatgcaaatattttattctgtgcgtagacagcgttggttaactaatcattttcatttccaaccatttatattgtgttcaaactacaatatactatgaatatttgtctatatgattattcatcttaatgttatcttccttaagctatgagtagcccttcaatgtccgggaatatacatctggttcaattctgaattactagcatctgtttggcttctaggtagtacatgagactgagtagcggctgagagcatgaacgtcgagtgtctctagtctcattttgtattctccacttgtaggcctgtagccttggtcaagttatttaaattccctttatctcctttatgaactggagataataatagcaccctccaggttgtattgagggttacctgaattaatatacacaaagtccttatgattgcacctttttattttgtaagcactgtgtaaatgcttcagtgtactatatatatataaaagtctgtgcccagaatatatttaaggaatgaataataaatcagaaaatgttttattgttgcttcatacaggtaacattttaaattcttttggattattttctctttggttcagtgacaatgttgtgagcaggtgctgggtcccaggtatcctgagataaataaaaattttgagcaattaattttcataagtgatgtcaagaagtaaagtatcatgaacatttctatggctccaattacactgatatttcaccttaggaactgaagctccgccagggcaggggcagcctctgagtttcgtactgctgtgcacctttagcagcacgggcacctgctggtttcatttccttcccactcacctgggcccttttcttatttcacatcttttttctccttttccttaaatgctttctctgaatcttgattcttgaaaataaattagtaggattcagttaggtaggaggaggagaaaagaagatgtgatgagcaagaagatgtgcgaagactcgtcagtctggtaggtggctttggttagggggtttcagaaatggggacaggtcatgaagggccttgccagtcaggaaaaatcatgaggcactagcagtaggaacacagcagaaggtgcctgaacaagagagatgacttaatgaaagcctttataacgcttcccgggatatattacagactaccatctacagtggcagagggcagctgaaggaaggctcttgcaaaaacttggggaaatggaaatgaatgaaggcaaatatttgttttgagattatttccttctatgtaacctattagttcttttattcgttccccatacatgtattgagtgcctactttgtgccaggcactgtgctaggcaatgggtatattaccagtggacaatacagatttagtcttgctgtcatgtcctgttgcttgctcatatgaatgtcagttcaagacagcaagagctcaggactgcggagatcgcatctacatcctgccgcgctctgtgccggcacagggtggttgcgaaaatcgtgcagtctgaattgattcaaggccttgcagcatgattgctaaatacgtcgagacaggaagaaagggcagggtggcaccgatctcaactgcgagagcacgatcttgcaatgagcgcatgtgtgcgcctcggtgtgtagtgaggggcgtagcttcccacagcgcctggcagcgtgccgagctgcgctgcaggactaaccctctcctttccccgcgcgctcaagcccgcacaggcggtggcagggagccgaaggggccgagcgcagccttgcatccgtccgcaggcgggcccggcgccgcgcctcctggcggcgggcgggaccgtccaggacgccgccccgcggccgcagctcctggaagcccagagcgccggtggatcgcgagccaaggcggcgggtggagcctgagccgtgaggccgtggccaatcgcgccgctccgggggaggagccccaaagggggaaaagaaagtgcggcggaaagtaagaggctcactggggaagactgccgggatccaggtctccggggtccgctttggccagaggcgcggaaggaagcagtgcccggcgacactgcacccatcccggctgcttttgctgcgccctctcagcttcccaagaaaggtgagtctcgcgccgccgtgagggctcagaagtcaccaagccgcagaatctcagggtagacggattcttagagatcct

SEQ ID NO: 31231 - DNA, 2300 bp, Homo sapien
cagtgaaaataatgtttttgaggccgatttccaagtagaaaggaaagacaattaaattcctttcatactacactagacaagagaatgaaactatagtggaaaaatattgagatttttactcaaatcagctgcatcaacaattaaaattctaccaataccgtggacttcttcaggtagcaatgagaactccatcccaagatatggaccgaggatggaatgataattttcaaaaatatttgtaaggaggtttaggtgtcaaattgtgacttgaatttgatgaccttctaagcccttcctgatgttatgattctgttttaatttatatattgtcaaagactattcaaataaaaaacaccttctatgccaggtgctggaaacaaaaagataaacataacacagtctagtattttaaaatagtgctaaactctacaatgttatctctgattgttcatacataggcaggtgcatagctaagctgcttggcttatccagctatttgccgggatggtgggtcactgtggtcaccacacagaaatcaattctgtttctttgttgttcattccagtgccagctccaagatacacagtggaactggcttgtggttttggagccacagtcctgctagtggtgattctcattgttgtttaccatgtttactggctagagatggtcctattttaccgggctcattttggaacagatgaaaccattttaggtaagtaacagaaatttgacataaacctcttctactgtcatctttagaacatatgttgtaaaaaaaagaaaaaagaaaacatgttgatttgaaaaacctagattaactggaagatttaagcagattaactttaatttcaaccgttgctattagaaatctttccgaagattattattctattttcttggattaattagtgagtcggtctaaattaacaccctccaaatagaaatataatgcgagccacttacctacttaaaatttcccagtgaccacattagtaaaagtaaaaagaaacaagtaaaaataacgaattgactaaatatatttataatactattttttagcatgcaattaatattaaaaagctaatgagatattttagtgttttctttggtactaaaaatgttcaaaatgtaaaatgtattctactttatccttatagcacatctcaattcaaaccagccacatttcgagtgagcaatagactcgtgactcgtggctgctgtattggacagtgctgatccacactccttgtactcagatagagatctgtgaaccagcagcaacatatcacgtgtagcttattagaagaagaatcttagacctagcccctactgactcagaatctacatttaaaccatattcccaagtgattcatgtgtacgttaacatctgaaaagcacagctctagtgcaaatttgcttagtgaaaagaatagagcatttaaacatacaaattcataggtccaccccataaagattttaattcagtaggcttatggaagaaacacggaatcgatagtttttaatgagatgtgatttttctaattaagcaacttcgtgaaagattggtccattaaatctaattatatttttaattttagttcttttcagatataaataattcaggcagtttcacaaggttttactcaatttgtaattttaagatattaatgagtgataggcttggacaggaagttgaaattttctctacagtgttaattgccagtacctatgatttaccttctggctttgttaatttacagttgaatgggacaaacctcactctttttccactgtaaagcaacctgtaagatgagagttgaggatatatcagataacattcaaaattacatcttcaaatagtcgttttgcgtggagacttgttgcaagtagaaaatcgcactggaatctgtcacataatgaaaatgtctaatatgcagaagttagatttaagaaaaatgtaatggtattgagaaactttcctaatttacattgtatctgtgttccttttgctagatggaaaagagtatgatatttatgtatcctatgcaaggaatgcggaagaagaagaatttgtattactgaccctccgtggagttttggagaatgaatttggatacaagctgtgcatctttgaccgagacagtctgcctgggggaagtaggtatttcagaggagtacaaatgatgctaccttgaaaggcagacagaatcattagttttgcattatgggagagagtcatggcacagcatctttggatatttaatgtccgatgctctttgatgtaacagactcctcta

SEQ ID NO: 31232 - DNA, 2300 bp, Homo sapien
attaatcttgatctgtggcataccagcagtatttataaatattaaagaaatgtctgtgttaaacactcaagtttcttaaagaattctcagacaccccagaattaaatatccatactgttggttctgctacatgatttgttttattttttaaaaagacacaaacaaaggaaccccaaatattaaaagcacacttaaatgtcagggaggacattgttgaatattagctttccactacaagcaacagtaaaaacaaaatgcccaagaatgtgaacccaaactacttatgccattttattcctatctccttactcatcatttcactttaatcaaaaatatttcagtatcaacaatataaccagagaaggacaagagtctaaactgtactagatgaagaaaagaaagtaaaagtagacctggttagtatgcccaaccatagttttttattgatagatagagctgactgtcaaatatggggggaaaaggcactttgaaaaaacatttataaaatatacagattaggacagttgaaacagataaggtctgggcacagttttgagattttcattaagatcttcaaagaagcaaggtccaaattgttttaaagtagaaagtgctaccacataaaattccaaataaatacagtccgttagattaaaacaggcaggcagacaggcagagaaactagtagcattacagactagaatttaattatagagccaaacagtacattatcaagtgctaaaacttagaaaataagataaaaactagaaaaacataatggaattacaatgttatgccgagtttgggggagatcaataagtatttgcataaattaatgacaaagactggacagtctttaatttatccagcaggaatacatatattaggcaagaatgtgaccccttactgcttaaaaaaatttacctttttaactgctatgtcatacagcatataaatatttgtctctcacagcttgcttgccttttctaaaaaactttaaatgtcttgttttcctgtatggcagcaatagctgtttaagaaaaataattgaacctattaaactttctgatttgatttgataagtttctttattacacagaaactacaagattattttctcagttatctatttgtattttcacagaatcattcagtgactcaaattttcctcttccggacttgtgctcatgggaagaggctcagctttcctctcagctctacagaaataagcaggtatgtgtaagtcagaacattgagactggtcatgttctatgtggtccattccccactgctaatatcttgcttcttttcccttttgaaattcatgctgactcagtttagaaccaaagtgactggtgtgtccaaagagagatcaaagttagatgatcaatgtcagagaaaagaaaaacaagcaagacactctagaaaggcctgcagtcaagctctcactttacacattttagccgtatgaccttgaatccttttccttgtcctcatttatggaattgtaaaccttgtactgcctatctcagagagcgtttgaaaagatcgaatgatataatgagtgtgacagtatttttaaaccataagcatagctaatacttggagaagacataatgattataaaatattttcctaagattgctttttacatgttgtgtcagttttgcccctgaaggataatttaatctagtggacatacagacagatcaatctgaggctgaaagaagccaacccacctctatttttatttatttatttatttaaacatgcaagggaggagtccagcaaaatcttcctaaacatcattttctatatttaatttaacctagtggacatacagacaggtccatttgaggctgaaaaaaggcgacccacctctattttttatttatttatttagaagtgcaaggaaggagtccagcaacatcttcctaaacatcattttctatatttaaacagttgcatgcagctcattttccttcatatctacctgattcgcttgtggttacaattttaaaagtctattataatctctccaaatgctttgcaatgaatgaacattcagagcacaaagctgaacaactaggcattagggggatgtagatttaatttaggcctctcaggatgagggctccctgtgcttgtgttcatacaacaaacaatcatcaagtttaaggcagttaaggagcagtggcattattataaggttacaaagtcaatatagtggagcagccttcaccactgtctgctttttgtagctgcaagataccctggtgcagaaggaagaagaactcgcc

SEQ ID NO: 31233 - DNA, 2300 bp, Homo sapien
agttattaaggaaatatttagtgatgcctcatattctttcacttacagattataaatagtaaatgagaaggggtatgcatgaatcgattcaatcctctcaaagcttttttgagatgggaattacttctcatttcacaaaaagtagaaatgaagcttaagtagggtaaaatgatacttattcaaggttacactgatactaaagcaaaaacatgactcaaatccaatcttacagattccattctagcacccatttgctctttacccccagcaggttttccaaatgacttttttttaagaaaatagagtttcttgagacttgtcattcataaaggatgaagttggaaggctttcccattgccatgtactaagtggcaaagcttgtgttcatgcctactttgttctagctcatactccacgatcttccctgagtagagcaatgccccattttacctacagttttgtaacttccagtagtcaaactagcagcaggtcagcctgatgtaggccatagatgagcttcagttggctggatagtggctttttaatctaaaacgtcaaacacatctttgtgctcactacccagaattaacatgtgtaagatttttacatatttgctttaaaatacatatagattaaaaactgattcccttatgttttttctataagtttactcacttcttcatctctgcagaggtaatcataatcatgaatcaagttctattggtttatattttatatgtatatattccaaaatatatgatattgctttgggcatttacaatttcagtaaatggtataatgtcatgtattgttctatactttccgtttctccacaaaactgtttttttgaaatccatgcatacagacaaacatacatttaagttatttgttttaacagtaaatatgtatttaagtcatttactttaaatcagtagtctgaaaaaatctcaattaataaatctattttctcttgaatggggcactaggttgattccaatttttggctactatataccatgaggctatgaactttcagatacatgttgcatataaacattgacagtttctcagtagtatacacatacctagaagtgaaataaatgtgtcctaggtaagagataagcattttcaacttttttgtaaagcatccaattttctccaaatgattagattcattttcaactccaccagaattttttttcctaaaaccattctaacattgcaaggtggaccaactttttgccaatctaatgtgtgtaaaatggcattttacttctatttttatttgaattaaagaaagtgtatgtattgtggaaggttttgtcccttcagttctcctcttttctatgaaatgtgtgttcataactttggcccatttttatttaatttgtgtctatctttaaagttatatttaaagggttcatttacattttccaaatgctgatctttcttttatgtatatattgtacatatcatgtatatattcaatatatcttccattaagtaatttgtctttttttattgtatttaatatgtaattttttaattttgatataaaaacatagttttttaaaaacaattttgaatcttgcttatgaaatcctgacatgacacaaggacataaagaaattctcctaatggatggtgggtgttttgaaattttgaatttaaatatttttagacactacagtctccctggttcaccacagaccaatcaggacttacgctctaatgccttaccactgttacaaatttctcctcagttacatatataatgttgtaatctctaggtctgacagtaaaaaaatagttacattacctgcatttctcatattgtgggtcagtttgaattaaattattattatagctgtacaaccctaatccagggtctccatggaaaagaaaccttgacagaattcgttctgggagatggacagcttctattaagtattatttacgttttgtagagatgcactcaaatatactgaagccgaataatttggcttaccatttgcctctaacagtccttttaggaacttctgttttttgtctttacattccaaacgaatcaatgctaactatgacatatgtaacccttagatgctggactggagattggcaagtgcacatttcatcctggctgtgacactgacactgtggagctcaggaaaagtcctctcagtagatgtaacaacaacagaggtaatggaaactagcttacagaaataaatatacatgtttgacatgctttataaatgacatgtttgtatataaaagaatatatattaaaatatatttca

SEQ ID NO: 31234 - DNA, 2300 bp, Homo sapien
agactccttcttaaaaaaaggaaaagaaaagaaaagaataatcagtattcaaccttatcaaaagacagttaaattattttgccactttcaggaaaacttcttacccatgagaattggagttcctctttcagtttacatcaacactttttaaaaaatagaataatcttatttatacttaatttttaaaattaaggcaataaaagctgcatatgtctttaatacagtgcatatctaaatttccaatttcattggaaacctattttcaggtttttattttgaattattgattagatttattattttatatctcatttttaagtatatgacttgtaattatacaatctttcatcatatttatatattctctctacatcacatgacattaatttcctattttccatcttgatataatgttttaaaaatagagcttagaaagctaatttaaataacttattaaataaataaggacagatatcatcaaggtatatttgaatgacagaggttttgaaatgctatggaagaataagcttttaggatctaggttcatcattgttcatggttgaattcttaagaaagtaagacacaaagagttgcaattattctttcagctcatatagctttataactggatgtaaagtttaagggggttatatttttgcctttcaattactagaaattttggttattatttagtcacacatcaaacatgttttcactcatttttcccgcaaaccactatggtacttgcacatagggacagaaatgactatgactgtaactgctctcaaagtatttacaatttgatagtggaggcagactcgcaaatacataactaatgaaagaagaaatgaattttgaactgtagtagatatacaaacaaaatgttgtggcagtccaaaggagaaaaaaaaggttatgactcaaagtagaaaaaagatccaaaaggctaaacagttctggtggcatttgatcagtagcttcaggaatcagtaggtaaaatggcaggttgtagaataaaggattctaggcaaccatgtcagcaactctctgaagtgcagaaagtgcaggatatattcatgaattagtagtctaatgtggctggtacacaaaaatatatagtgaaaaatgaaactgtaaaggaaaaacaagcctaaatatcaaactaagtaatttagattttattcaggaactttattaaagcaacgggttagtaaaaagattagtcattctccttagttaataccatcatgtgctgcagtgtatgcactggaacagagtcaattttagagtggatacatccaaagtcttttgggacaagtaaatgccaagatcggaggtcattatactataacatcactggagccataaaattgaaattggagatatactgaaagactttgacttaaaaagaaaaccagcacaattaaagcaagtattaaagagagtaactgatgggacatttgccagctttgaattaattaaattcagccttaatttttaaaagagctgcttgaaacaaaatgaagccatccttttctaatatagtgagacagtaatgtgatcccattatgattcatttcaaatttgagcttttctctagtttattcagttggttaagaacaaagtgatagttgcaaataacatcactatcaggaagactaccacctagctcaaaagtagtcaaatgaaagacattgttcccattttcacctgccctctatgctctcagctttagtattaataagatttgaggttaattaatcctggaatctggaaattaaaccataaattgtgaaaatccaacagttttttatttcaagatgttgcttcatgcttgtgcatctatttgaatgtgtgggcatgcataggaatgcttgcttttagtgaagtgggcgggtatgagatgtattgattgggttcttcctgccattgactccataacaaatctgtcacttctccaagtagtgaatcatgttaactacttgattgcattgcattttatagatttattttctttctttctttttccttcatctagatcattcgtaactgaggcacacttgccttttgcaactaagctctactgaattccaaagctatagaaatatccatcttgacctggaaagtctgtttctttgctagtccagaaggttttttttaacatgaacaagatcctctcaagcactgtttgctttggactcctaactttgttatccgtgttgagttttttacaatctgtgcatggacgaccatatcttacccaaggtacgtgcatatcaattaaaaatcctacaggtggg

SEQ ID NO: 31235 - DNA, 2300 bp, Homo sapien
gctattatatatgtttccatttcttctctaggccagaaatgtggatatttttatgcatatcttactgtaagcacatcatattttaagcatatcttacttttggcatatcttactgtaacagtcacagtctaggtaggaaacaggaggtgcactgtaagtgattttactgaaaagaatgtaatgaagagacaatttcagaggtattaactgggttaagagaactaggggaggccgggcgtggtggctcgtgcctgtaatcccagcactttgggaggccgaggtgggcggatcacttgaggccaggagttccagaccagcctggccaacatgccaaaaccctgcctctactaaaaatacaaaagattagccaggcgttgtggtgcacacctgtaatcccagctactcgggaggctgaggcacgagaatcactggaacctgggaggcagaagttgcagtgagccaaaaggaactaggggaagccatcacactctaggcctgaagggacactggaaacaaattgttttattagagacccatgagagctgaggccatggaaaagaggcctctacacaggccctgtagtcatagagggacaggactgtggccaaaattttgggttaaaggaaagaagaatactctgatatttctctcctcccttcttttgattttctgccagtgcttcccattggtcaatcacaacaggaagccacaggtcaaaggggcctagtgatttatctgtaggcatccaaaggcacggcttggtagagaagtagaaacgatagatttggggagggaaacagaaaatactgctgttataaatattctctagaccacaggaagttaaaaaaaattactagattacaggacaattaaaaaattcccataaatctacctttctaataccacttccttcttattcccacatttaacctgctgagtgttatctctgcctagcactggggtgggtaaacttttcctgtaaagcatattttagactttgaggcttaagaggcaaggtcgaaaatattatgtcctatttatgtagtgatttgaaatgtaattatttgaacatataaaaaacagtcattcaaattcagtggcgtagatttggcctgtgggctatactttgctaccctctggccttgaaagtcttctaaatttttgctagcctaaaatccacctacttttcaatgtcaagttcaaataaaacctcccctacgtggcctctcatactgggactctgagctgtgagtgacagaaaatcaactattactagcttaagcaaaactgaggataagttgagagtttgcgggttgtagatcccagaatccaggagttgctgaaatgccagctgctctggggatatcctgctttgctactgtggtaacatcagaacatgccctcttcatctccctttctcttctctttgcttctgtcttcagtttggcctcatcatctcctagaggcagatcttttccacaagaaacagaatatgtaactctttatgtacccaggaaagtattctgtttgacctgtcttggtcacccagccacccttcgatgaacccatgtcggtggaggaagggggaagagtgatggggtagtctcgaggttcagacatggcacacgtttgggagagaagctcacctctgaggagtggggaaagaggcagtttcccaaaaggaggatgcattctgttgccaggagatgaaacaggagaggttgtctattttagagagatagaaatgtcacaattacaatccaatgtgtgcagcgctataacagagataagtctgacgcctcgttatcacccacagtacctaacatcacacttggtagacacattcatgcgattttgatgaatgaatgactcagttctcccagctgattgtgtacacactctactccaaactggcccagaattttatcagctgctcttcattctgtacgttgtatttggggtttttatggccatctaccatctctcctctaattccgggtgcaaaaagagtgtatgagagagaggcaagcatgcagtaaacatcctgtgttaatctcaatcccagaaccagaccacagaatgctgactacaccgctcacgggaaagactatgttttaggtgacccgtgtggcctttttgttgaggcctttaggatacaaggcccccacctaaagacgcgaccctcccgtaggaggggggcagggcccgggggcgggagcacagcggggccccagcctcaggcggcgcgtcactgagcacaaaggagacaacagcgaggcggcagcgggcgctgatcttcg

SEQ ID NO: 31236 - DNA, 2300 bp, Homo sapien
acactggaaacaaattgttttattagagacccatgagagctgaggccatggaaaagaggcctctacacaggccctgtagtcatagagggacaggactgtggccaaaattttgggttaaaggaaagaagaatactctgatatttctctcctcccttcttttgattttctgccagtgcttcccattggtcaatcacaacaggaagccacaggtcaaaggggcctagtgatttatctgtaggcatccaaaggcacggcttggtagagaagtagaaacgatagatttggggagggaaacagaaaatactgctgttataaatattctctagaccacaggaagttaaaaaaaattactagattacaggacaattaaaaaattcccataaatctacctttctaataccacttccttcttattcccacatttaacctgctgagtgttatctctgcctagcactggggtgggtaaacttttcctgtaaagcatattttagactttgaggcttaagaggcaaggtcgaaaatattatgtcctatttatgtagtgatttgaaatgtaattatttgaacatataaaaaacagtcattcaaattcagtggcgtagatttggcctgtgggctatactttgctaccctctggccttgaaagtcttctaaatttttgctagcctaaaatccacctacttttcaatgtcaagttcaaataaaacctcccctacgtggcctctcatactgggactctgagctgtgagtgacagaaaatcaactattactagcttaagcaaaactgaggataagttgagagtttgcgggttgtagatcccagaatccaggagttgctgaaatgccagctgctctggggatatcctgctttgctactgtggtaacatcagaacatgccctcttcatctccctttctcttctctttgcttctgtcttcagtttggcctcatcatctcctagaggcagatcttttccacaagaaacagaatatgtaactctttatgtacccaggaaagtattctgtttgacctgtcttggtcacccagccacccttcgatgaacccatgtcggtggaggaagggggaagagtgatggggtagtctcgaggttcagacatggcacacgtttgggagagaagctcacctctgaggagtggggaaagaggcagtttcccaaaaggaggatgcattctgttgccaggagatgaaacaggagaggttgtctattttagagagatagaaatgtcacaattacaatccaatgtgtgcagcgctataacagagataagtctgacgcctcgttatcacccacagtacctaacatcacacttggtagacacattcatgcgattttgatgaatgaatgactcagttctcccagctgattgtgtacacactctactccaaactggcccagaattttatcagctgctcttcattctgtacgttgtatttggggtttttatggccatctaccatctctcctctaattccgggtgcaaaaagagtgtatgagagagaggcaagcatgcagtaaacatcctgtgttaatctcaatcccagaaccagaccacagaatgctgactacaccgctcacgggaaagactatgttttaggtgacccgtgtggcctttttgttgaggcctttaggatacaaggcccccacctaaagacgcgaccctcccgtaggaggggggcagggcccgggggcgggagcacagcggggccccagcctcaggcggcgcgtcactgagcacaaaggagacaacagcgaggcggcagcgggcgctgatcttcgctcgccagccactcgcaattgcggttacagacctgcagctccccctcccccagccggcccgcccgcctttctgtctcctctctccctccgtactggacggccccggtccatttccgggctccggatatttggtatcgattggggccggggacgcggagcaggtggccgcggcggggcagctgggccgccagcttggtgcctcggggaccgtctcccgctgctttggtcaccagcccctgcccgcccgacccgctccgttctccggcctgcgagccctgccggccggactttgcgccgcgtccggcgctgctgctgcgctcggggccccgctcggcgccggcggtgaccgggaagcccgcgttaaaggggcaaccgggaccctggcccggtatggctgaagtcagcatcgaccagtccaagctgcctggagtcaaggaaggtaagggccccggagggagagcgcgcgggaccctcccctctcccagcccgaggttctctcaggt

SEQ ID NO: 31237 - DNA, 2300 bp, Homo sapien
ttgaaacatgcctgttcctttccctaacattcgcaaattgcattttgcatttcagttatagacctactgaagtttaaaatggctggaaattatttcaaatctagaacctcaaatgtttcagaagaaatagagtattattcctgaatattggcaacagcgttttccattacaaaaagtatacagatgttccaaacacacttttaaccagaaaaaatgatgtgttgacacttagttgacttgattcttttcacctacatatgaactcaatcatttccctttgtctcccagtttaagagatttaccaaggtataaatactaccataggtgtatgtgtgtgtgttttttcaaaaggtctgtccaaatgatgaatatttttgacttccttaaaaactaagtaagcaagcattagatttcaacctaggaaagaagatttttaaatatccccttaccctaatgtcagctgctacccacgacctctattgaaatgttcacgacaaaaggtcacagggtgccccatcccctcctaaacagcaatggaaacgggcacacactcactgcactattcttcttaatctctattggaatctaccccatgataccaaattgaatataaattgtaactgcatatatatctatcaaaagtttaaattaaaaagtagaggagacagatacagggatttttttgaatggggttcaaaaatctgcatcagaatattaaactaattactactactaacccttctcaaatgaagttggagtttcaatattaccacagtctcaatgtttgcacatgttttaccctatcaggggcacaagcttcattctctttaattaggataaagacactgttagggagtaactgggccataattaagagttatattagggaaggatacactttattagacttgaatacttctcagatcaaaaacttcaccaccattagtaggacattcctagtataatacatcacttcctttgatgatcttggaactagaaaagtcagatgtttacaaagacagtgatctcatcgattcctgaccaccttcaaaattaatatttaattgtaacttaatgaaagagccacactgaattttcttaccaatttaccagattacataaaagagattgccaaacaccgtattacgcaaaatgaaagctaatttaaatgtattagactctagagtgtggaaatggaaaaatcttgcatttttatatggaaggtgtttgtggaactccttgagaaataatatgttagaatacatcattcatgtcttggtacgaaatcagaagacctaagggtaatataaatgtatatgaagagttttatgttttttcactcacatgaataggggattggataaaatcatagcaccatatgattaatactatacataccaggttttgtttgaactccaattctcattctactcaccatgcactacacactgcacaaggatcactctttctctagagacaaacccaacacatacccacacaaaaaaccctcatatccaaaagtaaaggataaccagacaatctctaagataagaactctcaaaagtatggatccgcctttcctatcgctcagcctccttagtcttgacagcagagtgaaaactgttttctacaggtgaaagccctaagtcttcatcaaagccataccagggacggaaaggtagaaaagtattaacgctaaaatctcacgcctaagctttaacacccttccggaacagtaagacagaactaggcccatcagaaattctacataaaatcagtgaccactagtcactagtctcctagtgcttgaaactctgagaaagcaatcaagcagtccctcattttcctgagatttttgggctggcctgagcacacacaagaccaacggagtcaaattaagttggcaataaaacaagcggttccaagaaagcaaaaactattttcaattccacatctccaagacgcctcaggctacagtattcaatcgatacaaatgacattcacaacagaagccgattttgcaaagcccttggaacttaggggtctgcgtcagcactctggaacgtctatgcttcctaggaccaaagaataaacaaagataactcaaggcataaggcgatccagcacctaagatctcagcaaaaaaaagctaggtcctgaggcagctagtggaaaaacaagagaagggaagtcaaaaggctacttgctgtcagctaaagccaggtcagtactaatctctactttcctggacattggtacaaaaagcaatgacaaggccatcagtcccctgttcccctcgc

SEQ ID NO: 31238 - DNA, 2300 bp, Homo sapien
gcatgctaatgcattatagttagcatataatgagcagtgaggacaaccagagttcagatttgtcaccctcttggttttggccaggttctttaccaaagcctgttttatcagcaaggtcttcatgacctgtgtgttgtgccaaccccttatctcatccagtgacctagaatgcctaacctcctgggaatggagtccagtaggtctcaggcttattttatccagcccctattaaagatggagtctctctggttcaaacgcctctgacagaggaacgtatttgctcttgcaaggatctgcgttcacttatgtacatttttatgagagctgtaaaatgaaatggtgaaaaggtagtttctcatattaacttcctcatctgcaaaatggaggcagtctaaatagaaagtgtcagagttgtcaggatcataaaagattaaatatgtgaaagaattttgcacagtgcagtagactttgcaaatatattatatctcattaattgatgctgtttatttgttatgatttttgaagacttaggtgatattgttattcatttccaagtcaataataatgtccccaaatatctttaaataacattttctgctgtcatttaaaaataccatcgcaaaaatgacactctagactacttcaatcagaatctctggatgggggttgtcaagcatttgcatttttaagaagctcccccacccccacattctgactcacatccaatactgagaaaaagacaaaaggcattattttaaaagtaaggttagttggacattataaacatcttcatcaacacatcccacctcaacttccatcagttggtggcattttcactgttcccgatttaacgaagtagctcatatttttctttctcaaactacatgtatcaccttttggggagtaccttactgtctttgacatacatttgatgcataatactaaactaacacattgattctgtatatatgtcacaatcaagaataaagtactattagaaatgtatagaaataaagttattttacttgggcagggagaaaaagctgtttgagtttcaaaggtttttccttaattgtgtttccttttttcttcccctccccaggttttcattacaaacattaaaaacctaggaatctgccttgaaaatggactcactatagcaaatattactgggtgatacagaatgaattctacacttactttttttctcctgtgtttgcattcctgggatttatcctcaagtgcatttctgaccataagtaattttaattcatttcaaatgttttggttattcatgatcacttgggcagtataagaaaatgtagcttctgaatattggccacctctatgctgcatatacttcttgggatatagtatctaagacctttgtaaactgccattttgttaggtatggagtttggtatctagggagtaggccttatttagcaattcaaattttatggagatgaatgatcaaagtgaaacaatgtttggatgcaacgcagaataaaagaatataagaaatagctttttgttgcattaatgtatgatattttgaaggacagagcctttgctttttgtattctttaagaaaagcacaaccataaagtattttaaaaaaagaaacacttggagcaattgaaatatgttattctgactagatggactgtagaggttttgcatttctcagccctcctggggagattggcctagatagcattctttaacacttcctctgcttttgcctcagtagcaaggctttcctaagctcctgggcaatggaacatttattagtatttattgacaaaaatttagttctctgaaattttaactcatatatatgaaaaactttgtattccatctcttctttttcatttacttgtagagccaaggaaatggaattgaaagatgattgcataagtaatgatgccatccttctctctggctgtagactgaggcttttctcttgcttcaagtcagagcagtatttgttgataacctctcaataatgtttggtttacatgccagtaattaaattaattcaacatgaagttgaatttgatgaagtggtcatctatccaagtatttggtttttgttttgttttgttttgttttttgagttggagtctcgccctgtcacacaggctggagtgcagtggtgcaatcttggctcactgcaacctccgccacctgggctggagcaattcccctgcctcagcctcccaagtagctggaattacaggcatgtgtcaccacacccggctaatttttgtatttttagtaaagagcgggtttcacca

SEQ ID NO: 31239 - DNA, 2300 bp, Homo sapien
agaggagaaaaggggagagacagaagacacagagaggagggagaggggtggcgggagggagggaggaaagaagggagtctggaagcggagggctccaggaaagggaacctgactagagcgcgctgtgcttcccagcgctccaggggcccggcccccagctcggccccacctgggcgctctttcgctcttccgtgggtcggcgggccgtgcgggaggaactctggctgccgcgggctctgcgtcccacctgccatctcggtggctctcgcccgggccccgagtttcctgcggagctagcactccagctgagccagccggaggggcggcggcggctccgcgcgcccagagcctcagcccatgaatgggactccaccctgagcgccccctcccgggcctggggaggcggcggcgcggcggcggggggcgccccgcaagcccgcggctctgagcggccacccgcgcagcaagttgggcgagttggcagccgcctgcacctgcctcctggccccggcccctgattccgcctccggccccaagcgcccgggttgcgccctcggctgcctcgcgaggtagccccaggaggcctaggggccccgcctgcgcccctggcgccagaccatggtgggcagctccggccaggagcctcagccgccgcgagccaacatcgcctgcagccagcccccgccccacccgagcggacgcgcgggtattcgcagcgcgcgggtcacttccttcctcggccgggatgggcggcgcgggactgagtgatcggccttgcgtccggcgggtaatccccatctgatctgctgcctgtgagctgctgactgccggggcgcgcgagcctagggggcacgggcagcagcgcggcgatgacctgatcccgagcccgccagggcgccccttccttccctcccttccctcgctccctctgagcctgtgcggagaccagctcggtgcggcggccccgggtggaccatggcggggagctccagttaaaggcgtgtgggcgccgagctggagaggacaccttcggcatcgctgccttttgagggggcttatttaaactactgagtcattccagatttaggattccctaaataatcaccaactgtgcccgtctcgtgccggaaagcaagcggaaagagaaagagcgcccactcttgggaccccgcagatcgcctctcgctggtttctccccgaggggtgcttggccctcgaggatctccctccctccctcgcgccctcccccctccctcgcctcccgctctctttgcagtgctgctggccgggagttgctctcaccgcagctggaaacagctgcccccgccccgcgcccctacccagactccgggtaaccgctcccacttcgcgcctctcggaattccagaactcgggtggccggcccctggaaagccgcagccggcgcgatgcattctgtagacctcaccctgctgggacggacctcctaatcttcagaaccgcgggccgcagggagttaaattgctgccttcctctccttctctcgtgcggttggtggcttgttttctaaaggaacgttttattcactttttagtattttctaccgggggcgcgctacccgcctgggtccagactctgctttgtaaacgggttttctatgtatgtatgtgtaggtatactttggacaccttacaacgcttgcgcctctccaacagaggcacgtcttgttattttgggcatcgttcttccccttccacttggtaccccgaacgcagtgtgactaaactccccactgccccttggacgccgatcgccttggggtgcaagtttggggtgcaaacgtctacttcgcaagagggcctgggaccgccccgccccgccccccggccgccagaggttggggaagtttacatctggattttcacacattttgtcgccactgcccagactttgactaaccttgtgagcgccgggttttcgatactgcagcctcctcaaattttagcactgcctccccgcgactgccctttccctggccgcccaggtcctgccctcgccccggcggagcgcaagccggagggcgcagtagaggctggggcctgaggccctcgctgagcagctatggctgcggcgatagccagctccttgatccggcagaagcggcaggcgagggagtccaacagcgaccgagtgtcggcctccaagcgccgctccagccccagcaaagacgggcgctccctgtgcgagaggcacgtcctcggggtgttcagcaaagtgcgcttctgcagcggccgcaagaggccggtgaggcggagaccagg

SEQ ID NO: 31240 - DNA, 2300 bp, Homo sapien
aagctcctgggttccctctgggtcccacatccattttcagtagcttcagggcctgcattttccttgccttctattaggatgttgccaacatacacctgtctgtgcttggaaatcatacatttaatcctttcgcactatcctagatgcttcgtgaagtgtctgaaggagagagattagggatatatgaagagaaattgtaagtagaaaccaatagccgctcccagactttagcataaatggagggtgattaatgcttcatgctgcattttaacttggagaactcctctgcccagtgtctccaacatcagatgtcgtcacattcacgtctggagacctgattgcattccacagcttgttgttgactgtccttgtccacatcactccctcgccgcacctggagtcatcctctgtgcaggctgcttatttgggctctctttttagggactgagcctgctttgcagctttccagacagaaccaagaaatctgggttccaagaagaagggaaacactttttcctgttccaaaatgagccataggtggggcccacgataaggtccaagaggtcatttttactttctccagtgttcactttcttcctaactaaacagagaattctacgtgctcaagcttattggagagagtgtggactgcattttctcagctcccccatcccacctcttctttgcgcacctagggtcctttaactcccactgtggttgtgtttctcttgtgggagggaccggacggagcagacccaagctgcagttccctcgctctgcctctgagaatttctcatccaaacctcaatcacgtaggattgcgtagagaggagaaaaggggagagacagaagacacagagaggagggagaggggtggcgggagggagggaggaaagaagggagtctggaagcggagggctccaggaaagggaacctgactagagcgcgctgtgcttcccagcgctccaggggcccggcccccagctcggccccacctgggcgctctttcgctcttccgtgggtcggcgggccgtgcgggaggaactctggctgccgcgggctctgcgtcccacctgccatctcggtggctctcgcccgggccccgagtttcctgcggagctagcactccagctgagccagccggaggggcggcggcggctccgcgcgcccagagcctcagcccatgaatgggactccaccctgagcgccccctcccgggcctggggaggcggcggcgcggcggcggggggcgccccgcaagcccgcggctctgagcggccacccgcgcagcaagttgggcgagttggcagccgcctgcacctgcctcctggccccggcccctgattccgcctccggccccaagcgcccgggttgcgccctcggctgcctcgcgaggtagccccaggaggcctaggggccccgcctgcgcccctggcgccagaccatggtgggcagctccggccaggagcctcagccgccgcgagccaacatcgcctgcagccagcccccgccccacccgagcggacgcgcgggtattcgcagcgcgcgggtcacttccttcctcggccgggatgggcggcgcgggactgagtgatcggccttgcgtccggcgggtaatccccatctgatctgctgcctgtgagctgctgactgccggggcgcgcgagcctagggggcacgggcagcagcgcggcgatgacctgatcccgagcccgccagggcgccccttccttccctcccttccctcgctccctctgagcctgtgcggagaccagctcggtgcggcggccccgggtggaccatggcggggagctccagttaaaggcgtgtgggcgccgagctggagaggacaccttcggcatcgctgccttttgagggggcttatttaaactactgagtcattccagatttaggattccctaaataatcaccaactgtgcccgtctcgtgccggaaagcaagcggaaagagaaagagcgcccactcttgggaccccgcagatcgcctctcgctggtttctccccgaggggtgcttggccctcgaggatctccctccctccctcgcgccctcccccctccctcgcctcccgctctctttgcagtgctgctggccgggagttgctctcaccgcagctggaaacagctgcccccgccccgcgcccctacccagactccgggtaaccgctcccacttcgcgcctctcggaattccagaactcgggtggccggcccctggaaagccgcagccggcgcgatgcattctgtagacctcaccctgctgggacggacctcctaatcttc

SEQ ID NO: 31241 - DNA, 2300 bp, Homo sapien
aaggttgttttcccagtcaaggcttatcaattgcattccagatgtgctgacccctgcaatttccccatacgtgggaaactagactgcataatttgtggtagtgggggtctgtgatcccactttcccctggtttaaaaacaatcttgaggtttgtttaggataatagcaattgttgtctaggagttaagcttggagaagaatggaaagatcttgaatgtcagaacacaaattttgcattaaatttgatttgctttctatttaataaagcagctgggttcttaaaattatgaataaaaataatgataatttatgaactagaaggttctccctgttcttattcactgtagataatgggaaggcagttatatgaaaaatcattctggactatagatggcttgcctctgcctttgaggtatgacacttaggttctgagcccagatctggttcaccatgtgactcttttcaagtgccactcctcccctgcctttagtttctccgtctgtaaaagaataaatatgaagagtacatagagatgcattctaaagatatctcctattctaaaacctttgagaaggaaagaacatgtaacggggtgcagtattaagagcagaaattatttatctcaatgaaatagactattgttcttaaggagcaacactactcccaccctaagcttacttcctaagcctattcaacattgaaaagaaatcctgaattttatgattcttccaaacacgtactttggcatacagttggagaacctaaaaattagtaggccctaggttgtggcctctgcaatccgatactcctaaatgctgaatggatccaggcgttgctgacccacagcagttcattagtgggagtcctccactaataatgtccatgtctggctgaaccatccgtggttaatatttgtaatcatggccctcaggcattggaaaaatcaaaggatgccctctgaatcaccagaaaaagattaaattagatacaactccaggtttcttgttgggagtacattttattatatttcaatgttttgaaaattgggactagaagcctactgtggaaggatctttcatgaagtagagtatgtgactaatctgcacatctccttccttaaccatttcagataacagagttttctggacttctggagaataagattattattctcaaggagagatgatcacctcaggaaaatctggactattgaaaaaaaaaggtagtaaatacaacacaatttttcctgttaaacattttgcatataaacgaaatacagtgtgggctttagaaatattttgatatgaaagtagcacttcaagagatttgtggttttgcatcttcctctagagctctgtacaagaaaaatactctatccctgcaacttcacaaaaatgattaggtattgcttttggaagtacttattatcaataagacgcctccccacctttggggacttcttgcaggttgttggaaaaaagctaaaaagagcacctcaaaatatcctcagtggcttttttgaagaactttagaagccttggagcctgctcatggaacagttttgaggtggaggcaggcaggaaaacactgagtttgagtaacaaagaagcgagagaatattaacctttgacagctccataactactctcaccccactctcgaaaaacaaaacaaaacacatacaggaatataacaagcaatgtgaagtcagtggggagaggagagggaagcagacagctggaaagttactgcagcaagtagaaagagaaacccaaattgtgaacattaaaaacgattcgtaaatctctcctccctgccttctgaataaaaccataccctgcctggagacactagcctcctctaagacttcagtaattcgtcctgatgcacgcagtactagtccaatccattttctagtttgcagaggaaaatccggtccggcgtttatttttagcagcgcttccctgtgaccgaatgctacagctcctcagctgggataactgaggaccgtattggggagggaggcgaagggggcgggggagcgggaggcggtgaaaaggggaggggggacgccctgcgcatgcgtgccagcgcccatgcaaatctgctgtgcatccagagagcaaagtgggatgatctgtcactacacctgcagcaccacgctcggaggacagctcctgcctgcagcttccagacccaggtaaaaaaaaaaaaaaaaaaatctgagcgggcactgtgcatgcatttcagtatcagatgcgcgtcgcaacgtatcccctgtagaggcaatctgctgctgc

SEQ ID NO: 31242 - DNA, 2300 bp, Homo sapien
tagtagagatgggatttcatcgtgttacccaggctggtctcgaactcctgagctcaggcaatctgcccgcctcggcctccaaagtactgggattagaggcgtgaaccaccacgccctgcctaaaaaccagagtttttaagtcacttcctcatcagtccaccagcatttatctaggcatggatcctctctctttcatactgagtgggtgaggaagtgtgtttcaaagagaaggaaacgaaaagtaagagaaattaactggttatgccacaattcttcactcattacttgattcaataaacatagaggacccttcggtaggaccatatgctgcaggaaatacaaagatgaataagatgtagccctcatccccaagaatcttttagtctaaaacttgcattaacaatgatgaagtggtcaggtgtggtggctcacgcctgtaatccctttgagagatctagatgcaaggactgtttaatcccaggaggttgaggttgctgtgagccacgattgtgccactgcactctggcctgggctacagaggaagaccctgtttcagaaacaaacaaacacacacacacacaacccaaaacaaaaagcaatgatgaagcaaggtcaaaattcattagcatcatatgaaagcttctgagagtaggttctgaggaaggaaaagttgccaccagcttgaggggagggtctccggaaagctgtaagaaaaaggcagacgcggattggttttggtgtaaacggagtaaagaagagaggaattccagggggaggtcagtggtcaggtctgtgttttctaaagatcactctggcaacaagttgttactagattgaggaacagtgaaagaattaataacaataatagtagaagctgataatagctaagtacttattatgtcagtccttgaactaagtgcttgacctgttttatctcacgtaatccttaaaacaacctgtgagacaggaattattattcccattttataggggaaggcatggaagagtccgtacttccttccatgtctaacaaaacaatttgtattcttggccatgagaactcgggtaagaaagtgaaacagacctgatctaaatcagggactgtgggatagagaagagagattttggagaattagggaggaagataacctatgtttctcacagccaatgggcctcctaagtgtttgaatgatacaccccataaacactaaaaccacctctgagactctattctgcctaaaggactatgacttagattgaacctgccttgtcatgtaagcctaactccatggtaggagccatgtcttttggttatcactgtcacattctgtcactccatctggcaaatggtgcgtactcaaattttatctgttgaatgagaaaattttcatcttgtcatccaacatttcttggaacctggggcaatacattgtttcccctctcccacacccacacttcagtttccctatctttatattagagtaggttgaatctcattaactcattatatgttaagataaataagctgttattcaggtcattaattaccttgggcaaaggtagggatatctaggggttagtgggagtgccaatactgggttagatgtggaccctctttttttatacgctcaatcctatcatcttggcaatccaagaggaaaagggtagaagacaggtttcatattccttaaggcagtttcctttactatttaaaggtattggagttcttgggatagagaggtaaacgcgcacagagatgtcctcccccaggacaccgcccttaaaatcaaacggaggaagactttcttctccttgaatgcgcttggcaaaccctgcccagaaaggggatggggggacggccgtggaggtggagaaagaatgcatccacacctcgcgcgtcttcccaagtacggattggcaagtggtatatgcgtgcagacctctgtcatttatttattttcctttccactgggtgcgctgtccctttaaatggagacgctggtgctggctccgtaacaccggagccggcagcttgttgatttcagagctggtgaatttcacattgtttccacttcactttcctcgcccgggggaggctccagttggctctacgaccgccgttgccgctgccagagagggccagggcagggcagggacgcgcagcatcggggcgggcgtggggccggagaaaagggtgtcggggccacacacgcaccctcgctgcagtccagctcctcccgaagctcgcacgcccagagcgcacggagcgggggactgcccgcccagacgcccgcccgcca

SEQ ID NO: 31243 - DNA, 2300 bp, Homo sapien
gagacaacagaatcaaagcgctttgctaattgtaaaatatgcacaaaacatatagggttgtttgaggcctctgtctaatatcacacaatgccaattggtttgagtttccatgtgttaaaaagccaattgtaatttttgttaccttatagggctttttctggaatgtgaactttattcactcaacaacaaacaggactaagtcatctccattatgcttttttcaatatgtttcaactcttactataaaattaggcagcaacagagaatgccagccacacagggcttcacttataatggccaaaataataggaactgtttatttaagtgtaatttaacatctgctccaatcatagccccagattacaactctagattaagacaaactttgcctattactgcccaaggctaagtcctcattctttcttaatggaaattttaattttccactgctcatccgtagagtaccaccgattgatcaactctctctccaatccatagaaatgaagagagaactcagggctctcctgaactacaacgctttctacatttctcctataaattccacgcaggcattgaattgaatttgttcttaaccaaatgcgttttatctatacctggcaggaatctagaagtgaaattacaagatttatttcattttaattctattatgaagcatttaatcacaaataccctgaaaatgaaaagataatttatcattttaccttgactgagcaactctcctcacttcacattcatgaatccataacgcagagaggagactggatgattaagtgtttgattagagaaaacagattaacctagcaaacataataaatttggctcataagcaggatggctttataaatgctcacaatacctctcctgtataaaatcatgaaccacttcctacagtgatgactccatcgaaatagttgagaaacataaagcaaatgcatgtttatggctttctctttgagacattaaaagggtattgaaaggcatatctgattcagcttataactctggatatatattaaggaacatgtaagaaaatattaatgcataaaaaaagctacaacttctcaagtgttctagtttccactttgtcaataattacgttttcaatgtccttctgtggactgtttccaaaggtgccaatccagacccaaagtttcagatcactcagattcacccttaaccttcataacacaacccaatagctttacgaaaaaagttgcatatttaggtagttgttatcccattatgacaaaatacataaaattagcgagatattttttagccttcaaataagtgggaaaaaatccttttagctgagattccatttacatcagaataaaaatctaagttatgactaggttgaagcaacgtcctgtgcagcgctccataaagttcacttagtcttcaagggttccttacttagctaggttagtattcctggcctctttttttagcagtgagaaaaaggatactctccctgccccagctttatttttaaactcacagccatatcctggaggtctctgctggctatttggcgcgtgggggcggaggggggccgggggaggggggcggggcggggtctggaggtctgtgctggctatctggcgtgtgtgtgtgtgtgtgtgtgtgtgtgtgtggttggaggtctctgctggctatctggcgtgtgtgtgtgtgtggtgtggtgtgtgtaagcagtgaggttgttttagggccagtccttcctccgccactttgctgactcaaagacccagaggctttcttggggtgcaggtaccatgattccttgggccctaagggaatttttgttaggctagaagagtgggtgtactcatgatgggtgtacccgaacattcctgggctcaacaaaaccgattatctttataaccgcggcgcctagcacagcgcctggtgccctaaacgttggctgcgggaacgtccgagacgcgggtgcggagccgggggcggaataactggttgcgcggcgctttgaccgtaggcgctggagcgcgtgcgttgcgtgcgcgcgcggaggcggctgcgtcggggcgcgagaaggtgcagttccccggcgggcgggcgggcgggcgggcgaagctgggctcggggccaagcgaggtctagccggagcgactgtgccccgcctcctgggcggagcgggcggctccccatggtcagagcctcgtgccggctcggcagcgcccggacgccgagcccagcgcgtcggccccccggcgtgcgggcgtctcagagccgcggaggggccgccgggaccgttt

SEQ ID NO: 31244 - DNA, 2300 bp, Homo sapien
tcattttaattctattatgaagcatttaatcacaaataccctgaaaatgaaaagataatttatcattttaccttgactgagcaactctcctcacttcacattcatgaatccataacgcagagaggagactggatgattaagtgtttgattagagaaaacagattaacctagcaaacataataaatttggctcataagcaggatggctttataaatgctcacaatacctctcctgtataaaatcatgaaccacttcctacagtgatgactccatcgaaatagttgagaaacataaagcaaatgcatgtttatggctttctctttgagacattaaaagggtattgaaaggcatatctgattcagcttataactctggatatatattaaggaacatgtaagaaaatattaatgcataaaaaaagctacaacttctcaagtgttctagtttccactttgtcaataattacgttttcaatgtccttctgtggactgtttccaaaggtgccaatccagacccaaagtttcagatcactcagattcacccttaaccttcataacacaacccaatagctttacgaaaaaagttgcatatttaggtagttgttatcccattatgacaaaatacataaaattagcgagatattttttagccttcaaataagtgggaaaaaatccttttagctgagattccatttacatcagaataaaaatctaagttatgactaggttgaagcaacgtcctgtgcagcgctccataaagttcacttagtcttcaagggttccttacttagctaggttagtattcctggcctctttttttagcagtgagaaaaaggatactctccctgccccagctttatttttaaactcacagccatatcctggaggtctctgctggctatttggcgcgtgggggcggaggggggccgggggaggggggcggggcggggtctggaggtctgtgctggctatctggcgtgtgtgtgtgtgtgtgtgtgtgtgtgtgtggttggaggtctctgctggctatctggcgtgtgtgtgtgtgtggtgtggtgtgtgtaagcagtgaggttgttttagggccagtccttcctccgccactttgctgactcaaagacccagaggctttcttggggtgcaggtaccatgattccttgggccctaagggaatttttgttaggctagaagagtgggtgtactcatgatgggtgtacccgaacattcctgggctcaacaaaaccgattatctttataaccgcggcgcctagcacagcgcctggtgccctaaacgttggctgcgggaacgtccgagacgcgggtgcggagccgggggcggaataactggttgcgcggcgctttgaccgtaggcgctggagcgcgtgcgttgcgtgcgcgcgcggaggcggctgcgtcggggcgcgagaaggtgcagttccccggcgggcgggcgggcgggcgggcgaagctgggctcggggccaagcgaggtctagccggagcgactgtgccccgcctcctgggcggagcgggcggctccccatggtcagagcctcgtgccggctcggcagcgcccggacgccgagcccagcgcgtcggccccccggcgtgcgggcgtctcagagccgcggaggggccgccgggaccgtttcagcgtggcggcgctggtgctggcgttggccctggaggacggccccgagtgatggctggcgcctgcctcccgggtgtctcccgggtacagatggagtcgtcccgcggccgccggcggcaaggtcggcagctgcgaggccaagagagaccccaggacacacacagctgcctcccggtgcgagaagaagaccccggcttgagagtgaggtgtgctgggcggagtgggggaggacctcgaggcgccccggcaaccaaccgtgttctaaccaactggcaagtgggaaaagttgacatgactagagaacaacggagcttatccaccctcctctttttcacagactggggaactcagtccacagggcaagagactttcttccctaggttacacagctattaagtggcagagctgggactagaaacccaacctgtttaaggctttttaagcctactgtcctcactgaagtgaatatgaataataatacaagtaattattatcgtattggattttggaaagttggatggtgatattcctttggcatgcgagactattaatatgactcgtgctggaaaaagtcactcatgttttctctgggcttggattcctcattccttcattcaatgaacatttgctccgcagttacttgtgcgaggc

SEQ ID NO: 31245 - DNA, 2300 bp, Homo sapien
aaggggccaggtaaagcatggcacaaggtaacagcagacaagcagtgtgatgttgcagaagataccctggactgggtgacaaggaacacctgagctttaaccctactgatgtgtctctgctcctggtgctcagatgtcccggccagccctttgcccagacaggcaaggaatctattggccagagcagtgaaagggaaaaaagatgtccacagtttccacccctccatcttcctcccttgtctctggtactctgaaggttttcggagactagaaacaactagacacaatcactattcagctgtaaggtgggaagagaggaagatacaagataccagtttgtattatcaaagagaaaaacaggctttagaggtgggatgtccagggtgcttcaagaagtaggggcaaactctaaagggctgagacgtgaaaaatgcttctgcatccatgcagccttctttcctatccctaatttcctgctccctaagtagccctagagacttcttgcctaggctgtgtggctttctgcagacagctctacagagtttgcaggtatgactcccagctgcctgttcagtgccttcccacaatgctgccattatgtgggctggcttcaagtaatatgaaaaaagtccctgcaattctatccaaagcctctgaaactatgttattgattggccagtggaaaattctgttgagaacaaaattcatatccaactcaaagaaatgtttatataaagataactctgtaggcaaaacaccctgtttaaaaaataaagaaaccaagtgggcaggggcttaagagcagagaagtctctggacaagcatagcaatagcaagaagtttaatgtggatctagagtacagggcatagaggacattagtaggagtggacactgtaaggtaaggtagatccgaagtggacaagactttgaataccaggctaaggggtttggactttatcatttggagcatagggagccatgggaaggttctgagcatgaacgttaggtgtttggagctccactttagtaagatttaagggacagaatgtgcaaaatgattttatcaaagactttaacattaccttctctaccagcttccaggaagcccacagctttgcctcaggccaggctgtgccatggagcccactgtgtgcggccatggccagctgccactctctgatccttctcaatgggaccatccagggagaccctctggacctcaaaatgtttgagggcactgcctgggtaaggtgatagtttaatggaaagatgagaatctgaggaaatctttactgggagtgctgaagcttttctaatttttgttaaaacacagagaaggttcataataatgtatgtataagcgtgtaacactaccagaacttcccaacctgtgcccccaaagaattctgttaatggttgctgcatgaaataggcgtccattattgaacaaacttgggaactgttgtttaaacaaagttaaactcatttcttgactgcctgatttctttaatatactgtggtgttttgtgaatattcaagagggaatatgacatgcagcatttaccgaacctatctgacctcaaaaaccttactgacacccataacccagcatgttctccaaaacatcagtgttttccaaaacactatcagagaaacagtagtcaaaagcagtgttctctggtagagcagccacgagccatatgtggctactcagtccttgaaatgtggctctgcaactgagaaactgaatttttaatctgatttaattttaaatagtttaaatttaaatagctacaagtggctggtggcgactgtgtattgtaaagcataagtctagacaccaaactggaggactgcattccaactggttcaatctcctgagctgagtgtgaatgaaaacggaagggtataaacccaccctgaaggctgccatagtggaaaaccctctgcatttcaccactctccagctgtgtgatcacaaagccagagccaggactgagtctgtgacctcatctgtacgtttggggtaataatgcctcattcacggacttatgaccactgagactatgaatctaaaggggctttgagcacaatgaagagccaaacaagtagagggtgttcactaattaactggttagttaattacaccctgttgcctccgaagaacatcctaaagctgtgtccaatgatgtataaaatacagtacagcagttaaacatagctgcaaaagaatgggaacaaatgattgcagggaaacaaagcacacctaacaaagaagctaatacaaagacatataata

SEQ ID NO: 31246 - DNA, 2300 bp, Homo sapien
ttacttttattccccttaatgccccgaataggtgctcctttcccacctcgcttgaccctttccacaccttctgctcccagcctagactgtgctcaccagatgccactatcccccattctttctatctgttaacttctgcttatctttgagatgtcagaataaatgtcacttcctttgggaacctgtttgtattccattaaatctgagtttagtatatttcccaattaagaggctgcttagttatctgtcattcccaagtaactataaactctctcaggataggggctctttcctttacaccattgtattcgagggcctagcacaatgtctggaacatctgttttccagtacataattgttgagtaaaagtggaatggagtcaagaccagtgctatgtatatctttggactatatgtaacagaaaacccaagcaagagtggctttatgagaatgtttaattgtgtatttaatgtggtgtttaggggtaggtaggtccatgaatcagtggtgttataggcatataacttcttttgtccttttctcaccgtaattttcatggtgatttgcatcctcctcaccacctaaagatggctaccatgctccaagcattgcattttcatggatcactttcaaagaaaggcagaaaggggaagacagaaaaaaatgttcttctctctgtttcatcaacaagataacctttcccacaagaccatgtctttctcttctatttcattgtttagaactgggccacacgccgacccatagacaaatcattgactcatcttggtgcttttagctgaagtcatgctgcacaaagttggggttctttcagcaagaaatacaagtaaatagcggatgggtaagaagtgaatgatagccaccactcgtgtctttaatgaagttttactaaaatccagaactcctttcttcaaatatgcattttaccttagattggtactacttacaaggcaacattcacaccggcacattatacttcagtatgggtacctcgggagcctctggcatgaagagctctagttgtcttcctgtttattctcatcagccactttctcctggccagagagcacgttgatctctcctgaacaccaagttggacacttatgcctgctcaaggcaatcagtgtctatttcagtcagcagaaacagccaagtatcatccctaatagttttcattcccagcaaattttcttccatagtcaaagtgcaaggatacaataagagccaataaaatgacaaaagttttcatcacaaacaaattaactgactctggaatggatcacagtatacctattttctaatcaaaatatcaaattcagtggtgttgaaatttgggctatatccttaatcctcggactttctagcatctcttccctccacatactttgctcatttgaaaacttttgtaaactctaaagagaaaatgaaaagaatcaagttattaatatagtttactttttaaagcctctttcttcttggttagtgtaatgattatgatgatgattatttctctcttagtgactgtggtgggtgctatcgttggctttttatgactatcatcttaaatctttatattactgtatagttattattgacattttatgtactagaaactgaaattccagattttaagtgatttgtccagggtcttcagtgaagcacggattagaactcagatttttctaattccaaaatgattcctacattctctatcatgagcctacctcccttccttcaattctcattgtcacccccaatatgttcattactttttcaaagtctgcagggtttttatacatctctcactggctaatccttttatcttaggtttttagcaaagtgactattctcattccttggctgagacatttatggatcgcatacaaaatgatttctccttctagtttgccaacttcttcccccgtcattcctcaggtcttgaggcactcatatctagctcaataaacaaacactaggaaaaaaacccacaataaccagattaacagaccaatcctgttcctgagaagattttctctctttcctttgttagtctaataggcaaggtgtgtactaagagattttaaaagcgcctgggaagagcaatcacaagttgtgacgattccaagttcacagaagcccaagggattttgacatttctccaaggagttagccagaagagatcctcgccggttgagttcagatggaagagaacagtaagaaggaccatcgggctttgctcaaccagggagaggaggatgaactggtgagtcttccctttattt

SEQ ID NO: 31247 - DNA, 2300 bp, Homo sapien
ttcttttggggactctgaaattcatatatctggattttcgtatttcttgtaggacttagaaggttttcagcacttatcatattaaataaaatgttttgtttctatctttgtctcttctccatctggcaatcccataatgctaatgtttgatcatttcctggtgtttcgtaagtcctatggcttgtctttgttcttttatattcattttttctttgcttcctctgactgggtaatttcaaaagacctagctccaaattcagagattctttcttctgcttgctctagtctgctattaaaactctctattaatttttttcatttcattcattaaattcttcagctccaaagtttctgtttggttctttttaaatgatatttatctctttgttaagtttctcatttaaattctttaaactcttctcctaattttcctaattttcctaaatttgctgaattaggaaactcttttcctaatttgtctatctgtattctcttgtatctcactgagtttccttaagatcattataaattccttttcaggaaattcataactttccttttctttggggtcagttactggagaattatcgtgtttctttgttgatatcatattgtctcgctctttcgtatttcctttttgtttctgcatcaatgtctttacacctggcagaacaatcacctcttccaaactttacacagtggctttcacttgcagatgagtcttggtatgctaattgtgaagattgtggtaactctgattccgagaagatgcagtagtatagactttgtacaagtttttcagctaagatcaatgccaataatgactgagtgcctcagtggccattttacagatgatggggagacttgactgagggaccctctcggtgtcaggtctggcatgacctataagcagctgcagtagtgctgggttatagcagggagaccttagagaggctgtgaagctaggctcctaggttcaggatttttctccttggagagaaggactgctctggaggtttgggaccagggagcagggtacagctgcaattcaggaactagggctaataggatataatggcaacgaagttccctgggagatgaagcaccatccagtggtgaccttggaccctgagatgatggggcacagtggtattccatactctgtgaagctggggtacggcaacagcaaagaacccaaaatggcacagctatcacttgggccctggaggggcagtgggtgggggacagggagcagcacagtgatgactccacttacctgggaaggaggtatctcagcagttcagactctagtccagctagtcaagctctagggaaccagggaactagagctatttttcctgttgggggaagggatgtctctgctcagccagtgcttttccctgggatgtggagtactatgtcagctcaggcctggaatgcacaactgcgagctcggccaaagcattgattccttgggaggcagtgcactgctttagctcaggcttgggggtaagtatagggggtcggggaagtgaggtatgactgctcttggccaacacaccagttcctgggagacagggcactacttcaactcaggcactggggaggcatgactactctgggaagccaaagtaccattttcccagaaggcaagacactacacttcagctcaggcatgggggcaggggcagcagcaactgggaggggtagttggaccactttgccaaggcattgtttcttcaggaggcagtgcacagcgtcatctcaagctccaaggggcagggcacagcagggactcagaagggtatatggagcagctttaccatagtactctttttcttccactgcattaccagaggcagtgcacaggttcaactcaggtccctaggggcagggtgcagcagtgactaagaggagtagttggagcagtttcatcaaggcagtttctctgggatgcaacgtacagcttcccctcaggccatgcagggcagggtgcagtgttgactgggaagggcaaatggagcagctctgccaaggcactcatttcctgtggaggtagtgtgtagcttcagttcagtccctagaggacatggtacagtgggaataagaggggtaaatggaatagctgcatagcaacttggctctcaaggtaagatgtagcggcagatcagggatggcagggcaccaggcaggagtagtccagcagccgttaagcctcaaggctggtagggggtcatgccacttgccctcagagcaggacacattccagcagtagtttatgttccaagatgacatagtgc

SEQ ID NO: 31248 - DNA, 2300 bp, Homo sapien
tcacgatgttggccaggctggtcttgaacccctgacctcaagtgatccaccctcctgggcctcccaaagtgctgacattacaggcatgagccactgtgcccagcctgattctttaaatttctcaacttattgtcctgtctgttccatttgactattctgaccagctctctttctgaaaactatcttctctataactttctaagataattctctctctccaaattcttctaccactgactatacccattcagtttcttctgctgctcctcttcctccatctcctgaattgttggtgctgctcatggctacatccttggcctttcctcttctcactctatacttggtctctaagtaatcttgtctgcttctgtgactttaattatcatccataacctcatgagctctggctaaatatctctcgtccaggcctctcatctgagcttcaaatccaaataaatctcaaactgcctacaaggcttctcaacatggtatttctacaaggcaacttcaacttacagtggccaaaagacaattctttctctcctcctgtaatccctgtgttgaggaataatgttgccttctgcatattctcccaagtcagaactagaaagtcattgtaaatttctctgtccctatgacctgccaatacaaacattttctcaagttttgtagcttcttacttccttgtttctttccttttttgagacagagtgtcactctattgtccaggctgctgtgcagtggtgtgatctctgctcactttcacctccacctgccaggctcaagtgattctcgtgcttcagcctccagagtagctgggattataggcatgcaccaccacacccggctgattttgtatttttagaaaagacagggttttaccatgttgcccaggctggtcttgaactcctggctcaagcgatctgcctgtctctgcctcccaaagtgctaggattaaaggcgtgagccactacacccggccacttccttgtttcctgaatgcagtgcttcctttctatccccactgccagctgttatagttcagacctcatcccttgcaactgggattcctgtgattatttcccaattggatacccagcccagcctccaacctcaccagactttgattcattccctgtgctatggacagagtgctctctcttatacataaatatgatattactctcctgattaaagtggttaaatctctctacatcctccttcagtcaccagtgcctttatttatttattatttatttatttatttttgagatggagtttcactcttgttgcccaggctggagtgcaatggcacaatcttggctcaccacaacctctgcctcctgggttcaagcgagtctcctgcctcagcctcccgagtagctgggatcacaggcatgtgccaccacacctggctgattttttgtatttttacaaaactggggtttctccatgtcggtcaggctggtctcgaactcctgacctcaggtgatctgcctacctcggcctcccaaagtactgggattacaggcatgagccactgtgcccagcccaccagtgcctttagacatatctgtggacagttagggttctccatgctttggctcctagatagctctcacggccctttattctccacactccacattcttgactgcacagcctgtggttccctaaatagttatttccagctatcttgacatctgtgtttgatttacagtacccacagtatttataatactgtattatacttatcagtttacatatctgtctcctattctaaactacagacctcttagaagtaagaactatgtttatgcttgtatccccaatacctagggttgtctctgccacatggtaggctcacaaaaaaaatgtctgttgtatgatgagtgggtgcaggcatgatttaaatgagggaagccatcctgcctcacaaaacaagatgcttgttttctgtaggagaaagtattccagtcaccaaaactccgttacccaagatggatagctctgtgccctggaaaacacagagtgaagcggattacaagcggcatgtcctcttctgtggaacagaggttatccaggccaaggcagcttgctctgggaccgtgagagccgtggtactgcagactggttagcatcccctcctttttcttatttttaatggtatacttttgcccagtttgtctagtgccttaaatttattaggtaaagagaagctgttttttctttataatcatatttttttaatttttaatttttgtgggtatatagtagctgtgtatatacttatgggatac

SEQ ID NO: 31249 - DNA, 2300 bp, Homo sapien
atattgccagtgataaacaggagaatgaattacttctttctcacctgcccaggagcactgatatagtttcaccacgtcacatactaacactcctcaacctccatcagttgagatgaaatttggaatatgcttgttttatatttttttctgtactaaatatataattactgcctagtaaggctgttaaatgttcagttaggtttttttgaggtataattttttattgaggtatgatttttaaatttgttatatctcttcattgagatataattcacatttcataaaattcacccttttaaagtatagagttcagtgaggtttagtatgttcacaaatttttgaagccatcagtagttctagaacatttttattaccccccccataaaccctttactccttatattttgaccttgtgataaaatgttaattttattttcatttatttggttaaattgtgctagcaaatttttgaaaccaagagaactacatatatatatacacacacacacacacatacacacacacgtacatatatattttgtaattactattacaatgggtttacttagcttactttttatgtttatcctatacttcactatttgctcaaggttttacacatacaacatatacacacacacacatgcacacattgatcttggtcacattagggttatttgggtcaggttggagatatcattgccaatgtagcttgagggacagacagtggacatggtgaaggtaaaaataactatcttttgtggaacacctattatttcccaggcactctttcttaaaagtctgttttaggacgtaggttctattatcatcatctttatgttacatgtgaggaaatagaggagaatggagtttgtataacttgttatatcccaaggtagcacaacgaccacctagtacagtccaaatttgaactcaggccttccaaatttagtgtatatgcccttagccactatgtcctaacacctactgttcaaatgcacatttagtttaataatcctaacagcacttgatcagtgctgtacaatgtactttcacaatgatctcattccattctctcaaaagtcctgtcgggcggtaccagatgagaagagccggttcctatagttaaatgatcacacagcaaggccagtgcagacaagcagctggaatacaggtattttgccagagctagggtaggggtgtgtttctctacaccacattgggacttctgacagttttcttagacttctgttccatctcttataataacaatccactttctatcatatttgtttggatgtttgaatccttacatcaacacgagggtagcaaatatgacttaacttttttaggtagtccctgtgctcaggcactgtttattgaataaatgtgtaaacaaattaaaaaagagtctggccatatagtcatttgaatattttatttctagacttccttaagtgttgaaccatcaatattttagtgaaaggagactacatagactagtttgatgatacctttgttctttttctacatgtgtttcaaaaaagtaaacttaatttcacatacactttaaatagaattttttttgcatatacaaggaaatgtgattacaaataccttttgaagaggattagtgataatctgtaccttttgtaagcaaaatgaatgagagtactattagaaacctgtggattgaagctttcattcatcaaagaaaatctgcagctctgtgcgcttccgctcaacccaattccttaggtcctctgaataaagcagtgacctgggagttcttgcacccgctcctcactcctgagaagggtcctgccaactctgtattgtcctgttggatttgcagtcagaagtctgaggctggcaggcactgggcaggcaatgagttctttccctgtaagttgggcacaaaaagatcggcatgggagcagcctcctttgagacagctgctctgagagaatgcaataagcagggagcagccagcaattcctcctagcagagggcgactcgtgggaggagttcagtttgccaagtattgtcatttgttgagagaaggtgtgtgctcaaggaggagttttaacctggaggatcattaactcttttagtcagctgaggagctgcggtggctcggcgagttggagttcatcctggaagcgtctgcacgacaaggtcagggaggaggtgtggaataactttttcatgggacactttgagaagggccagcacgctctgctcaatgaaggagaagagaatgagatggtaagattctagccacattcccttcttcccat

SEQ ID NO: 31250 - DNA, 2300 bp, Homo sapien
tggcacaatctcagctcactgcaacctctgcctcctgggttcaagcaatttttctgcctcagcctccgagtagctggctaatttttttatttttagtagagacagggtttcaccatattggccaggctggtctcaaactcctgacctcgtgatctgccttcctcggcctcccaaagtgctgggattacaggcataagccgccatgcccagcccaaatgtagtgttatttttaaaacactgcataggccaacactgtctaaaccaaacaaaacaggtctgtgggctgaatttggtccaatggttgcagtttattatacaacagtttgcccttttttcatggcaacactatgtatctatgggagatcattccttatcaggacatacagacctaaagcataggttttcatggctagtacggatgtaatttatgtgtctagttcctatacatggacatttatactgattccaatcttttcccatttcatacagtgcagaaataaacatcatcatgcatacatctttgcatacatgggaatgattccacaggataaatgcctagaagtagaactgcaaaacaagggcttcataaaacatatgataaccatatataaatggtgatggtggttagtttctcctttttttatggttaaagtcttttatccctaatttttcttttttgttgttgttgttaaagtctcttggtttctcttattttattttctaaaataacaaggaagtaacgattacaaagacactttttgtacaaccctacaatcccaggaagatctacagtttgcacaggttggtacagcaaattgctctctggacctgccattgaaacagtcaccacaataaataaagaaaattctaagagtcctgcatttgggaagtttactatcaatggctaggtctactcttggtggtattgtgagtgcatgggtccagacttatgattctgacaattaagggaaaaggaattgtctttatgctctgtgtatttgtgtatgtgtgtggcatgggtggggggcgggtagtggggaggaggtgaaaggtccctgaagtaaagaggatgcacaggacccttttattttagtccctaaaaattggcttcataaccgttcacaggccacatcccttttacgggccctggtttccttacaaaacataaaaggtttgtgttggaaggggaaaggagtatttaaagtgatggaggagaggagctcaagatggctgagatctgggcctgtccaacattgagaaatttgggaggggagccatcaaagaagcctgggagcagcagttccagggaaaaaggagaatgtgatggccagagagccaaaagaaaaagtagttgaaggagtgctcagcactaggcatctgaactgaatgctgtggcaggctcactggccacaaacaatagggagctggtggaggccttgacgaggaccatttcaacaaactggtgggcttaaaatccggaagaaacagttgaacaaatcattttgacgccttttataaaccacacaagcttattccaaacccgttactggcctaactgatttaagtccctttcccatctgatcctcagagattctaagggacttagcctatccatgactcttcgtcctgcttctcacctcccatgattgccctaacgatgtgaaagtgctttcaaacaaagatgcccaagaaagaaggtaggcaaatgtgcaagcattagtttgtagtacgctattactgtatttcaccttgcactctctagtttccttcgtgctccctcaatatccaactcttaataaattcatggctcccggtgagcattcatcaattctcattccacgcctttagcccttcccgttcccgcccaactctcgctccctcccctggccaaatctctaacctgcaaggctaattccgaattccaaatcggaagcaagagggcggggccccgtgagaggcgatggattgctccagtccgttcccgacgcactgtgcgcatgcgctggtcctccgcggaccgttcgtgctgcccgcctagaaagggtgaagtggttgtttccgtgacggactgagtacgggtgcctgtcaggctcttgcggaagtccatgcgccattgggagggcctcggccgcggctctgtgcccttgctgctgagggccacttcctgggtcattcctggaccgggagccgggctggggctcacacgggggctcccgcgtggccgtctcggcgcctgcgtgacctccccgccggcgggatgtggcgactacgtcgggccgctgtggcctggtaagtgcagg

SEQ ID NO: 31251 - DNA, 2300 bp, Homo sapien
cagctgcatctgtggatgtcaaagcagcaacctcccttgagaaagttgcctttagcttctcgggatttggtaatcaggattttaaaaagggtgtcagggatatggattcctggcccacagactccagggaaaaataacagactatgtctcttctgaagcaggatgagaaaaaagccctggaggtcagaggctggatcctggtcttcagttcaactttcagtaatcttcttgagattgtgtataaagtggtatctgaagaggaggccctgacaggctgcttttcttcatcttgctccttaaattctcccactctctgtcattaactcagtgactaaattgtctttgtccttttgggccccagtcatatatcctcctcagactctgatttctttactggttgtaactggaaagtgacctgaaagttagcagtgggaaaccaggatctgtgttgattgattcagtagacttaattttacacaaaatgtttagtaaatagtcttggagggtaggagatgttgactctcctcaccagagaagttcagctgggcttttggacagcaggatatttctgctaccctgagatttgtggctatatcctaaagggttgagattattcttaagaaggatcccctgataagcagagttttttttttatattgtagtattctaagtttattacccaaataaatatttccttgagatttcaaattgaaatagttgtatttttttattagtgacccatgttcttttaagatgtctttcaaggcagaattttcaacatgattatgcatcttttacattgttaccttaatcatgaattattgaaaaattttatctacagcattctataacatctctgtgctgtgatctgataagttgtcatatttataccaagaaattttcagtctcagactctcccgtaagcacatgaagtatatgttaatactaggcagataagtgtgcatgaaaagatgctcagaattattagtcattagagaaatacaacgtaaaaccacaatgaccactataaacttactaaaatggctacaattttaaatgacagactataccaagtgttggcaaggatgtagaggatctagaactctcattctctgctagtggaaatgtaaactgaggcaaacatttcaaaaaaaaattaaacatgtaattaccatatgatccaaacattccactcttaggtatttacctaagaggaatgaaagcatgtgttcataagaaagacttgtacgtgaattctcatagcagctttatttgtagtagccaaaagctggaaacagcctaagggtctatcaacacaagaatggataaacacattcatgcaacataatactacacagaaataaaaagaagtgaaatattgctagatgcggtgtctcacacttgtaatcccaacactttgggaggccaaggcaagaggattgcttgagcccaggagttcaagaccagcctcagcaacatagtgagaccccatctctacaaaattttaaaaaattagccaggcataatggcgtccacctgtagtcccacctactcgggaggataaggtgggaggatggcttgagcccaggaggttgaggctccagtgagccatgaatgtgccactgtactccatccagcctgggcaactaagcaagaccctgtctcaaaaaaaaaaaaagtgaaatattaatacatacaacagcatgatgaacctcaaaataattatgctggagtggaagaacaaagacaaaaaaagagtatatgccacatgattgcatttatataaatttctagaaaatacaaagtaatcacagtgacagaaagcagttccagtggttacaacttttgaggatgatggatgcgttcattatcttgactggtgcgatttacaggtatatacacatgtgaaaacttatcaaaattttaaatatgtacagtttattataagttaatgatacttcagtcaagctgtttttaaaaacaatattatatttagatttggtgcttttgatacttttttatttcagggaggaaatccttcaacaatctttgtgggaaagagtatcaactcatgtgattgaaaacatctaccttccagctgcgcagaccatgaattcaggaacttttaacaccacagtggatatcaagcttaaacagtggactgataaacaacttcctaataaagcagtagaggttaggatataatttaattaaatgggtaagaagcattatctgaagggagtaggagctgtgaattttagattttattcccatcacagcctctatctttcttttaggtc

SEQ ID NO: 31252 - DNA, 2300 bp, Homo sapien
aattttaagtcctttgatcatctggggaaaaaaagtatgtgtaatttataaagaataatctaactcttatattttcaaagatatttgccactttgttcgtgatacgtgcatattatccccaatgcttataagaatatgtgaatataaatagtaaaaaaaagtgtgaatataaatagtaaaaaaaataaataaataacaggaaatagtcccttattccctgacctgtaagaattttagttaacatttttatgtatttcttttcaactttttctgtacatagggagagagacagagagggaaagagaaagtgtgtgtgtatctgtgtgtgtaacataaccatccatttgcataatggaaatcatcctgcaaaacagtttttatcatgcttttttcaggtgtcataattatttcttcatatcactaaatcttgttttaaataatcataaagttcttgtattaaaatgattcataatttaaagtaacccctaggtggcagcagtctgatatattttcagcattttcttacaagcaaaaatgcttttaaatatccttttgataaagctcagttaatcaacaatcttatttaattgagacttctaacatgctgttcttttgttttcagtagatgaacataaatttatatttaaatgcacctaattaaaagtggcaagttttttttgcataattttaattgtagagtgaacttctttctatagaaacttctgtagaaagaagaaacttctgtagaaactgccttctgtagaataagcttctttttaaatacatcactttattttcacacagctgaattttaaaaatggcttgagtacagactcaaagaaaagaggttaacctaaggacgtatttaagataaacatggttagctgaaactaaatataaatggagggtatatgctgtgaatttcaacttacatacaatgtaatgtaatttgctactactcaagcttatttactttgtcattagaattgaaacaaagctatctaggtgtcagacagatataagccaaattatgcagaatttcatggctccgtacagaaaggattctgtagcttatatctacagtatatgcattaggtaaatctgagtactttttaagcttaggacatatctactggttctagtagttgtatgtgtttacgatgatagttttcattttaactttgcatctggtaatcttagttacttaatatttcagttggaatgcaatgatgtggtcttgttttggcgtatacagcgcatgcttgctatcaccgcaaatactttaaggcaacaacttacaaatactgaaggtaagccacatagggactgcagtcttattttgacattaaaaaataatagtggtaatatccatatttaatagaaggatgccaaaatacttcccaaaagtagatttattagaaaaactggccaggtgtggtagctcatgcctgtaatctcagcatgttgagaggccgaggcaggaaaaccgcttgaggcctgtagtttgagaccagcctgggcaacattgtgagactctatctctacaaacaataaaataaattagccgggcatggtggcacacatctgtagttctagctacttgggaggctgagatgggaggatcacttgagccctaggattttgaggctacaatgagctatgatcatactactgcactctagcctaggtgacagagtaagaccttgtctctttaaaaaaaaaagacaaaaattattatttgcttttaaaataaatcataattggaaaagatgggtgataaaacataccaggagtttattttcattgcatgaaactctgttgggaatggactcctaggtatcacttagttttttgggaaatctgcacttccattaaagtgtatagcttaagaatatgacattctctgagactatataggtttcatgctgataaaactactgtataacagagattttctatgactatgaaaagtattagcaatagttctaacatgataaaaaatttactctccatatatataggttaattttatcatctttattcatttataaaaacgatgctcctcaggttttttaactttctttaaacagttaggcgattagagaaaaatgttaaagaggtattggaagattttgctgaagatggtgagaagaagattaaattgcttactggtaaacgcgttcaactggcggaagacctcagtgagtagttcttactgccctctaccttactacctttccacctttcccatttccatttgtttgttgatccatttaatctcaaacttacagaaaagttac

SEQ ID NO: 31253 - DNA, 2300 bp, Homo sapien
actcacctccagtctcccctccgttcacacctcctacccccattacttcctggtaacttagttaagtgtcctttgtcattcctgaggtttcaaggcatggtagtactgtgtcctgatattctaatcgtaaatatttaagggaaattcggcattttttcattttgtggttttcatattaaagtacattaaatagtctttttgcttttatttaggaaaaaaactgcttacctgttaattttagaaaaatctgattttcatttagaccttacagggtgagacacctgcatcagggtggctcttggtatctttcaattcaattggatcttctctgaatagtctcttgtagggagtgaggctgctgtaccacctccctgcagtagtccatccagcttaagatgggggtcaccagtaggccaaaagaatgggtagacctggccatgcactgccctattgtactcaaatcgtgtatcaaatggagttggatttcttctcttcatacagtacagcatttccaagtagaaatatttctcaatgaaatgtggagagaagcacccgtttgagattcccgtgtgttgtgtgatttaagttagatggttttttaagaccacattcatttccagcattctaggtaacaatttagaaaatgtctttctcctaacctccccactttttaaaaatcctccaactgatgaactgatgtgaaactttcttacattcactgaaaaaaaaaaaaaataggttaagctgtttctaagcaactagatgaattaatttttaaactaagaatgtggccttattttgggaaaacaagaatatttacttgtttgtctgctgtttaaaaaatggaagtcagcctaccaaaaaattgagactcaacttctaggagatgggttaggatttttttttttaagtttctctagtttaattttatatataaggggttaatgctaccttcataataactattatcatattttctcaatacatagcttgattaaaacaactggactccccccccaccccaccccacacacacacagattttatatcagtctgaatctaatgcctagaataagaagtgcttcagccaggcatagtggcactcacctgtagtctcagctactcaggaggctgaggcagcaggatcaattgagcccaggagtctgagtctagcctgggcaacatagtgagacctagaagttttaaattactggaaaaataatatgaaaagaataaattactggaaaaagaatatgaaaatgttacgttctttatatccaaccgtggtaggcttttttgagttcctgcaatgctaataagaattcataaaaaggacaattcttcattttcttgggtactcatcactaatagctgcctcgctggtaaaaaggaatacatgtatcttcaattgcagattatttacttttaaatataaaagatataaatgtcaaatattaaatgcatcttacatggttttcctacatagtgaaagtagaatgcttgccagttttgcctctaggtcactcactttgaaccagccaacccaccttaattgatcatttccactaatatgttaaattaccttaaaagaacaaaaatatttatcatgcttactataacctgtgttttaaaataggaggccaggcacagtggctcacacctgtaatcccaggactttgggaggccaaggcaggaggatcacttgagcccaggtgttcaggaccagcctgggcaacaaagtgagatcctatctccacaaaaaaattaaaaataaaaacttagccaggcgtggtggcacgtgcctgtggtcttagctacgtgggaggccaaggcgggaggatcacctgagctcaggaggttgaggctgcagtaagccctgccaacaccactgcacgccaacctgggcgacagagtaggacccccatctcagaatataaaataaagtaggaggtgcatgtgaagtagtatagatcatgacttttccaattttaagaggggattggcatgtactatgagcagttcacatttgtggaggaaatctacatttcagagagtatatatttcatttggaagtctataaacatgaaaacctaaaataaataatgtaaatctacctctagtggctctggtatttttaaacttatttatagctggcaaagtacttttttgtatgtatttttatagcaccattgcacttctcatgtttgttgcaagcatctcccacagcttcctttgtcttttaattttatgacatataaataaaagtatacatttcaatatggccatattgattgatcttt

SEQ ID NO: 31254 - DNA, 2300 bp, Homo sapien
tcagcatgctgccctgtgcacagcttcctggaaggggtctgcttacttttactattgcactgaacaaatggaaaagaatttgggaccattgcaaagacctacagccagggcagcaaggatggtggtgggagcccagctgaggctggggctaagattaaaaactgggctactctttactatataaaaggaagcaaagccaggacttagcagagtgcctcaaagtatcaccaaactgagggaacagaaaagattttcagctactctcagtaaagggtgttgctatttcaacttccaaaagcaaaatgaagctgtagcctgcaaaggaatgaagtcatctgttcacagacccacaggtggaaaactttctaaataacatcgctcagcttcccacatttgagaacacaaacattgaagcccaagagaagtgacttgcccaaggttacagagacagaggcagaatgtgtggttgggggaaggagcactgtctatagggtcagacaagcctaagacagatcagaactctgtgtgaccataagcaaattcagtaactgtattagtctgttctcacactgctaataaagacatacccaagactgagtatgttatacaggaaagaggtttaattgacttacagctcagcatggctggggaagcctcaggaaacttacaatcatggcagaagggaaagcaaacacatccttcacatggtggcaggaaggagaaatgcctaccaaaaggggaaaagccccttataacaccatcagatctcatgagaactcattcagtatcacgagaacagcatggaggtaaccacgcccatgaataaattaccgcctactgggtccctcccaccacgtgtggggattatgggaaccataattcaagatgagatttgggtggggacacagccaaaccatatcagtaacctttcattttctcatctgtaaaatgggggtaataatagctacctagcaatgttaccatgaagactaaatgagaaaatatttgtgaaatgcctgacacaaaatagtgttcactaactagtaggcattattagaataaggtataaattcccattgtgtacattgtgtacatatggtccctttgaatgacaaggagaaactcacaatgacagggctgtgttgggcactgcctggatctccctgggtgtttagtggaaatactacccttgggggtgagatttttctgcagctatcttcatggttcaggagagagagagtccttcttgtccttcatgaagttttatggtgacttctgtgccaattcaagaggagcttctgaatccgtttggacaaagacaacacatgaaccactgtggggcctcaattccctgctgaaagactgtgttcgttcattcagcaaatacacatctgagcacctactccatgtcagacactattctaggtgctggggatacagcagtgaacaaataaaatcctgtcctcatggagcttacattccagcagaccctaacaattcacaggaaagtggtgacagggctgatgtcaggctctgaggcccttctgttcagaaggctcttcccttacattgccccagcccctttctctttttccttcccacagcctcggctctgttccctcctccattcttataattctccttttataagccactctccatttaactggtggatttaaagcaaatagcaattgtgttaagaagcaggaaatatgatactttacacaatgatggagaaatcagaaaaattaaggcttgtataaatctcttctctaaattgtgcccataggccaattaattaagctgcttttgccttgtgtctgttgcagctgatacatttctttctgaaaatggctggcctgcattagaagggccctccccactcccagagctcaggtttgggtgtgtcttttagagtaaacatagcacccctgaccccacctcctttatcacttggctctggctgtgaaaagaaagagaaaaaaagtaggtttgtttagtgtgaactctttttctgaagccaacagggagaacaagatttgaaacaagaggagactgagttgggttcaatggttaaccagtcagattaatgaatgctagaaggaggaaatagccagtaagtaaagaggcaagaaaaaatgtctccccgtggttcaaaagccaactaaagtttaccaagagctgtgacctgtggttaaaatgtcctcagaggccagctctcatctgatttcaacctgaagccccatttcctatcaagagagccatttggctcctctcttaagctcagcagccctgaggtg

SEQ ID NO: 31255 - DNA, 2300 bp, Homo sapien
acactagggcttctcttctttgtaaaataattggcaggttagtccaattatttttacattcaggcttttttttttttaatgtgttttctcctttttttcccttagttgctgacctccataacagcagacaaaattggaagcaagagtgattttggaggagtcacacttagatgtttcccttacctatttctgttctggaaatttaaaaatcttacttctcgtgacagtcctacatgaaaaattaaaaatcacaaggattcatggatggaaaactgagactcagagaatgatcacattcacatcgtaataaatcagcaatagagtgagtgattgttccttggtaagaaatcaactctaaactcagttggaaacctttgccaatattacttaacacatgacaatctggtgtgactcatttttcttgacattatgcaaataaaggaaacaagactgagtggccttctgtccggagagcaggaaatgaaggctgtctggggccacatgtttcctgggacatgtggtgtcagaaatgggtactagaagaaccaggcctttgttcatgtcttttattttttatttttgtttttttttagatggagtctcactctgtcgcccaggctgaagtgcagtggcactgtctcggctcattgcgacctccgcctcaccggttcaagcaattctcctgcctcagcctcccgagtagctgggattataggcgcccgccactacacccagctaatttttgtatttttagtagagacatggtttcaccatgttagccaggctggtctagaactcatgacctcgtgatccacccgcctccgcctcccaaagtgctgggattacaggcgtgagccacggtgcctggctgccattgttcatttctatttcatgagtgatcggctcttgttggccatggctggaggagtcagctcccaaaatccacactctctaggagtgctgaaccataaataatctatcaggactcctagattccactctctagagctgcaaccagaagttccttccttcccggccctgcttcccactaaaggaaacatttgacttttggggatgagatgtttcaagccagccaatccttctcacaggaagcagaaccccagccaccatggagcttatccttggggcgcagagaaacactgacctaatgctgtaatcaagtactggattttatttttaaatctttttacctcacaagctgactttattctggctagagggctcctgaacctctgtaaactccccaggaggtaatttccagtgctaatctcgctaacgaggtgtcagttacagaaatggcccacgccctggtttcttctaagtggacattacagtgtttcttcagaggggcctgtgctgggacacctcggaaatggaagaatttatagcaaggatgttatttctcactaagtgagcagaagagctggaagatctctttagagatcattagaaggatggggaaactgaggctcagagaagggcagtggctgcccgaggccacagagctgagtggcagcagggttgggttagagactggaccttgtggcggagctggcctgctttgggctgttccacacaccactgactttctagattgtttcatgttcatggaatcatcctcaaactctactccccaaaattgtaccatagattaacttcgggcaccccccaagtcaaaacttcaacagctaagggacacggatcatgcggcctgctgaacacgccatcaagtggggcaaagtcttctttctttgtgatcagggtatgcactctcccttggcctctgaataagctgtacccagggttcctcgatgactcagctgcagcaggctatccaccacacatgtccgtggccaccacggcgggaaccgggctcaccatcacttaccactagagatgtcaaaccacccccctcctaacccaggccccactgcggcctccctgccctgctccagcctcggtctgttgtgcaagagccagaggggacttacgatcacggagccacacgcccaggcccaacccaggcccaggagctccaccctagggaaacgcctaagtcagaacagagcactcctaaccccccggggcaaggaggggaggccaggcagccggaaggaaactcctgagctttttacggaatgcacaagacaaaaggtgagggtctccacgtagggaaagaacgcattattatttacggccttggtctggagaggagaacatgctgctctttgcagcccggcgtgtgattcatttcccccgggagctgcagggccgaggca

SEQ ID NO: 31256 - DNA, 2300 bp, Homo sapien
ggctccctacagcatgtgtgcgcgcgtccattcatttgttcgttcattcgttcattcattcagtaattcattcatgcattcgacatttattcagcacctgggtgagacacacactgagattcaataaactgctgatcaaagttgtgtctagacgtccaagggttaagccgccggcgcgggcccctctgcgtccccctccgcccccgccgggcgtggggaaggcgggaaggcggcgcggcgggtgccaaagtcggaacctgctcgtcggcagctcccggcgctgccttgactcgcagccaggcctggcgcggccgccggctgtggaatgtgtgagcgccatgtgtcaccgccccagactgtgggaaaacgctgctccgctcacctcccagcagctgccccgcgcccgcccgggcgggagccgggaaacaggagccgcctgccgcggaggccgcccgggggcacttccgagcgcgcgccgcctgcccggccgcccccgcgcccgccgcgtctccccgcccacaccccgctgccacccggccccgggcgccacccgcggagcaggcggcgggagggacagcccggcacggcccctttcctgcccttcacaccccttctgcttctcaggggacgctggtccacagaccgaggccccgttgcgcgcggccgccttcggagcgccgccctcctcccgaaaccggccggggcgagtggctgcaagaagctgcggtttggcccgcgggagaggggggcttccccgctggggttgtctgacgcgaacgccttcctggccccagccaggcgccctgaggtcaggcccagtggtgagagagctctgaacgggaggccccacgctgcctgctcccccaaatcagaaacagcctcccccaccggggcgaggcaagggatctgcaccaccccacgcgctcccgcctgcacggtagcctagagcctggtgtgagcgggaatcacatgtgctcacacatcacccaggcaaggtctttgaagcccagccatgcgggcagacgtattcaaggtcaccctgctgggtggcggcagagctcctgttggaatccacgctcagaggaccttctgccgagccccagccccaaaggcatggcgccctttctctgcagcatggtgcccctcgtcgagttcctgccccatagagaagttgggaatggggcagacgggggtggggggaaatcatgggtcctgggaccccgacagctttgcctaaactcagcctcatgctgcgagacgtcccagtccgtcacctcagcctgattttctgggggtgccccacctgacaggcctggtagtgaagcccccattgtatccagccctctacgagcacctggcatttgtgtgccttgttccggcttgccacctcctctgtggaagtcttcccagatttgcccaatcattgcttcccggttctccggcggcctttgacaaacgcctgtttatgacgtttgtggccccctgtaactcatggcctacctgtcctctcctcccttccggagtttcctgagggcagagactgtgttgccctcctttttgatttccacacaaatgattatttgagaactctgcttatggcagctgctctgtttgttggctgaatgttatgcaatttaccactggctaggaatctcaccagatgtgtgaccttgggcaagttgcttaatctaagcttcggttttctcatctgtaaaatggagatcaactgatactgcgtctaaagtgacttgtatagtggctggcacaaagcagatgctgtgtgtgtgtatgaatgattgctaaaataccatagactggtggcttaaacaatagtcatttattttctcctggctctggaggctgggagatccaagatcaagatgatggcgaattaggttgttagtgagggtgctcttcctggcttgcagaaggctgtctgctcactgtgtcgtcatgtgaccacagagagagagcaagtctgttcttatgaagacaccaatcctatcagattagggccccacccttatgatctcagttaaccttaattacttctataaaggccaggtctccaaatacagtcacacggggagctagggcttcaacctatggcttttgggggatacagttcagtccatagcagtggggaaaggatgtgactcagtctagagagactcaaggagggaatgcttagataggagcatggagggcgtgcctggtgaagggaacagtatggcacagcttcagaggcaagggtgagccagcagcaaggggctggctatggccggtacaaaaagcatgtg

SEQ ID NO: 31257 - DNA, 2300 bp, Homo sapien
tcaaacaagacgctgggctcccgggctgcccggagccgcgagccgagctcccaggcggcgggaagggcggagggggggtgggggcacgggggccggcgacccgggcaggcgggagggaggcggaggaggcggccggccggcccaggcagtgcgcgccgcccgcccggctcggcaaatcccccagggaggccgccgccagagccctggcgctcccggcccggcgcccgccacgtggcacccggcggcggcggcggcgactcctcccggcgcgcggcccggccagcaggcagcacgcagccgcccgcgccgcccgcctcctcccgggcgcccgccggcggcctcccgggcgtagtgagggggagcggcccggccgcccgggacccggggaaggggcgggcggcgcgaagccgctttaaccgcagtcgccgagcggaggcaggaggctgacccggccgcttcctaagtgcggtcaggcatcccgtgaccgcggcgggcgcccagggccccgcggggagagggcgggggcgaggagcaaacttggaggcccccacctcgcccccgggctgttgcgaatgcggctttcggccgagtgaaaaccccaagcccgaaagtgagggtggggaggcgggggttggaagaattccccactctccaccccgggtgtgcgctccccgccgggaagagctgaccttggcctggggaggcgggggtggggagagagggtaagcgccggggctcggctcccagcccgccgccccctcggattcctggcccggcggggccggaggagggggccccggacacacacacacacacaccccccacacgcagcgcgcgccaatgagcccgggccaggcgcagggggcggggttttcccaggctcgagcacagcagctgctatttaccttcttggcttctcccggggaccaggaaccggcccccgctctccgccgcccgtcgccgccccccgcctccctgcccccggggcgcgcgcacacacactcactcacacacgcacgcacacacacatcctcccggcccggccgcagccgcggcggcaataaaacatcctggcacgtgctccggctccaggcgcgcccacgccggccggctgatgtcaaactgcagctcggctggtgtagctcttaaagggcccgcgggcgccgggggccgaggccgcccgcggggcgaggagggagaggctgcttccttgcccgccacctcaacgcgccgcagaacctaaagcctacggatgaaaagggaaagggtggtgaaggagggcgcgagtccctgagtcattgccctcggagccccccttgttcattttttcatttgaaataccgtttccttccacccagttggaaattattctgattgtttcctggggaagcccggggtctaaggccccaaatccaaacgaggaatttctgaaagacggggtgggggtgggattcaagaactaccttgctccgaaaaacctgcatttgtgaggtagaaggcaatttttcctttttctgcatggaaacaggaaaatttttttggcccttttcctttaccatctactttcaccctcctgaatgtaaagtctgagcgggaactttagatgtgtcggtaactcacattcttacacccgtccccccctccccccgcccccttttaaccactgctgtttttttctttattgtttatacctttaaaaaaaatatgtttcaaatgaacttactacagtcaaagcagctctgttacatatgagagagggcataaagagcaaagaccctggctccaaaagaaatagacaagatcaagaccaaagcggaaagaaaaaaaaaatctctaaaccaaagcccagagggagagtagcaaagggttaaaatccttttgattgacgttgtagcctccggtgccctgggctcaggcgcgcgccattggccgccagaccttgtgcctggcggccaatgggggggcgcggtccacgagcggtgccgcgtgtctcctcctcccattggctgaaagttactgtgggaaagaaagtttgggaagtttcacacgagccgttcgcgtgcagtcccagatatatatagaggccgccagggcctagggatcacacaggatccggagctggtgctgataacagcggaatcccccgtctacctctctccttggtcctggaacagcgctactgatcaccaagtagccacaaaatataataaaccctcagcacttgctcagtagttttgtgaaagtctcaagtaaaagagacacaaacaaaaaattctttttcgtgaagaactccaaaaata

SEQ ID NO: 31258 - DNA, 2300 bp, Homo sapien
gacagggtcttgctctgtcacccaggctggaagtgcagtggcgtgaccgcagctcactgcatccttgacctcccaggctcaagcgattgtcccacctcagcctcctgagaggctggaattacaggcatgcgccaccacgcccagctaatttttttttattttttgtagagacggagtcccactgtgtagcccaggctggtctcaagcaatcctcctgctttggcttcccaaaatgctgggattacaggtgtgaaccaccccgtgcctggcccagagctgtctttatcataaatgttccacgccatatttcatctctgcccatccccttatccccattcccaaacctccaatctgatatttgtgtgagatttcatttggaggaaggccatgtacataatggtttggatgatgcctgatagcctccctggctttgccagcccataattctaagatgggaagagatgttgctggggagaagaggcggaggcttctcttctgattcctgcctggagccctgactgcaagggttgctcctggcttcccccatttgaaccccacccctggctggccagtgaggggagcattccctacagccccagggagggagaggctgccagcggccagacagggcattgggcagatggcacagagccagcccagccaggtggggaaattgagacccagagagggtaagggacttgctcaaggtcacacaaccagaccctggcagatccctttccacgctaattcctcagaagctcctgctggggtctctagtgggatactttggacagccctgtgggagtggcggctgggttccaccgggagtggggttactttgaagaacagtagtctctccttgaatccagatgagcagatacggttccagggctcagcctgaccctgaggctgtcacagctggggcaggggctgagggtggaaactgcctctaagagctcagagggcgtttagcctgccaggcacagagcctccaccggggacagaaagccaggaaaaaggtgtgggacgtcagtacgaatcctgctccttccatcgtagactctgaaagtaaaggtccaagctttgaattggatctcagctggggctgggggctggccaagaagattggggtggccacacatttgggcaagtttccctactgcctccgcaatgcgcctggccagggcccaactggaaatcagagacccatgaaacatcagctcagggagcatcagggatgcatgctcgtgcttcaagaggaagaaaccccgagaggaggctgggagagagactggtccaaggtcactggacagtgagtggtggagctggagcttggacgtgggctctggactctggattgtgtgtccccgccactgtcctgacatccatgtggacagatgccctgatccccctctgcaggggctgttctcttttcctctctttggggtgtataatgtgtttgtctttgtgtgtgtgtgtgtgtgtgtgtgtgtgtgtgtgtgtgtgtgtgtgtagacattttttattttgtctctttacctccaaatcctatctgcttcataaaactcagagaaaaagtctataagctcagtcacccattccaggatcgctgtcaggaaatcctcgttcccatctcacccgcatcccccacgctggagcttaagtccttccaggtggggctggcaagagtctgcgggacttactccaagagccccggggaagcgggctgggctgtttggggaggaatgctcacccggcagtgtgcaggcctggcagggctgcctctaaacccaaattgcagtccccaagcacgtgcgcttgctctgcctgagatctccaatgatgctgctttggcgggagtactgattctagccagtgatttatcatctgtttactcagagaaactgcttgttcatttctgctggtgggaagggaaggagggagggagggaggtgaacgtgtgtcctgtgagctgcagaggtagccggcagggatgacttatacactcccctcgatgggtgacctccattcactcttcctccccgcctctccgcctgatgagaaacagaatgtgctccctcccccctgggaggcttcagattcattttctgctcagacaccgttgcttgcaaaattccacccagaagataagggagggagtatcgctgcagcgtcctgctctgtgcctggttatattactggatccttgtgttgcagccctaagatagaaggattgtctccatttcacagatgagagagaactgatgcgcaggaggctgaaattgtctgaagtcacacag

SEQ ID NO: 31259 - DNA, 2300 bp, Homo sapien
cagggcggtgccaggctcttcccagaactgcttgtgagtgcccccacgcaagccatttttcccagccactgtcccacccttgccagcccgggggccgctgagggggagctgggcacactgttcaccgcctgtctccatcccagaggctcccgctgtcctctgccagagtgcatttgtggcatatcgccactgaaacacacttccttgccacactccattagacctttgcagtttggctgatgcaatcagctcacgtgcaaaagaaacattaatttgtactcataaaaagcgtagataaaaatcaataccatgcaatgagtgaaaaagccatcagtctactttaaatggtagactcctggcattgaaacgatcttagactgctcgtccaggtcaccccttcaccctgctcgcctccacacacccactcctacgctctcaccacacacccacatacatcctcacactcacactcactcagtgcacactcacacatacccactcaccacacaccacacacacacataccccaacacactcacacctactgcacacacgcacacccacccattcaccacacacaccacacacccacacactgcacacacacacccactcaccacacacatacacccacacacccactcactgcacactcacacccacttaccacacattttctcacacactctcattctacacacacgagacatactcatgcatatacacacccacttataccacacacacccctacacccacttacacacacccactcacacatacacccacttacacacactgcacacctacacacacgcactcaccacacacacccctacacccattcacacatatacccactcacaccccccacacccacacgcacgcactcaccaaacactcccctacacccacttacatacccattcacacatacacccacttacacacgcactcaccacacacaccgctacacccattcacacatatacccatttacacacacaccccccacacccacacgcacgcactcaccactcccctacacccacttacacacgcactcaccacacacacctttacacccactcacacatacacccacttacacacacatcacacatgtgctctcaccacacacactcctacactcacatacacacgcccactcacatatacaccctctttacataccacacccccacacacgcactcaccacacgcacccctacacccactcacacatacacccacacacgcacccacacacgcactcaccacacacacaccctacccacgtgcgcacacacccactcacacatacacccacttacacacacacacaacacacccccacacatgcactcaccacacaccccctacagccactcacatttacacccacttacatgcacacccccagacgcacgcactcagcacacacacactccgtgtgtcttgcagccctggttccacacctccggagatgggaaaatccctcccttccaaagcagcatctttcgtcctcggccagccctgagtgtctgagcgctcctctccatattgggccccaattcatctccctatagcttttcccccttctaattcaggaagggtttagaaagttcgttcattaaacaagcaaacaaacacaacaagacaaaacaacaaatccacagccctcttgaaatgcctccgggcgctgagagcccagcaggggcctgaggctgaaggcaggctcccagtccctctgcctctgctcacaggtatgggtgtgagcgtggaccccatcccaggcctcaccaacccagccgcctgcgggaatctctagagctttctgagtgtcctcggggtcctgaaggtgccaaccctgcaacctcggtgggattttggccccggcagggctctgtacatgggaggagttcagggtcattttgtaatcttcagaggccttgccaaggccctctcccgtcctgtgaccctggtgacattctgggacgctggggccacgtgaggggaggaaccactgcctggaactttgatcagcgctggggctggattgagctgaccacaggccacaccagactcctctctgctcctgaggaagacagggcagcccggcgccacccgctcggccctcacggtaggctcccggggtcgctcaagggctccagggtctgcagggacgtgggggcaggaacgggaacttgcgatctcccccgtttcagagcattccgcagctccaggcaggctgcggttctggggggcccctgccccgggaggagaagtccctgaggtgc

SEQ ID NO: 31260 - DNA, 2300 bp, Homo sapien
cctggggacatttggcaatgtctagagacattttgttacttttggatcggggggtactgctggcatctagagggcagaggccagggatgccatggtgcctcccgcgacacgtagaacagctcctgcaatgaagaattatctgcctccaaatgtcacgtggtgaggccgagaaagctggtggaggtgaaatgatggagagctgcagtgaggtacccaaggggtctctggttcacagcaggtgcttcccaaatagccatctttaaatgcagccgattcatccctgtgttgtccaccactcccagcacagtgcccgacacagagcgcttgggtgctaggattagggaggatggaagaggaaaaagagggatattcttattcttgtaggttctatggaaagaaagttaaagtggccaggcgcggtggctcacgtctgtaatcccagcactttgggaggctgaggcgggtggatcacgagaatcatgagaccaggagatcaagaccatcctggctaacacggtgaaaccccatctctacaaaaaatacaaaaattagctgagcctggtggtgcgtgcctgtaatcccagctactcaggaggctgaggcaggagaatcgcttgaacccaggaggcggaggctgcggtgagccgagatcgcgccattgcactccagcctgggtgacagagtgagactccgtctcaaaaaaaaaaaaaaaagagaaaagttaaagtacctgatttgggaacgtggaggaatcagggccgtaagagggaaggtgttctgcacgtgggaacaaggctggtgggggaagggatggggcttcaagctgtgtggagccactccaagcagtgcctgcccctcctgggctcctgttatttagtggacaagacactttttgtttccggctctgaatcacggtgccacagtgaggaggaatgtggcgtgattcaggctgtaggtcttgaccatgacaagccacccaagcaactatttcagtaataacactacgcacttttatatcttcctttcatcgcagatctcaaaacacagcgcaaatattaattaagcctcttggcactccatgaggcactgtgtgtaaatatcactctccccacttagctgagagggtaaaccgagccaggcaaaggcagggtggcttcagcctggggcagctcaggccttgttgaggctccatctcggaggagaagccggggtttggaagccttcccgcccctccaactatgattcctgtatcctcttccccaggcctttttggggataccacaaatagaaacagttttgtccccactggggacgggggtagagagggcagcagtgtgtgggctgtaatgcagaggtgaggggcatagggaagctcctcacgcccaaatatgccccttgattgcccgtccccaagccagagatgtgtgtgcctgcacctctcagagcagcagtaatggcaaagaccccagcatcacaaggaaatcggaaatgctgtttttagaggggacacagtggtcgtaattatatttttccttggaatctaaagtaaatgcttcttccaaaatgttaacaacagatgaaacacattaattgtctgtaaatttaaagccaaataaaaagtttaaaataagaaagaaagaaagaaagaaagagaagaatgaataagttttctagaaccacagggagaagcacttgccaatacttctaggagcaaagaaacgcccctgaatcctgctccatccctttctcggggtccttgtctccttggccagggcagggcagcagggggtccacagtcacttagggaggggtttaccgggtcgttgtaaactcccctctcacggtggccaatgcagtgaaggaatccaaaagatacactgggggaaagaaggaaagaggaaaatgtgtcctgagtttttaaatacggttgaagcaaaccccttacatttagggatgccagctatgtgtaccctgtagtgtcagcccgggacatgcaggcactgcactgtggcccacagtcccccctcccagggccaacactgccctctgcagtgactcacgcccgggatagtttaaataccgggacagcttaggcgagccacactcatgctgcagccttgagccgtccctcgtcctcctctcaggctccctcttgtccacggcgggcgggcgccgagctgctggtaagtaggcaagccacccccatccctcctctctgcttagagggcccggccagccccttcccatttctgctggacctgctcccctcggagaccccagaaggggcagagctgacatgt

SEQ ID NO: 31261 - DNA, 2300 bp, Homo sapien
acagctcgccttcccagtctgtcatgttggctccctggcaatttcatgggcaagggggcggggaggctttcactcgatgtgcctatgcatgacggacttaccaggtcaccagtgtagcagttcagggctctggagttgcattccttgatcggaactgaaagacctcccgcgatacctggcagaggcagtggctcttccctgtggtccagggctgcgtgactttgaaggtaatttcagtcaacccagcctttactgggctctgactgcattaggctgcatcaaaggggattggatcccatgattctttatatcttctgacattaagcctttgtcagctataggtgttacaaatatctttagtttgtggtttatcttttccccttttttatggtgtcttgaaggatagaagtcttttttttttttttttttttttttattgatcattcttgggtgtttctcgcagagggggatttggcagggtcataggacaacagtggagggaaggtcagcagataaacaagtgaacaaaggtctctggttttcctaggcagaggaccctgcggccttccgcagtgtttgtgtccctgggtacttgagattagggagtggtgatgactcttaacgagcatgctgccttcaagcatctgtttaacaaagcacatcttgcaccgcccttaatccatttaaccctgagtggacacagcacatgtttcagagagcacagggttggggataaggtcacagatcaacaggatcccaaggcagaagaatttttcttagtacagaacaaaatgaaaagtctcccatgtctacttctatccacacagacccggcaaccatccgatttctcaattttttccccacccttcccgcctttctattccacaaaactgccattgtcatcatggcccatccccaatgagccgctaggcacacctcccagacggggtcgtggccgggcagaggggctcctcacttcccagtaggggcggccgggcagaagcgccccccacctcccggatggggcggctggccgggcagaggggtcctcacttcccagtaggggcggccgggcagaggcgcccctcacctcccggatggggcggccggccgggcggggggctgacccccccacctccctcccggacagggcggctggccggaagtcttaatgcagacagcattatcagtgtgttcaaaagacacgtagacacgttttgcctatagacaaatgggcaaaaggaaacccagctttctcaaatgaagcacaagtgggccttaattatgtgaaaaggtgttcaagttcatcattaaacagggaaaggaaaagttaaaatcatgctgagatatctttcatagaaatggcaaaaagcaggaagtgccacgtgtgggcagagaggaagcacaggaactctcacaaatggcaggtgtcatcgtagaccaacacaaccactttggagagcagtttgactttccccagttaaactgaacatgtgagcggccgggcgtggtggctcatgcctgtaatcccagcagtttgggaggccgaggcgggcggattgcctgagctcaggagttcaagaccagccagggcaacacggtaaaaccccgtctctactaaaatacaaaaaattagctgggcgtgatggtgtgtgcctgtaatcccagctacttgtgaggccgaggcaggagaattgcttgaaccagggagcaggaggttgcagtgagccgagatcgcaccactgcaccccagcctgggcgacagagtccccctcccccaccaaaaaaacaacaagtgagcatcctgcaacctagcaatgccattgttgaacaagttcaaagatgttcttagccttattagtcccaaaaggaagaaaaaaatggaggatttgagaatgttcttagctttattgctaagcggagaaagaaaaacaacacataccaaaaaaaaaaaaaaaaaaaaaaaaaaaaaaaaaaaaaacctgggtgggaaattagggccatgtggcatgaaaaggaagacccaggggaagtgtggcccatctaggggtgtggctactgcagtgatccagctgtatcactgaacttccctggcatcatagagttatattgtgccatttatggaaaaactctccccactgctcttggctttgacagtaggaatcaggttatatatggtctctcggtttgaagatatttgtcattaaaaaccagaacaagggctctgagatagggtcctttcctgacctactctggtaaagtctttatcctcaggatgcaaggataccaccctcttcctg

SEQ ID NO: 31262 - DNA, 2300 bp, Homo sapien
ttcttaagatactctcttctgaaattttgtgatgctttgctgtcttttggccttttcttagctctgactctccagtctcattttccactttggctccactccctctgcccattccttaaatgttagggttccttacatttctgttcttattcctctggtcactcaatacattctggtgatatcccctagagtcatggcttcacctgtaatcaccatctatatgttaaaggctcccaacctttataccctgagcctacctcactactaagctttagacctgcaaatacactgatatattgactgttacttgggtgttccacccaacagatccctcaatttaaacattttaagaactaagctcatcatgttctccttcaaccctttttcttctctgtttcttggtaccactatttattcaagtcagaagtgtgcatgcttgtgtacatgcgtgtgtgtctatttatctgtgccttttcttcctctttccgtagccagccatttgttagattctttcagttttcttattataaacctttctgtctttacaactatcccattttttaggccttagaaattaatcagattttaaagtgaacacttagattgttttttcttaacttcatctttttttatgaagttgtctttataattgagttttgaccagtacttcgttattagattggtacctctttttttttttttttaaggcaggttcttctgtcacccacgctggagtacagtggcaggatctcggctcactgcagcctccacttcccaggctcaagtgattctcgtggctcagccttttgagtagctgggattataggcatgcaccacctcgcctggctaatttttgtatttttagtagagacgagattttgccatgttgcccaggctaggctcaaactcctagcctcaagtgatctgcccacctctgcctcccaagatgttgggatcacaggcatgagccactgtgcctggctggtacctcattctttaaagatgggtttttattttgaaaatagaaactgttagacattcatgatctagtagagcatgggcttttgaatctgagtgaacaggatttgactctaacctcagtcacttaatattttctttaaccttgagttacttaaactttgagttttatcatctgaaagggaatataatatataccgcggggcattgttgaggattaagtagataatgtatatgaaggtgtttggtacatcataggaattcaataaatttagaaattatgatacagtgctataatattgactacatacaacaattttaactttaaaatgtttttgcattacagatagtgtgtgtaccatatcagtggcgtgtaactatgctcatcattgttcttgtcaatgcctttgtgtctatcacagtggaggtaagcacttccatagtcaaatggctaccatgttgctttggaattcttgggtgatttaatggtaaatgggagaagagggcaggtaatataatggaaagccacagagtctcagtttcatctcaggcaaattcatttagccttctcttgtgaacttttccatgaattgatagtggtcatattaagggaggtgacttagttgcactcacacagataggagaaaataagcaatgtgataataaaaattaatgacgagtagaaaggagagaagtttggggcctcggtggcccatgaaactgatgaaccagtgattgtgaaatcagagttggcatgtgccacctgtgttttgtgatgtacagtaaaatctcccatttaagggaggggggaagggggagggccattctccaggaaacacagtgaatattaatagcaagagagtttaatgaaagtataaaataataatcgttatggacttacctaatttcagcattgattactggaacatcctccttggtatttgcttttgagtgacctctagaggtcttaagtaccctttgattcactgtatattgtgtagttaccctcccgttaggattgcctttaggttagcgtctctaaaaggaggtagcaagttctcattggtggcttattaataagcttttgtctgctctctgaactactatcataattgactcttacagtaactataaaaatggaagagagagatacagttgtgatttttaagttaagagtttcatagcacaggcttttggatcaaaataaaggtaatttttttgagaaatatatatgcatatattttagtgataatagctctggtcttagaaattacacttaatttcaattaccccctaaaagatgacttggtatttaaatttgg

SEQ ID NO: 31263 - DNA, 2300 bp, Homo sapien
attttcccccataaacactaattactgaattgcctacagttctttttttttcttttgagacggagtctcgctctgttgcccaggctggagtgcagtggcacgatgtcagttcaccatagcccccgcctcccgggttcaagcgattctccttcctcagcctcctgagtagctggaactacaggtgcacaccaccatgcctggctaatttttgtattttaggtagagacagggtttcactatgttggccaggctggtctcgaactcctgaccttgtgatctgcccgccttggcctcccaaagtactgggattacaggcgtgagccactgcacccggctgcctatagttgttaggtgtgtcatcttgagacatccttccatgacattggatagactgttccttgtgctgaggataccctgtccctccttgttaactttcctctctttctctactccctttcttctttactcttccaccgagacctctgtgtttccatttgaccttgtagaaacaggttttagcatttcccttatagcttaagcctttatatcttgaatattggactattcactaactagagggtaagatttccttgacctgtatcgttcatacggtgtgagagagttaggagacgagctgaagccagaaactggggcctgaaggaaagcggcttagtgcttttgacacattgtcttcacattgatacagctttgggctttgaaatacaatttcaggtttcaaggctttttcctgctgttaaaaccagcagtttcatttatattaattttctcaactattctctaatatccttaccacccattgttagaaattaggtgtttcaaagattttagatttcatagatacatacttcaagcaacttttattggaattttgtcagaaaaatcatttggttattccaagtctgaaattctagtctctgacctcagaccctcctccttccccattgagaaaaaaatttctatgatataattcaggtaggttgaggtgttttttgtttgttttctttttttgtttgtttcttttgagataggatctctctttgttgcttaggctagagtgcagtggaacaaacacttctcactgcagacttgaccacctgggccttaaatgatcctcactcctcaagccttccaagtagtgggactgcaggcacatgtcatcatgcccagctaattgttttttcattttttgtagagacggggtctcactatgctgcccaggctggcctcaaactcctaggttcaagcaatcctcctatttcagcctcccaaagtggtgggattacaggcatgagctacaatgcctgacctgagatttcttaagaacgtaactatcactgaacagacttcatctcttttatagtgctaaagcacgtactatttttgtgtgcatctctttggttgcatgtctgtttccccacccaagtgtcttgagagcagagatcatccctttttgtctttaacctcccagtgactagcatagtgcctgctgcattcttgatactcagttatttaaagaatagcatcttgataactatattagtaatattttcaaagacccatctctgggtcccaagtagatctcattgttggattgctaatggttcttgtgtcacattttcaggatcagtaattgttttatagaattgatctgagacttgataatgaatccacgaaaactgtattgaatgtgcttgtggcacagttttttctttttcacttaacatttaaattaggatatgttgtagagggcagtaaagaatagatttatgcttatttttggatactacacaaaatgaatattccttagtattagaattgtttagtgtacagtgacatacatttccaaatgattattatattgagatactgaactcttgaacacacacgtggtttattcagcatataaaatgttttcatttatagatattttaaactgcattataacttatagacatttttaattgtttagatatttcaagtttgtgtacataagttgcttactcaattgactaaaccattatgtgttaaaacttctttttctgcagagatgcaattgagaacaacatggattttatgggattaattataatgcagaacaaattaaagcaagaaacccctgcagtacttgaagatttgcataaagccaacattcgcaccgtcatggtcacaggttagactttataaaagaacacagaagcaaatggagtgtgacagagctgaagttatattatattgagggataatcagttataaaatcatattatatagtctatagtggt

SEQ ID NO: 31264 - DNA, 2300 bp, Homo sapien
gtcatttgtacctttactcatgaatatgttggatattggagatttaaaattctgagtagaccgaattctgcattatactcagctgtaatactagatactgtgctatagtgttggtcacatctcttgacctcactctggctactctttggaccttaggaaatggtttaaggttagggaagtggaaaggcggccttttcccacagaaaatgtggcatacagtatttggttccccatttgatgtgtaaaaagtgggaataaagaaagattttatatttttcttgaactgaggagatacaggctttaaaatgacttccctttggaaattcacaatcttgaggtagagcttgattttttttttgttttttttttgtttgtttgttttgagacagagccttgttctgtcacccaggatggagagcagtggtgcgatcttggctcactgcagcctccgctcccaggttcaagcagctcttatgcctcagcctcccgagtagctgggactacaggtgtgtgccaccatgcatggctaatttttgcattcttagtagagacggcttcaccacgttggccaggctggtcgtgaactcctgtcctcaggtgatccatccaccttggcctcccaaagtgttggaattacaggcgtgagccactgtgcctgtccaatatcttattttaatcgtgtgaattttttttttaattgtcctagttgatctggctagaaaatgatttatatgtaatacattttgaaactgttaagagtcgtgtcttaaaacacacaaacacatatctcgtatcttaaaacacacaaacaaatacatatctgacacacatgccttctttgaagcaagaaatgtgaatgctgcagagaattaattttaaaaagaatttggctgtttgtggttgtttgagagaaccaccacattactcattttcacatctcttttttgcccagctgtcttttctgttctgtgtgtgtgtgtgtgtgtgtgtgtgtgtgtgtgtgtgtgtgtgtgtaggggtggatcggggtaggccctcacatctcttctgtacagtgctttccactgttaccattagttcttagaggtgcagggactatagcaactacttaatcttttttgaaattatttgaaactgaacaatgcaactgtttctaaatataaacaaatattacctttgagccacaaatcactttctggaattattgtgggagataatatttgatacttctatgtgaggaaattggtagacaaaaaattaagccatgttgtccacatatacaactctcagtgattattgtaaacagtatggtagcatttaaaatatttaacaatttaatattttttggtgttcgatactgattcctgtgctttcgtttaataatttgtaaactgtttttgttgttgttgttgttttttaaaggagaaagtgttccagtgacaaagactaatttgccaaatccttcagtggatgtgaaaggaataggagatgaattatataatccagaaacacataaacgacatactttgttttgtgggacaactgttattcagactcgtttctacactggagaactcgtcaaagccatagttgttagaacaggtaggaaacatcttaattaatctctttttgcatgtttcagcatatttgatacctactaaatgtttaaaaagagattctgggctgggtgctgtggctaacgcctgtaatcccagcactttgggaagccgaggtgggcggatcatgaggtcaggagattgagaccatcctggctaacatggtgaaaccccgtctctaccaaaattacaaaaaaattagccgggcctggtggcgggcgcctgcagtcccagctactcgggaggctgaggcaggagaatggcgtgaacccaggaggcggagcttgcagtgagtcgagatcacaccactgtactccagcctgggtgacagagcgagactctgtctcaaaaaaaaaaaaagagagattctgttttgggagataattctcattttcttataaaaatatcaataattgtcttctttttttgaaaggatttagtacttccaaaggacagcttgttcgttccatattgtatcccaaaccaactgattttaaactctacagagatgcctacttgtttctactatgtcttgtggcagttgctggcattgggtttatctacactattattaatagcattttaaatgaggtatgtatgtgggactcttaatagggtttgaacctcaattatttatcatatgcagctattgaggatttgaaatgtggctactgagaatgagga

SEQ ID NO: 31265 - DNA, 2300 bp, Homo sapien
tgcatgaatatatgctccttctcccctccctttttgtttgttttgctggttgggaggttggggatagcaggtgctttgtagagtcaagactctaccacttgactgtctagagaccatagggatctgtagttgctgatcacagactggaatactggaaggtactgttttcagggctatcctgttaaagtgcttcttgttttgtcttgaactaaaacaatgaatactctgaatttctgactcgacattttataaagatggagtgatatgcatttattgaattaacttatttttttagcactctggcttttttcctgaggagtgggttcatattggctagtttctaacttctttttcctctttcagcaatatgttatgttgcatgacatggtggcaactcatagtaccgtaagagtttcagtttgtagagtaaatgaaggtaagtaattgaatgttggaagaataaatcaaaaaagatacctgttaggcataatgtgtgaagtaagcccaaagtataatacatatacattctttgattgattgattgattgagtcagtgtctctgtcacttaggctggagtgcaaaggcacaatctcagcttactgcagccttgacctcccagactcaagtaatcctcccactttaggctcccgagtagctgggactacaggtgcatgccaccatgcccagctaatttttctattttttttttttttagagacagggttttgccatgttgcccagtctggtctcagacttctgggctgaagtgatctgcccacctgggcctcccaaagtgttgggattacaggtttgagccactgcactgtgcacccggcctttttttttttttttttttttttaaagtcgatgtggtctcactgttgcacaggcctgagtgcagtggctcaacttaccctcctgtctcagcctcccaagtaggtgggactacaggcttgtgccaccattcctggctaattttttctctttttttgaagaggcgaggtctcactgtgttgcccatgctggtcttgaattcctgggctcaagagatcctcctgcctcagtctcccacagtcttgagattacaggcttgagccactctgcctcgcacatacattcatttttttaagaactaaaagtatacatttcagttcctgagtttgtatcaaattcatttatttatataaaattgtatttttcttctatgtagcaggcactatgctaggctctggggattcggtgtagagataacagtagtaacagtaacaatacagtgtgacaaatgctatgataaggagaagtcagccaacttatgtattaggggagctcatttactgtaggtatcagggatgacttctttgattaagtgcttgtaagtgatgactatttgaattagccaaataagaggtaggtgagaagttgataaggggaggctgagagaaggagagaagagggttctaaatacccaaaggcctagaaattagagattgtgtggacattataagaactgaaagaagaaatttagtatgacaaatacagcaactataaatgatggatagctctctgaagcatgttagggatttgggctcagtccaaaagacagtggaaagccattgaaggctattattattaatttattttattttattttattttttcgatagagtctccttcccaggctggagtgcagtggcaatcttggctcactgcaacctccgcctcccaggttcaaggaattcttgtgcctcagcctcctgagtagccgggattagaggcatgtgccaccacgcccagccagttttttgtatttttagtagaaacagggtgttaccatgttggccaggctggtctctaactctgggtctgaagtgatccacccgccttggccttccagagtgctgggattacaggcgtacacaccatcacacccagctaatttttgtgtttttagtagaaacagtgtcaaccttgttggccaggctggtttggtactcctggcctcaagtgatctgcccgccttggcctcccagagtgctgggattactggcatgagccaccatgcatagccaccattgaagggttttaagcagaggagtgataaaatacttgccctttggaaaaaaatcattctggcgtccacattcagactggtttagaggagagtaatactgaagacatgcccccccgaatcaaggtagcaattgcggagatgaaaagaaatgagttcaaaagatacttaaatgtgaccattgaacaggatttgactcattggatatgaggccatggagcagtgtctggc

SEQ ID NO: 31266 - DNA, 2300 bp, Homo sapien
tcaaaaaaaaaaaaaaaaatttaaagcaaccaaatagtgtcacttttcctacccaatcccctgaccaaagccaggcattgttgttctaacaaggctcaaaatctcaattatttcactctctgcctgatctaatggtaggataatgcaaatcaaagataccagcaaaagttatgttctacaacaatcattaataataggtttactacttcgaacaacttccaagcactgatttgccttaaaggggttgcaaaccaggatgagatgcccacacacattgatttttggcaactgtagtctattaagcaaagcaacaaacctctagagaaaataatgtcacatatattccagtgaaacaaaattaatacatgtaccttggtaaagaggctgagctctaaccaaagatagagcactgttcattacgtactcacccttcaaaggaatcaaatcgaaacactttcattttaacaacgatactttttaaaggctttattttgcaataatctttcaagtccctgcatttcttagattccttaaattctaacttcctgcctcatagatctaaagtagccatgacatacccaggtatgttctactcatttagttagaatcgtatagaggaacacaagtctgtttctaggtgtacgactccacacccattcattttgcactaatataaccactaaatatagctctaagacactgatgattaaaagcggctaattatgtgagtgattcatacctcctatgtccaaacaccaagattcagggatgtctgtcagatctatgggaagaggaaacaataaacacctgtcacaaagcttcttccacaccgggaagcccccagctgagttcctgccaatcccaacccgattccctcccccttcatccctacccctcacctccccaaaaaagccagaggtcatacttccaccagaacctgactctgtgaagggaatggagagacagaaaggccatagcgagagtggccacgagagcactgctagggcaaagggccctgggtttttctagtcctcactgccacagagtccgagtgggaggcctcaggcaagtcagaagtcacttttcctccacgggactcactccttttatctgtgaaatgcggagatggcaagcagctccatactccacggctgaggacgagctagggtcccgcacagactcatcgagggccctgccagcacccctacgcctctgcccacaggacctccacctcccacaggactttccgaaagctctgactaccaaccaccaagcgcccggcccccacgctcgcccccggcaggcggcgcgtcccccccaggccttcgcacccaccgcgtgggctcctgccctggcctcacctgcccccgacactccccgtccccgcgatgcccaactccggcccgagaaggctggccgcgacctcgcccggtacccgccgccccgacaccaccattcgcctcctcgacctcccccggcgccgctgcccacccgcccctcgccccgctcaccggggccgctcactggccgccgccgcgccgcctcctccgcggcctccctcgcggccggaccagccccagggaccgcgggggacccggccgccgctgtcgccgccgccgcctcgcctcagcccagccccatcgccctcggccggcgccgcgcgctgcggctcagggtgagggaaggaggcgccgcggcggggccgggccggccctgggacgtccgcgctctcctcctcctccgcgcccgcggcggcggcgtgcagccggcagggcgagaacaagggagggcggcgggaggtgggcaggggaggggggcggtctgcactccgaaacggcccccccgccgccagcgacgtagagaacccccctcccctccgcggcggcgcccgatcacgctgcggggagagccggcaggcaggcgggggagcgcgcgcgggctcaggactcccgcgccggatgtgaggtcacgtggtggcttcatccccgcgcggagggcggaggggcgcgggcgacgtcaggaggcggggaaggggcggggaggggcggggcgatttataggccccgcccacccatcgcctttgccaccctcgaacgggcaaaagaaagaaagaggcaggtaaggggaggcgaggccgtccaaaaacgctgggtgtcagcccggggtggctaatggagggcggcttttctggtgggatgaaatggaacggcaaatcccacttcatcccctttgggctatgacaacatcatagtccaatctcccattttatgaacagggaaactgaggctcagtgactagac

SEQ ID NO: 31267 - DNA, 2300 bp, Homo sapien
aaagtaactttgattaaagctatgagggaaatattcagatgaaattttgttaaggtgattcagtgagggactatattaacaggattccatatggagccttctcacggtctaatttgataattctgaattatggtaccctggggaatataaggtttcagtaaaggcacaactgaatcatggcctagagcctttattatgttattttgagccctttgtaaatatactgtttttaaaataatgatatttttgagatattagtcatgcatcctaaaaaataagccttttaaagtcagtttatggtatagtcactgagttgtgcaaccatcaccactatctaatttcagaatattttcattgctcccaaaagaaactctgtatccattagtagtcactgcctatttacccctttcccatgtttctgggatcatgtccattttaagttttgtgtatggtatgaggaatgagtccaattcactcttttgcatatggatattcagttgtttcgacatcatttgttaaaaagcttattctttttcccattgaattgtcttggcacccttgttgaaaatcagttgactagaaatgtaagggtttatttctggatcttcaattctattccattgatctacatgtctagctttgtgccagtaccacactgtcttgattactgcagctctgtagttaagttttaaatttggaagtgagtccttcaaattttttcttcgtttaaacaattgttttaggctgggcgcggtggctcatgcctataatgccagcactttgggaggccaggggagggggtggatcacctaaggtcaggagtttgagaccagccaggtcaacatggtgaaaccccatttccactaatacaaaagttagctgggtgtggtggcatgtgcctgtagtctcagcagctagggaggctgagacaggaaaatcacttgaacctgggaggcagaggttgcagtgagccgagattgcgccactgcactctgcctgggtggacagagtgaggctctgtctcaaaaacaaaacaaaacaaaacaaaaacaattgttttggctatttctgtcccttgtatctgcagataaattttagttttctttttttgcgatatctttttaaggggtttggtatcaggttagtactggccttatagaataagttgggaagtacttcgtcctttttttttgtaacggtttgtgaagaattggtaccaattttccttaaaattgtgtacatttatcagtggtcatctggtcctgggcttttctttgcaggaagttttttgattactaatttcatcaccttacttgtttagatcaatttagattttctatttcttcttgagtcagttttgatagtttgtacctttctagaaatgtatccattttagttatctaatttgtttgcataccactacttataatatttatcattcatttctataaagtcaataataattcctctctttatttttttttttttttaattagagagagaatctcactatgttgcttggcctggttttgaactcttgggttcaagtaatcctcctgccttggccttccaagtggctgggactgcaggcccatatgaccatgcccaccctcccaagtggctgggactacaggcctgtaccaccaatacctgttttgttttgtttttttgagacgaagtctcgctctgtcacccaggctgggtgcagtggcgtgatctcagctcactgcaatgtacgcctcctgagttcaagggattctcctgcctctgcctcctgagtagctgggattacaggcaggcaccaccatgcctggctaatttttgtatttttggtagagatggggtttcaccatgttggtcaggctagtctcgaactcctgacctcgtgatctgcctgccttagcctcccaaagtgctggaattacaggtgtgagccaccgcgcccagccaccaatacctttttattttttccctccttcccctccttcctttctttgtcactcaaaaacatctgaggtctctttaattttttttttttttttttgaggcggagtctcactctgtcgcccaggctggagtgcagtggcgcgatctcggctcactgcaagctctgcctcccgggttcacgccattctcctgtgtcagcctcctgagtagctgggactacaggcgcccgccaccatgcccggctaattttttttgtatttttagtagagacggggtttcaccatgttagccaggatagtttcaatttccggacctcgtgatccgcccgcctcggcctcccaaagtgctgggat

SEQ ID NO: 31268 - DNA, 2300 bp, Homo sapien
aagttgtagccataggaatgaaaaactcaccaatcagttgtggtcttcctgaggcaagtcagtcaccttcctactctggtatcttccatggctaccagctggccacagaaccaagcactgactcaccagcctccagtctggttccttttcagcctttttgccacccctacagcccatactacatcatccattctggccatctcagattcttccttgctagctcccacctttccctgcatccagtcctctgtactatttcatctatttgaacactcttttctccctgcatcctgggtctccattcaaatcttcctcttccctggaagtacagcttcagtggttaacatcacaaagcaaagctgacttcagcaaactttccaagacaaccagggaccaacacagttcagattaaaggggataaataaagtggctttaagatcacttgtagttcagaggtcacccaggggattaggatctatgcagagacctgcagagccacgctgcttccccaagggacccccttcatgctgctggaacttgccctacccctcaggagaaactgggctgctgtagctgcgtcacgcaggcggctgtgggccagcccggagcaaaactgtgttgcttggcatttctccacttcctctcgtggccgacgtcattctgtgactgtgcagggattcatgctcgccattgcactccacagtgagatacttgaattgatttaaaatttattcaccccagtgttcactcccaccttagccccattccatgcgcccttacccttactcatcgcagtatcaaaataactcccaaatgggattgctgtgcttgaacacctcccatcatgcctcttaccttctgcatgcatttagttagttcctgaagcatacagccccctcacctgcaagccccgcctcagcgcacacccttgccaggttggaggaagtcctggtacccggagcagtttgctttgtttttgcagtgtcagtgatctcacaagcacttggttggccacacagtcctatcgataacttccagcagataacccaagtgggtgactggggggtggaagccaggtctcggttcctgtgtgtgacccaaggccccccagcacagggcccaccctctcatctggctcagccaggtcttgcagaatgggctctgctgagatctaaccagacacatttgctatctgttaggtgagctcattcctggaacctagcaggtattccgttcatggctgactctcaagggaatgaagggaaaaggaagagcgggtctgagatcctttggattatctttacgaagcaaaagcttctgtgaactgtgatcttcagaacgaatgctgggcctatccaggtctgtccgcagtacccaaagtcgtagctccgtgatgagctatgatgtagcccagccacactcagtgacggctcctggttcctcacttgccagggcagcttcagttcctgccgcggtgtcagtgcagattgattcccgctgcgttactgaacgaactcctgaccctgggctctgagctgatgagctggctccagaaggtgttaatcatcatcactcaggtgtgctgtcctcacagagtcctggtgcacctgggatcccagtagctccacattttctttgctgccttcgaggttcacatcttcagggtcccactatggagaaaagatgcaaagggtagctgggtggaacggatagatgcttctcatctgtcataacccctgacccaaacaaaagctccaatcttggttctcatgatccaggcacagacaaggacaaaagggtaaggacaagttacccaggcctgtgtttctgggacctaaggaggcaagcataactttacatcaagcaactaatgaacaaccaccctaaacataacagcttcactttccttcccgccctcattctccactcttctctgcctctaccaagtccttatctagtgacactgagtcatgttctccttatcctgactccatgcctaactcattcctggaaaaaaccaggcaaacttaatccttttttatttttttaagacagggtcttgcggtgtcacccaggctagagtacagtggtgcaatcatagctcactgctgcctcaaactcctagactcaagcaatcctcctgcttcagcctcccgagtagctgggactacaggtgtgtaccacaatgcctggctaagtttttaatttttagtagagataaagtcttgcaatgttgcccaggctgatctcgaactcctggacctaagcagtcctcccgcctcagcctcccaaagtgctca

SEQ ID NO: 31269 - DNA, 2300 bp, Homo sapien
aagcatctactgtttgtctggcactgcagataaatagagctctctatttttttcagggtcggccccaggactgaccctgagaagggactgatttggaggacagtgggcgctgtcactgggttagcatgtgagcgaggacagagggcttccccgtgcagttcatcctgagcagcagcaagagcaaggccaagaggcaggaggcccaggcccagccccactctggccgtcagtgtcctctgtaacatggtggtgggtggttaggtcggggggccccaagcacctctagccatagcagtgctgcttcctgtgtgagataggaagggccgatgggaaagggcgtcgtctccaccctcagcctctgggcccagcgggccagggctcaccctcccagccggctgctccacggagaagcgtgggactgtgctgtctctcggttaagcagtcttcagggcgcaggccagacacagggaggcctggagacaaaactggaggggacgcagagggaaatgtgacactcttaaggattctttttgagaattaaacttaaaatggggcaaaattggccaaaacatgctttttctcctgaatttttcccattccctagccaaggcctatatatctgtaaatatggtcatgaaatgaacatatttaatgagtcatctaatgagtttatatgtgtattatgtatataaactaaattttatatgtattatatataaactgaattatatatataaactaaattatatataaacttaactatatataatttaatttatataaaactaaattatataaatataatttgtatatatatgaactcatctaatgaattataatttagtttatatataactcatctaatgagtttaatataaactatttacaatttttattcatatatatttaaatatataagtatgtaatcagaaatatatggtgtttgtgtatatacatattcatatatatagtgactttctgtatataaaggctgcttacatagaaatataaatagtgcatatttccttttattgaaccaatagttttattacatattctccagaaatgtcctcttggctttaaaatttccagaatatcatctctcatttttcggatcttccccatgtgacctgggtcagaatcggggtcccagggagagaagggccgggcctcagctcttctgatccggtctctgtgttaggctgttcttgcattgctctaaaggaatgcctcaggccgggtcactcataaggaaaccaggtgtaattggctcacggtttggcaggctcccaagcatgacgccagcatctgctgggcttctggggaggcctcagggaccttttactcatggcggaaggcaaagtgtgagcaggcagagagagagagagtgcaagagggtggaagggaaggtgccacacacacatttttgaacagccagatctcaggagaactcactcactgtcgtgaggacagcacccagggtatggtgccagaccattcatgagatatccaccccatgacccaaccacctcccaccaggccccacctccgacactggggattacgactcaacatgagatctggcggggacaaatgtccaaaccatcccagtctccctcacgttctcccagcggacattggcgagccgctgcccagcgtcaggtgctgggcactgagatggtgaggacccctgcccagccctcaggagctctctgactgtgtaaagagctgagtcatgatcaatcaaaggtactccgctggagggatgcgttagggcccagaaaagggagttgcttgctcgccttagggtggagttggtaaggggaggtttcccagagttaagttgaagccaggttctgagggatgagtaggagtttgacaggcagaagaagcaactcgagcaaaagctgtaagtctaacagaagcattgccctggaggactggctgcaggcagagggcttgccccgcaacctgctgtgccactgagggccctgggtcttgtgatctgctgcttctcccgcccagcccctccctctctctgcccagtgccgggggaagacatttccctccatccacctgtggacccggctcctgtcggccctggctggcctcctctatgcctcggccattgtggcccacgaccagcaccctgagtacctgctgcgggccacaccctggttcctgacctccctcggccgtgcggcactggacctcgctgtatccaccccaggcctggggagctccctgcttgcagccagaggaggcctgtgtctcgtcctctcactgcccctgccccaccc

SEQ ID NO: 31270 - DNA, 2300 bp, Homo sapien
cagttaccacagatcccagcaaggacactcctaggtatatacccaagagagcatgaaacctgtgtccacacaaaaacttgtgcacaaatgttcagagcagcattattcataatagcccaaaggtgaaagcaatccaaacatcccactaatgagtggataaacgaaatgtggtataaaaatacccataccatgtattatgatgagccataaacaggaatgaagtactgataacacgcagcaacatgaatgaaccttgaaaacatgctaagtgaaagtcacagaaaggtcatatagtggatgattccattgatgtggaatgtccaaaatgggcaaatccatagagacagaaggtagatttgcgattcctgggctgcgagtgttgaggggagtggacagtaactgccagtgggccgggttcttttcagatgggggtgatgaaaatgttctaaaagtagacagtgatgttggttgcacaacgctatggatacactaaaaactgctgaattgtacattttattttttgttttgttttgagatggagtcttgctctgtcgcccaggctggagtgcagtggcgccatctcagctcacagcaatctccgcctcccaggttcaagcagttctcctgcctcagtctcccgagtagctgggattacaggcgcctgccatcatgcctggctaatttttgtgtttttagtagagatggggtttcaccatgttggccagggtggtctcaaactcctgacctcaagtgatccacctgcctcggcctcccaaagtgctgggattacaggcgcgcaccaccatgcccggctaatttttgtatttttagtagagacagtgtttcaccatgttggccaggccggtcttgagctcctgacctcaagtgatccgcctgcctcagcctcccaaagtgcagggactacagttgtgagccaccgtgcctggccagaattgtacattttaaaagtactatgtaggctggatgtggtggctcacacctgtaatcccagcactttaagaggctgaggagggcagatcacgaggtcaggagtttaagaccagcctggccaacatggtgaaacaccgtctctactaaaaatacaaaaattactcgggtgtggtggcgggcacctgtagtcccagctacttgggaggcggaggcaggagaattgcttgaacctgggaggcggaggctgcagggagctgagatcgcaccattgcattccagcctgggcaacagagtgagactctgtctcaaaaaaaaaaaaaaaaaaaaagactatgcttatggcatataaataatatctaaataaagctgtagtttttgaaaattaaaaaagattttttttctttttttcaatcctgctccttctatagaaatattgttttcaagtcatgtcttgctttaaacaaacctactaaaatcaataaggagatttaaaaattacaataatagtttactctcaagaaaaacagccctgtgtacttgaactgtgcggtgtgtggctggacaggaggcggccggttgcagagataaccagctcttggctgcggggccgtgggctaggatgacatccaggagcagggcttgggcgactgcctgggggcggagggtgccgttggcagcttcagaaaggagagtgagaggcagatgtgggggtatttgttctccggcacgtttgtttcctccttcctggtcttgcaccccaccctttttactgcgccctgtcggcgatcaggaccacgcccccttcacctcgggatcccagcacccatgcgcttcagcagcgcaactaattgctgttggctcaggaaatgtggacaatacgcaggaagggacgccgtgccttacagcgaccggcagggactcggccgtccgcgagcccagccgcccgccccgctccggccaggatgttggaggtgggtgaccgcgaagaggtcggcggggggcgggggccgcagtctttgtgcgcgcgcagctcccggctcccgccgctggggggcggcctccgccctgccgacccccgacaatagcgcgaggggtggggagcgcgcggtcccggaaacttttccccggcgccttcgccgccgccgcccgcgcccgggagcgcgcccttctctgcccgcggtcggtgcgctcggccggaggcgccgcggcggaacggaacccagagaagggcacgcggggcggcggcgctcggggcttgcccgcggcgagggaggctgcgcccaggtccccggccccgcgccgcgcgcccagccgcgccatgggggaggcgcccagccccgcgcccgcgc

SEQ ID NO: 31271 - DNA, 2300 bp, Homo sapien
taatagccaaaaccacaattacttttgcaccaatctaataccatcaaattagtgattagatttcatttctcctgagaggttataactttgttttgttttgagagaccggggtctccctatgttgtctaggctggtctccaactcctgggctccactgatcctcccaccttggcctcccagagtgctgggattacaggcatgagccaccttaccaagccaaatcataactttgaaaacacagtgaaccactaaaatagtgtagccactttggaaaatagtctggcaattcctcaaaacattaaacacagttaccacagatcccagcaaggacactcctaggtatatacccaagagagcatgaaacctgtgtccacacaaaaacttgtgcacaaatgttcagagcagcattattcataatagcccaaaggtgaaagcaatccaaacatcccactaatgagtggataaacgaaatgtggtataaaaatacccataccatgtattatgatgagccataaacaggaatgaagtactgataacacgcagcaacatgaatgaaccttgaaaacatgctaagtgaaagtcacagaaaggtcatatagtggatgattccattgatgtggaatgtccaaaatgggcaaatccatagagacagaaggtagatttgcgattcctgggctgcgagtgttgaggggagtggacagtaactgccagtgggccgggttcttttcagatgggggtgatgaaaatgttctaaaagtagacagtgatgttggttgcacaacgctatggatacactaaaaactgctgaattgtacattttattttttgttttgttttgagatggagtcttgctctgtcgcccaggctggagtgcagtggcgccatctcagctcacagcaatctccgcctcccaggttcaagcagttctcctgcctcagtctcccgagtagctgggattacaggcgcctgccatcatgcctggctaatttttgtgtttttagtagagatggggtttcaccatgttggccagggtggtctcaaactcctgacctcaagtgatccacctgcctcggcctcccaaagtgctgggattacaggcgcgcaccaccatgcccggctaatttttgtatttttagtagagacagtgtttcaccatgttggccaggccggtcttgagctcctgacctcaagtgatccgcctgcctcagcctcccaaagtgcagggactacagttgtgagccaccgtgcctggccagaattgtacattttaaaagtactatgtaggctggatgtggtggctcacacctgtaatcccagcactttaagaggctgaggagggcagatcacgaggtcaggagtttaagaccagcctggccaacatggtgaaacaccgtctctactaaaaatacaaaaattactcgggtgtggtggcgggcacctgtagtcccagctacttgggaggcggaggcaggagaattgcttgaacctgggaggcggaggctgcagggagctgagatcgcaccattgcattccagcctgggcaacagagtgagactctgtctcaaaaaaaaaaaaaaaaaaaaagactatgcttatggcatataaataatatctaaataaagctgtagtttttgaaaattaaaaaagattttttttctttttttcaatcctgctccttctatagaaatattgttttcaagtcatgtcttgctttaaacaaacctactaaaatcaataaggagatttaaaaattacaataatagtttactctcaagaaaaacagccctgtgtacttgaactgtgcggtgtgtggctggacaggaggcggccggttgcagagataaccagctcttggctgcggggccgtgggctaggatgacatccaggagcagggcttgggcgactgcctgggggcggagggtgccgttggcagcttcagaaaggagagtgagaggcagatgtgggggtatttgttctccggcacgtttgtttcctccttcctggtcttgcaccccaccctttttactgcgccctgtcggcgatcaggaccacgcccccttcacctcgggatcccagcacccatgcgcttcagcagcgcaactaattgctgttggctcaggaaatgtggacaatacgcaggaagggacgccgtgccttacagcgaccggcagggactcggccgtccgcgagcccagccgcccgccccgctccggccaggatgttggaggtgggtgaccgcgaagaggtcggcggggggcgggggccgcagtctttgtgcgcgcgcagctcccggctcccgc

SEQ ID NO: 31272 - DNA, 2300 bp, Homo sapien
tgagatggtgagtttctttatctcacctcctagtattattattaaaatgtgaaatcttacttcatgagttagtttgacctttaaccacttagctctggagagaatgccgggagctgtctgctaattctatttcgtgggtcttcttcatatcttacttctggagattatgtgtaggattttaaagatacactgtttctaaattgagaaatgggagaaatgatgttctgatgcattcctttgctcatctgtgagcactgccttctcaaagcgttgccaactgcttcacagcttgccagcagtcccttgggcatttcccaaaactcacttcaattcagtaagaggggtaaggtgcagcacacagaaaccctggcagggaattcagaatgggtgggagtctggacccagtttcgcctgatgctaacttgctatgactgacctttagccagtccacttctgtgtcttcatttgcaccaggaaagagtggactacgcttgctactcaaagtgtgacccaaggaccagtactatgggtatcacctggaagcttgttagagccacaggcctcaccccagagcttatgaatcagaatctgcatgttaacaagattcccaggggatttatatgcacattaaagtgtgaaaagccctaggttaaacagattcttgatcctatttatttctttttggctgttgttttaattgacaactaaaaattgtttattacttacgttgtaccgcataatgttttgatatatgtgtacattgtggaatggctaaatcaagctatgctaggtaatatatgcattacctcgatcctatgatttaaaaatacatgtttggccaggcgcagtggctcatacctgtaatcctagcactttgggaggccgaggcgggcgatcacctgaggtcaggagttcgagaccagcctggccaaaatagtcaaaccctgtctctactaaaaatacaaaaattagctgggtgcggtggcacgtgtctgtaattcccgctactcgggaggctaaggcaggagaatcacttgaacccgggaagcagaggttgcagtgagccgagatcatgcctttgcactccacctgggggacagcgagactctgtctcaaaagataaaaataaataaataatacatgttaacaaccctcattccccactctccccaggggtgtacaggctagtgacaagacttgggtttattcctgacactgcacgcactcaatctacgacttgctcaagctgcttcctctctccaagcatcaaaacaaagagatggttctctggatcaatgagaatgtagttcaccagccactctaagctgactttctattattcccattatagggaaatcaaacattcaagtgaggaacaaaagcccaggcctctaggagtggagctggctcactgttttcactttcattttaattatttttaaaaagggtaatgaaaatataattagaactgtttaaacattttttttttctttgaaataaagcgtaagtcacttcctgttggcttttcctacaaccttgccaagctctggaaatactattcagcctctcattccaaattcacatccaggcgaagacttttctccccagttcgcagctggggtcggctagataaacaaaaagttagttgctgtgctggacctcggagagaccacacctcgggacgccagcagaaaaccagcgctgggaaacgcccccgtcccagcgccaccgaaacactcttcctccgagtctccgcgtcctcctgacggaagcagcggaaggcggagctagtgccgcgaataggaaccgccatgtttccgacgtgctctagtttctcgccggacgctaaagaccgacgcacaaattaagaatggaccattcttttaactcagtcatttatccaaactcgagacattcgccaggaaatctatcgaaaatttcccagaaccattttttcacttatattctataatactggtaaaatcgagacgtaaaaggagaacttgagaacaagtcattctgctttcccctctcaagtttgagcctgaactacttgggctcgcttatcgtcacttccggggatcgaactgtgaatcccggaaactgcacgcgccgagccgggaagcttcgtccagcggtcgtgttgccatgggccggaggagagccccggccggtgggtcgctgggacgggcccttatgcgccatcagactcagcggagccgaagccatcgtcacactgactcctgggtaagacagaccatgtcatctttcttatcttttctgtctagcctgagtgctgc

SEQ ID NO: 31273 - DNA, 2300 bp, Homo sapien
aattactacatgtgtatgcattttctttctttctttctttctttttttttgagacggtctcactgtgtcatccaggctggagtgcagtggcgcgatctcggcttactgcaacctccgcctcccgggttcaagggattctcctgcctcaacttcccaagtagctggaattacaggcgtgcaccaccatgcccagctaatttttgtatttttagtagagatagagttttgccatgttggccaggctggtcttgaactcctgacctcaagtgatccacccgcctcagcctcccaaaatgctgggattacaggcgtgagccaccgcgcctggccttatgcatgcattttcatgcttctgtaattttgctaccctctatacccataaagcccttcagtcttttcctatttggataaattctgtttatctttcaaaggtcaccacctccatgaagccttttctgattttcctagtcacaatgaatgctttcttcctccagcttctcatagtgctttgagtctttctcatagcatttagcccactctgtcttcttgtccacatgcatatcttgctcattaattctagttactgagtgcctatttgtaccatattggggatacagggtacttgcagagaacccacagtccagtggaaacccagagttgggtagagtttacaaccttcattggactaggaggcaggaatcccgtctgctcctagctcagggccgggcaccaaaaggtagtcagaaaagtaacttaaatggaaactcagcaaagtaacttaaatggaaactcagcatcaacgactctgagaaaattgagttagatttcaaaggaaggttaaaagttggcaaaggtagagggtgggcaggggtcagttttattttgttggaatatcccaagggaatttccaggtatggttgcagtgactctggcatgaagacctggcgtggaagccagagacatcaaagatccccaggggactgggatggtgggaagggatcactgtcctcctccaggaccaggctgggagtttgatgcaggatcattcggacattgatcccactccagccatacgtctttttgctttgactgaccataccatagaggcaagcaggctgtttcaagggcccagaaatgagttactggctaagggtcaagccggtcagaagacaactacactgtccagttggcacatgataaaagcaatactgatgcaattatcactcccattggagggtggcctggcattatttgtcacttaaataaaaaacgtcatttgaatttttactaggaattctcatccaaaatatgtcaatgatagaatgaaaccgcatgaccggcttgccaaagtaaactaagtcctaacgacacacgagcattagaaattgtgtgtatctcagaaaactgctctaccctgaggcctgacagcaggagggggtcttgccggggttcggacggggaaaagccttattcattgacggtattctacagtagtcaccccaatcatgttaccactcacctcactttacactgtctgctgcttacctgtgaatacgagctcaagatagtgagagataagccttggtgttttctgtgcctctctcttttctttaatggaatacaattctgaaaataatattaaacagcacccagtcattctcagaaagccgtcacacaaggaagaaaccactattttcccaaactttttgtacaggaaattataatctgtaatctcatcttctgccacctccctcagaagtttcgatctagacatacatgtattcagtgagtggcaattcagcctggggggtggagtgtcaggattcaaatctttttgctgcggggtaaccccaggtcccagtgatttccatagacaaaagagatgctggtaaatttgggatgtaattggaggattggaccggtctccccgctccctcgaccaatggctgtcacgcggtccctttaagaaaccaggaatccgcccggagtcggagcccaaaacagatcctcttctctgctcctcccctgtccccgcgcggcgaatggttcgcgccggcctatatttacccgagatcttcctcccggacggcaaggatgtgaggcaggcgagccggacgccgctcgcagcaccggagagggcgcactgcaaaggcgggcagcagaccgtggagagcccgggagcggagctggacaccgcctcggagggaagaaatgaggtagcggcggttcccggacccggccatgcccgtcccctgttctcggagcccagcgccgtctcggccaggccagcccggacactg

SEQ ID NO: 31274 - DNA, 2300 bp, Homo sapien
gtggagatgggcagtggtgggagtggggaggaatgcttagcagggaagaggataatgcccatgagcccagagggaggagtgggatttgtgactgcggaaggcatttaggctacaggaatcacatgagtcccctggggtcaagtgcgcgcgcacgtgtgtgtgtgtgtgtgtgtgtgtttgtgtgtgtgtgtttgtgtgtgtgtgtggtgtgtgtgtttgtgtgtgtgtgtgtgtgcgcgcacgtgtgtgtgtttgtgtgtggtgtgtgtttgtgtgtgtgtgtgtgtgtgtgtttgtgtgtggtgtgtgtttgtgtgtgtgtctgtgtgtgtgtttgtgtgtgtgtgtttgtgtgtgtgtctgtgtgtgtgtttgtgtgtgtgtggtgtgtgtgtgtgtgtgtgtgtgtgtgtgtgtgtgtgaagatgagatataggcaagggtctgtcattaagagcttgtatatccaacaactttgaccttcccgttgaaaaccgtgggtttgaaggattttgaggacagagggcctggtgccctgaggcgatggtataggaacttcctgctgtgtggtgtggaggaaggatgggggtgaggaggatctgaaggcagacagaaggtgaaagaggctcttgcaatagtccaggtgggatgaaggcctgggctgagggagagatgctgggaatgcagaaagggcaggttccagggatatttcaaagtaatcacgaggacagtgagaaagaaggagtcagaaacacagggctgtgccggagcagctggtattggcttgggagactgatcgtgcatatctttttccaattctgctttcagggatgcaatgctggtagctttaaaccagctacggtagaagtattaacaccacagaagtcaagagaggccttttctctgcagagagctgattgttaaacattgaccagcacacgtctgctgacacacctgcggcttctcctgctgtgggtggtcctgagggcagtgttagctggagctgcctgaggaagcttcagaggcaggtgagatgggctttgggcaagggatagttgtggtagctgtggggtaagggaaggcatttctggtgaacctaacggtgtgagcagaggcccccctactttgggggtatcttggcacagagcagggaacttaagtgatactcagtgacgatcgtggtctattgttacctaaattaggtctttacgtgttggtagattggatgcacaaatgaaatgttccttaaatcctgacaggtacatggtgccggtttgccaagaaccagcctatgtgtgccaggagttcagctttacagagagtgttccctgaacccagctgccatggttcattattcactttaagggtgactcagaaatcagcttagattattatttagcgggagaggaaactgaatcgcagagagtgcttccgagactttcttaagaccacagccagttaaaccttcatcaggattaggactttggagtgagaacttgtattagttatccacagctacataaaacacttctcccacattaaaaaaaaaatagttaaaaaactgctttttttttctttttcttttttttttttttttgagaccaagtctcactcagttgcccaggctggagtgcaatggtgcaatctcagctcactgaaacctccacctcccgggttcaagcaattctcccacctcagcctcctgagtagctgggattacaggcacctgccctcatgcctggctaatttttgtatttttgtacagatggggtttcactatgttggccaggctggtctcgaactcctgacctcaggtgatccgcccgtctcggcctcccaaagtgctgagattacaggtgtgagccaccgtgcccagccttgttttgtttttaactatgttgcccaggttggccttgaactcctggactcaagcctcctgagtggctgtgaggacaagcacgtgccaccaagctcggcttttaaaaatcattttaagtggcttacaacaataatacacatttattatctcacaattcctgtgagtcagggatgcaggagtgatttaactgggtgaatttgacttggggtctctcatgaatttgcagtcaagatgtcagcttgggctgcagtcatctgcatggggctggaggatctgtttccaaggggccccactcacaaggctgacaaattagcactggttgcattggttgtgggcagaaggctttagttcttcacgggctgttggcaggtggctttggatcctcaccaggagggactctgtatggggctgcttgtgcatc

SEQ ID NO: 31275 - DNA, 2300 bp, Homo sapien
cagtctgctgtgcactggggggttggaaggtcgaggccactggtgacagaggggaagctcctgagaggtttacttaaaagtaaatgagggatgttgtttggcctttgcccattttgaccaaccagcttattgtttttttcttgcaacaacaaaatacacacatagctatagacacattttaattatagaaaggattgcagggaaaatacctttattattgtgagtctaaaattctttagcctttaactcacttttttcccgttgaaataattgtttttttaatgtggtgtttgaaacacctatgtttttagaagttgaaatacagcagaatagatgctctttttatacatacgtgtgtgtgtaggtatgtatctatacacacgtgtgtacactgatatacatacacatatatgtaattttaaaaataggatcgtattaaacatatgatcttacattttgcattctttatttaatagcacattctaagtatttcctgaggcattacatattcttcgaataatgcctcaagtattctgttatatggatgaagcatattattcatctacctattccattcttttttttttttttttttttttttttttaaagacagacagagtcttgcccggtcccccaggctggagtgtagtgtcgtgatctcagctcactgcagcctctgcctcctgggtttgagtgatcctcccagctcagcctcctgaatagctgggcgtgcaccaccatgcccagctaatttttgtatagttgtagacactgggccttgccatgttgcccaggctggtcttgaactcctgggctcaagagatctgccggcctcagcctctgaaagtgctgggattacatgtgtgagccaccgcgcctggcccctctttttcacattttaagttgcttccaattttcttctactataaaaaatgtgataaacatatagtatatgactctgtccacatctctcacattttcttacagtcgactttagacataatgaccttcatgaagttttcataaacattatcaatagcgtaataaatcccccaatacaatggctggtgcacagcaggcattcaagaattgttacctataaataggaaatcaagtaggtgagagaacagaccaattctgtcacagcagagggctgggaaagatatctgctccacctcttcagggcaggatgtaactgggcagtctagggtaagagggatgagaagaaatggggatgcttttgctccccagtgcaggtggacctgccaatacctagaatgaaatgattccttgctttgaaccaaacatgccaatactaccctctctgacaccctctcagatgtgccctctccttggtccttaggatctcctgtaagcactcatcttcatcaggggaggtggggattccaatggcattgagtacacacttgattcagagccttcatgcagctgaaactgtgatcagagaacaaacaacatgaatcaccatgttctcaaagatgatttattggctatcctcactcatgggaaaaagaaaaacgtaaatgaaatcaaaacaaaacaagatgaaaattgatacaaatggacccctggggctttcacgtctgcagcctacgtacaggaggccccatcaaaagaaatgacgctttaatttctgctaaggtctacggtctaacgtggtatgataaggggattttttaaacaaagaaactagaatgcttactagcccatgagtgacatgtcttccaagcccacatggtcacacttgggaattgctgggttcctttttggttttttttttttttttgagatggacgtctcactctgtcgtccaggctggagtgcagtggtgtgatcacagctcagtgcagtgaactcctggactcaagccaccctcccacttcagcctcccaagtagccgggacaacaagcacaagccaccacacctggctaatttttaaaatattttgtagcgatgggggcctccctgtgtttcccaggctgatctcgacctccgaggctcaatcgatacccccacctcggtctcccaaagtgttgggattacaggcttgacgactgtgcccggcctgggctttttggaatgagtcttcctggtcccgacagttctcctgcatgtccttgtggtggccagtctctgttctttgatgacgaatttgctttctgagtagagtctggtcacctggagctggtttggtggaataaaggacaatggggttctaggatgtagctgggagatacaagctgtgagtactctaataatgagataagttttcttatgc

SEQ ID NO: 31276 - DNA, 2300 bp, Homo sapien
aagcagctgacaagcacctagaacattgccgtttagtatgagggactctacctgagatctggcttactgcgtaaccaccctggccctctgtctctttgtctgtaaaatgagggctgtggtctagacccacacttctcgaggtgagttccatggaacaccaatcccagaatgtgtcctggaagaaaagggtgtaatgatcaagtaagtttgagaaatacgtacattttattccccctcttctagattcacggagcacactaaaggctcctagaagtcctgaagtacacagtcctgtctagctttgttgagcgttagcttttttaagctttttgacccagatccctttgttcacatgatacctgttttcctgaggcattaggacccttggaatttgctgcaaaggtctttgaagggccttctgctctgtgtgctggaattagggttctggtgatgtcctgggcgggggacagaagttgatatggggcagtggcccagaccctgtagcatctggtgcccccctttgtgattatcgtgcccgcgtctgaggagatggctggctgtgaatttcctgcagtgggctccggagacatttaagatgctcactggtggtggcactgccttggaatccgcaatcattcttaattggtctcagaaccatcagctggcgaaagcatctgtcaggggaaacttgagcagcgttcagagtcccattaataattcagctgacgagctccttcagacgcaggccttgcagccctcaggactcactcgtcttctgcctgcagagatattccagggaggccttctctgttatatcaccgacgttagtgactcaggcagtagcacctccgtgttctcccagaatccccaaagcctcatcagtcaggagagggaagattggtacagattaagccctctgtaattccgtcagccggccaggagaggggggcttgctgacggggaggctctggggagtggatgctgatggcggggtttaggcagccccttatgctgtgctggggggatttgtccactatgatggataggtggtgggcccctccacttcttccactgcctgtagccattcaggaaaaaaatgtagggtttttttttttggtaaattagaggcttgcacattgaagatacctaaaaatattggttgaatgagttctagctgattagatctggttgtcattcccatttagtagaatgatagaatgacattgccgaatgggaacatggagatcatctcctccagctccttcatttttcagtgtaggaaagtgagatcagagaacagtgactttgtcaaggtcaccaagctggttcgttgcagaaccaggccagtgcccgggctcctggcttatagcacctggtcctttccagctggccacaccctgtctctgagcacagagggctcagtgtccttcttggagggctgcaaacagccccaggcacagtgatgtggagatagcagatgctcttcccactctgctgctgagccaccaaggggagcgtgtcgcccccgctgtcacactgatggggtggtgaggggagtttgttacgtgccgtcaataatgtgaaaccaaaaaagctggaaacttccttctttctctcagcttcctggctaatttgtggtgctggggctggcagtcgcctcccccttcctgtggagtcgaaggaccttgggactcatcccttctcacctgtttgtgggctctcctaggacccagctctggggtgctcaggcatggggtactttccagctggacttctcagctagacactgagctgctgtactgatactgagtactgagtactactactacagtactaccaagtagtactactcagtactgctgtactactactcagtactacattccagctagacactgagctggtgttccaccttcgtctggaggatggggagatatcagagccttacttttcccatctgcgtttttaacctcagcccttttagactactgaggggtgcaatggactgaataattgtatccccccaaaattcatgtgttgaaatcctaacccccagtgtgatggtatcaggaggtggggcctttggagagtgattaggtcatcatgaatgggatgagtgtcctgatgaaagagaccctgaagagctctgtcaccccttcaccatatgaggagactggggaaaggcagccatctgtgaactgggcagtgagtcctcaccagacacagaatcagtgggcacgttggtcttggacttcccagcctctagaactgtaagaacttgacttctgtggtttatgggc

SEQ ID NO: 31277 - DNA, 2300 bp, Homo sapien
aacttcagccagtgttgtgggttagagggcccaggtccgtggagaggttatcaccagcacttcactcactcagcaaagatttattcagtttcacctgtgagccagatcttgcctaggtgctaaggacatgggggttagaaaaacagatggggtcggtctctgtcctcatggaatgtacagtgaagatagacattaagcagataatgggaacagctgcaataagggcaacgaaggggaagtccaggtgctgcccgagtgggggattcagggtgtgtggggggggattgttactaaagacttcctccagacagtgacatttaaggtgagacaagtgggtgggacttagccaggccaagacacggaggaagaagagtgaggccgagagcatattgagtggaaaagctttgtgggtggaaggagcttgatgtgccccagaagctgaagccttagctgcctggagcacaccccggtcaggctattcagggccttgaaagctgtgcgagggattggggactttatcctggggacagtgggatttgcaaccactggtggcattttaaccaatggagtaatatggtttgcattttcatccagtgacttaagtacttttgcatgcgttcttctgtgggatggacctgaaagaatggtctggacttgaggatccctggagagcacagtgaagctcaacgaagagttccagttgttgggttgtggtgagggaaccagcaatggaaggttttgaagaggggaatgacatgtctgggagcagctctgtggtggctttcaaaagttctggggaaacttgatcatgtagcagaaggcagctgaggaggcggtccaggcacttaggagcacagtggcctggacttcttaggtgagaggggaggttgagagctcgtggtaggtgttgcagggaccctagagccagaaagctgtggactggtcttcagagcttgagggccaagggagcaggaagccttcacaggaaaagaaaggtctgagtgaaagtgactgaagagaggtgggaaagggaagggagaggcctctggtcttgttgtgcaaggagagggagtgtccaggtatgtagatggggtgtgagcctcttttagagaagtaagggttgggctcacttgcaagcactcaggaaggaccggaaggaagaaagtgaagatgccgtccccattgtgtccctcagcgcccagagggtgtgtcgacctgctcctcaggccaggccagcccaacacctgtgactaacatgacctcagagtctaaaataatgtgtgccacagctctgaagtcagaaggctgatttttataaatcagcacaaattgaccttattacccatggtccttcagtgacctcagaaatcaaagtgaaaaaaaaaaaaaaaaaaacccagccctaaacctctctggaccaaagttttgctcctgaagcaggaccccaaaatactagtggcctattttctgctgaagtctctctgtcctcatggttctggagaatgtcctttcagtatctttattcctcccccatttcactgcagatgtgctccaagtttcatgttccagcaatcagatgaccacgatggaatattccctgagctggtgtttccagtctttagtctaagttctaagacactgagcattccaaaacccctactgttctgtttcccagaacagacctttcttccctattctccagcaccctctgttccttcccctttcctttccttttctttttcttttttccttccttccttccttccttccttccttccttccttccttccttccttccttccttccttccttcttccttctttccttccttttttctttaatgggagtgaggtcatttgtggagctgtcactgctctgcaagagggcaggcatgaggggtgccaggccctcctgacttctaccttctgatttgtatggtttgtaaaatgagctgtataaatgcccaacatttgatcaaacgaaactgaaaggatgattgatgatgcggggatcaaacttaccatttgaatgtagaccattttattggtaaagatgaatgagaatgatttggcctgaaagggaacttcagatttttttcctaattgaagtagtcacttctttcagaatgctaagttccctggaatattttcccagcctactgtgtctatgatagactcaaatattggaagttttaccggctgtgtgtggggtggggaaggaattctgttggttctccggtgagtcctgaagagaccttgtttctgggtaagtagacctaatcagggagacttaaatgtttc

SEQ ID NO: 31278 - DNA, 2300 bp, Homo sapien
ttccacctgcagtttgttgaaaacatcacttttaatgactgcattattttagctttaaccactttattgatgaccatttgattctgattttttgccatcatgaacctagctttgctttatttttatgtttgttttttgagacagggtctcgctctctttcgccaggctagagtacagaggcacaatctcggctcactgcatcctctgcctcctaggttcaagcgattctcttgcctcagcctctcgagtagctggaattgcaggtgtccgccaccacactgcctactttttttttttttttgagacagggttttgctcttgtcgcccaggctggagtgcagtgttatgatctcggctcactgcatcctctgcctcctaggttcaagcgattctcttgcctcagcctctcgagtagctggaattgcaggtgtccgccaccacactgcctactttttttttttttttgagacagagttttgctcttgtcgcccaggctggagtgcagtgttatgatctcggctcactgcaacctccacctcccaggttcaagcgattcttctgcctcagcctcctgagtagctgggattacaggcgcccgccaccatgtctggctaattttttgtatttttagtagagacggggtttcgccatgttgggcaggctggtctcgaactcctggcctaaggtgatctgccctcctcggcctcccaaagtgctaggattacaggcgtgagccaccattcccggcctaagccaccatgcttggccttgctttattcttatggttaaatattttgaacattcttaaattattaggaagattttctagaaataaaaatgctgtttcaatggttgagtatatttttgagactcatccaatgtggtaggcaccgtgttaggtactgggtatattgtggttaataaaaaacaaatgtatattctgttctcttggagtcacgtgttcttgcaatgaagaaagatgagactagggtagtacatatatttaggtggccctcacagaattattgaggatggcacttagcccagacactggataggaggtatttagagatcatttgtgtaggtagtgacatgtaagccaaggtctgaagcagagaggttggataatccatgcaaccttacaatgtggaaataacaggaaaaaccgtttacctaatctctggtcagaaatcagagaacttggccaaagaactgaagggttactgtacttactcaagttctttgtctatttagacagcatgcacagcacttgcacgtgtttacttaaaaactactggtatagcctcaattcttagaagactgaagttagtacgtttttatctagttagcagtgtgcaactgcctagggtcaaaattgctactggctagctgtgtgactttgggcacgtgacctcggcgtgcaaaactccctggtaccctcaaggaggctcttgataaagtgttaaaagtctgtttataaaacaaaagtggatgaatgtcgccctccagggctttgcggtgctggggctcggggagcagcctcgcaggttcgtgcgggcggcgggggccccctgctggccacatcctccagcctccctccgctcggcctccggcgcgacgtgcggcccgggccatttcctcccagggcgggggaaaagggaggagctgccggtttaaattgcctagctgcagctcgtgtgcagggagaggccgagacggcttaaagcctccaagaaattgagggaaaaaaggtgcagagattaaagttttacctcttggtgcctccagcttcgcttttggctaacctaagttcctctgttcgggcgcctccattcccttcaacactcagcttggatatcctctggggctcgccgcgtagggcgccatttctcagccgggacagcgggccagccctcagcacgctggagtccggaatccccccctcccaacgccgggcgccggatcccaccctaacccctcctctaatacccttggaacctaggacccagcggtttcggcacgcccggccccgcccctccgcgcaccggcgcccgcgattggctccaggcggcgcggccccgcccctttcatggccgccgcctggcgccggggctaagtggccgccggcgtccgggtacccgagggctctcccgcgttgctggcaccgctggcgccgcggtctcgtagcgcatgggcctcctccgaggcgggctcccatgcgctcgggccatggcgcgcctgggcgctgtgcgctcccactactgcgccctgctgctggccgcggcgctggccgtctgcgc

SEQ ID NO: 31279 - DNA, 2300 bp, Homo sapien
ctcagattgctgggtttgataaactaaaagccagattattttaatggcaaataaaacacaattacattagtacatgtattacctgtttatagactttatttatgacatttatattatataatgtcatctaaaacactattttatttatttttaggttacgtttagcaagaatgaatgaagagatgcgggaatcagaaggactttatggacagccaggtcaatattctactaataaccatactgaaatgcagtataagaaatgcattcaggaatttatcagtttacaactggaagattcatagttctttagcaaactaatgtgatactatagagtttttataacccacttgtaaattgtgagttgttagctttgtactgtacttaactgaatccttgggtggctaatcccgggcctttaaacattcgtaactcttcctatgacagtacacattgacttgctctatttcactctggctgctgacttctttatttgctgtacggatgtcttccatatacattccagtgaaatgaatggaatggtaaaaatattcttcatatacttacagcagcaaaatagttgttttctttttggaattctttttagctgtcaagtgaatataacaaaattgttttctttttgttattcagggaatttctataaattacgttcagggaaaaaaaaaatcaccatgtgtctggcatataaaaagccagtatggaaaataccaagaaaaagtttactgatgagttttgtactacaatctaaaaatgagttgaagatttaaaatgaaaattcaccaggtggagaagtccatgatgtgagtggagctagtttgaaaggctgagggcaaaggtctcattttatctaaagctaaagctttgcctccaggcagttgtacattatctcttagataagcggaagtatttagaacaatactttttgcacctgatggcaaagtagatttattctacttgagaaatttcaattcatgatcacctcaagtttcattttgagtaattttcacctttgaatcaagatgtcaaggaagaagtatcagattcttctctttgaagaacacgttgattagacgttcttcacaaagaagagagtaattattggttttcttgtttcatgaatttgagtatatgaattactcatctgtctgttttaaatttatatacacattagtaaaaaatttcatgaattcgtgactaaaatacttgagaatattcagtttgcaatgagtaggtttggttttttaaaaatgaatattgatacattatttttaaagtgacctggtaatatcatctcttcttcctgtttaaatacattttgaaatttctgtacttcagccatttattttaacgagattaatatatagttaatgtgaggccgttctttcctcagaggaccgtatttactactgcttatttttggcctaatttaatgtggaacaagtaagaacgttaagaatagaggcacttcagctagatatttctaatctagggtgtcccacttgaatcctatggatcatacaatagtaggcggctcatgatgttccgagatggaagagtgctgatgaagggtgaagctctagcgttcattctggatttcacccatttgtttcaaacttgaatgttagattttaaataggttataattttataacagatattcttaactgatagtattactaggccgtttttgaggcctttgtgtttaagcactttaaaataaaaattgtttaaagaatatgacctgatatttgtaagagaagagtgaacctcacgattttaagttaaacaattattttccccctgacatttttaacttcagtgtttggttagctgctctttccttacggtgtctgctgatgaagttcacccagctgattagccaggtggtcagtggtcgactcttctctggagttgggaagcttgaaaggaaagggcctctaagttcttgccacttctagttccacccaaattgtttgggtgtctgccaccatcatttaggagcattcaaatgtcttccactgtcatttttgagtttatatatacataaacttaaaatgtatagaaaagattttaccaatttaatttaatgaaaacttgaaaaaaaaagcctcattttaaaacaagctctcttaccattctcacattttagtttagaggttaaaaaatagaccagaattctggaaatagtatatcagaataaaattgagatatttctgatttatttgaggatcatcttgagaagggttagatttttaactcattcagagggcctaatatttaaa

SEQ ID NO: 31280 - DNA, 2300 bp, Homo sapien
tatttttagtagatgaggtttctccatgttggtcaggctggtcttaaactcctgacctcaggtgatccacctgcctcagcctcccaaagtgctaggattacaggcgtgagtcaccgtgcccggctaaaatggtttctttatctctttgtatagtactagggcagaggctgggattgttagactaacagataattattctactacctcgagaattagaggattctctaattctgtaggcaggatagttgcattgatattagtaatttgtgaagttccattacctttgggcagtggtaggaatttgtgcttgtttttaaaaagaattattcacataaagctaggtgctcccacccataatccaagctactcaggagattgaggtgggagcgttgcttgagcccagaagctggagaaaagcctgggcaacatagcgaggccctgtctctacaaaaaattaaaaattagccgggtgtggtggcacatgcgtgtagtcgtagctacttgggaggatgaatgagaccctgtctcaaaaaaaaaaaaaattatttacgtgaatacttgattaattttaagattaaaatgcatgcttctgaatgtttgaataaaatgtaatgtgatcttttaaataattttgaggtcttaatttgatttacatctcagatcaaagtagtttattacacatggaattcagaaaattaatcgtcaccgataccttattatgtaggaaatctcaagcatgttttgtatcgtcacttattctttatcacttattcacttaccctgggctaaatgaagcccataattgcttatcccccctcattggagaagaaataggtccatccacactcctgagctcctactgagaattcttgacttgtcatatgtcacccctctgccaaataaaataacaaaacagcaaaacatactttctcagatcctttccccacaggaggggttactgttattatggaggctattgcaggaaaatgtagaactcttaaatcattacagatttacagtagaagaaagataagttattaaagaaaagataggaatgatatagagagacaagctctgcaggcagcttcccaggcaatacctatatagcagtggacccttcccttaaaaataatctgttttcaaatcgtctaaattttcttgttttactttgtgtgagtgcttcagtttcacttaagaatttttgtaagcatcctctgtgaaaacccaaatgccaaaggaagatttgtggaactgttgttaatacacacagtggttgagagagaagataaagggaattgtggaactttgaagataggaaaagttcatgtcacacgctgcagttgccagagagaacatttcagaagagggtgatggaggtctgagaaggcagtggaaatttggtggcccagaaggacggacgagaggtacagagtaggagaggggtaccaaacacaatatttgcctattttaaaatgttgcttaaaggaaatacttagcttcttaatctagtgctacatgtcatctgctgccaagatgagtaacctaaaaagaatgtataagcaatatggtaatgttaggaaattcttggtaacctatagtcatttattataatgtttgtatatcaaaatatattcccagtgtttagaggccacacatgctgtttatatgtctgcagctacctcacttcagggtgagccagagtgaacttatgacaggttctcacttctgcactatagaagcaataatttcaacagttggcagttaaaatttgacaggttgctgtaagagccaggaattgtcaggcatctggaggaagcaagccactagaggtattgcggggatgctgctgcagtacagctaaaatgcagtcgtcagaagatttttgttgtcctttcttatgagaattgtatgaaggtgagatacttatctttgtacctcagattgctgggtttgataaactaaaagccagattattttaatggcaaataaaacacaattacattagtacatgtattacctgtttatagactttatttatgacatttatattatataatgtcatctaaaacactattttatttatttttaggttacgtttagcaagaatgaatgaagagatgcgggaatcagaaggactttatggacagccaggtcaatattctactaataaccatactgaaatgcagtataagaaatgcattcaggaatttatcagtttacaactggaagattcatagttctttagcaaactaatgtgatactatagagtttttataacccacttgtaaattgtgagttgt

SEQ ID NO: 31281 - DNA, 2300 bp, Homo sapien
gtttctgttaacctacagtgaataattttacatttttcatacttaatttagcaaagatttgttaatcacatagtttatgcatggcattataatattgaagaactaaagatgcaaagtgtgcctctgaaagggggagagtacttgattgctgtgtttgaaattattcttccaattctgtataaggagggctcattgaatgaagtggctaagagttggtaccttcaaagcacatgatttttgttgttgatactgatttctgtctgagtcttcatgtatgaccaattgtatttgaaagttattgctgtctaaaccaataccatttaaatcagaatcttaattatttactaaaacaagactgagttatttcagaccttgaaatagccttctattttaaccaaagacctaaactttttaagaggatataagtaaaaagtatagaacagatatggcattttataatggtatcataagttacaagtttattttatttcttaaattaataatgctatatgttgttttaaagtagtcttatgaaaaatagccatcaatagtgctcgttcagtatgtgaaattatttatttgagtaaacatgaaaataaagttactttctataaatttttaagtttttttttttctggtgatgttttctactctgcaaaaagcatgagggcagtatagaaatgaatagcacagaaattaagagaagggaagagtagcatgttaatactagtgatttttcagttaggttactgtttgtatttcacttgagtgtgaaatcatagttcattaggtatttggaagggaaacataatatatatatgtataatgtcacagattcagttttaaccagtattacattcagtgactttgtttgaatatgttcagtatataatggcttgttgtggtattagccatgctgagagattaagcaaaacatcatgacatttttatgtctgtcagacaggagaaggaggcatatatcagagcaaaatatgtggagaggaaatttgtggataaatattctatatcattatcacctcctgagcagcaaaaaaagtttgtctctaaaagttctgaagaaaagaggctgagcatttctaaatttgggccaggggaccaagtcagagcatctgcccaaagttcaggtatggcaaactttcttactgtgtctatagctattttcttaagctcaaatcacttttataatccctgaactaatagccattgtcgttttttttaatgttaaaaacctgttcccttctacatattctaagaaaaactgaatttctgtgtctttaaaatagttaactttaaacaatgccataatatttcacctttctaggtaatgtgtatattctaaggaataaaactgcttaaaatgcaaggggagatgggaattataaacctgacatttcaaaagccctaagtatctgattaactacctgatttccttcctattttttcctcctaaattttttcccagtaacgttttttcctgcccttttcccttcttatggcctgctttgtgctttgctaacttgcatgtccccagtgattgctgtaaatagcgacgaggccaggcgggagtctctgttttgtcctgatgagctagattcactcttctcctactttgatacttcttcaaaactgcgtagtagtaagtactactcttgtggagcattccaagtctgtgccagtggtcattgtgcggtgtggccatttctctagatgttacccattgtctcagaattacacgttacttacagtcatataataaattaagctctttactacccctgacatattatggagtaatgagatgtgttaaactctgaaaataagtttattttcaggttttatgattgatttatatctcgataagctaagtgttcaaaaggcttaaaattatattaaatgcattctccttgtggtgcctgagttcatgttgatgtgtaagagctcattttaaaaccttgtttgtgggagattgttttctaaatggcatgaactttaatcattagttaatttttctttaaaacagtcagaagtaatgacagtggaattcagcagagctctgatgatggaagagaatctttaccctccacggtgtcagccaatagtttatatgagcctggtgagttctgatgaaactcaatgttaattggttttgtttgctggaaagtgcatgtggtaaatgtttacctttgattaaaaaaaaaattatatatatatatatatatataattttttttttttttttcttcttttttttttgagatggagtttcactcttactgccc

SEQ ID NO: 31282 - DNA, 2300 bp, Homo sapien
acatcaggaacgcaaccaaatatagtagagattgccaactgtcttggtaaatttgacattgaagttacaatgttagggaaggttggcctgaccactaatgtgcttgaggaccctgaacatttaacagtcaatagtctgtttttagctatcaagaaaagctgtgtggtttccaggaatacacaattaaaaaagaaatcaagtttataagcaaagaataaatgaatataatgcttctatattctctgaaatgcctcagaattatactgttaattttcctttttcctttttttttcttttgatacagtgttttgctctgtctacccaggctggagtgcagtggcacaatcatggctcactgcagtcttgacttcctaggcttaagtgacccttccacctcagcctcatgagtaactgggactataggcatgtgcctggctaattttttgtatatttttgtagagttgtagagacaggatttcaccatgttgcccaggctggtctggaactcctggagcaaggaatctgctcacctcggcctcccaaagtgctgggattacaggtgtgagccaccatgccctgtctatactgttaatttctaaagatgctaaagagatcaagatatctcttgatgggttacgaaaaacagtatgtcatcacgctatacttagccagacggtcagaaagttatattaagactttagaaggctgggtgtgtggctcacacctgtaatctcagcattttgggaggctgagacagaaggatcacttgaggccatgagtttgagaccagcctggggaacggaacgaaattgtttgattgtttttgagacaaacaaaaacttcagacagtgaaagtgagagaacttagacttaagccctttgattatagtactgaagaggcaaatggtacaattaaaatagccaacatttactgaatgatcgatatgtggcactgtgttaaccggacaacttcatcagatctgtgtgttatgttcattttaaagtgagaaagctgggacctaaatccaggaagtttgcctccagattctcactcagagccactatgctgttagaacaccctgtatattcatttttatagatacgcccgtgttttttaggttggcttaaaaattactcattacatataagacatctttgtactttttacaatcaatggcatcttaaaatgaaggagtatggtaaatacctgccgtgaggatcagatgataagtatcttaaagtgcttctagaaaaagtgtggattagaggggcaggtgttgcaaggtgagtacgatgagcctggtcttcagaaccccaccatggcagaacagtgaaaaccaccaggagcaaagtgtcagtgagggggaatgctttcggcagttttgagaggagttcctccacacgaagcaccctacctcccatacctgcctaaatctttctatgtccaacccaaacggcagctccttcaggaagtggtctctggctatatgagaagatgtacatgggagcaatttccagattatgaagctatggaacaaatacatgaaagatggattttatcactaaagttatcctcgctcctcttctggcctcagtttctctaaactgaaaggaataggtggcttagcctatctcttccttttataatttctgcctctaacctcttcagatttctgccaatctgctttgaaaagcaaatttccttcctcagacctgcaggagactgctcctctgggctggcagctcagcagggcggggctcggggagcaggagaagaggcgggggctcggagggaagcgcggccgcagccacgtgacttccttcccaaggaacctcagctgccggcctcccagcaaccggtgcgtcccgcctagcgacgcccgcgcatcccggttggccctcgggggcggttgtggcaaggaggtgcccacggtcgcgctgctcattggctcgggttgccgtcgctcagacccgttgcccgggcgcccgcaggcggtgctgccggatgccccgccccttggccgccaggttcgtggctggctggccgctgctgtcactccccggccgtttccctgcggccagcgctctacttggggcgggaggaagaggggcgggactggggcctgactagtcgtcgccgtcttcgcggctgctatgaccagcgggcgaggcgcccttcgcagctccgcgcaacgctagtcgcggccgtgcgcccgccgtagccgtctgcgtcccagcgcggccgctcccgcggccccctcggctttgccagcgccgcctgcgaggcggaggcaggatga

SEQ ID NO: 31283 - DNA, 2300 bp, Homo sapien
caaaaaaaaaaaaaaaaaaaaaaaagcagtactggccctcacaattttacaaactatttttttttaagtgctaccaaagtcatcttcatctgcattcatttgttgtgggtttgggagtggaagaaccagtacaggagacaaaagtttaactcttgatgagggaaatatgtttccaaggttcttcagagaactcttcatcacctcctgttccaatgtttgttagttaattaactaataaaacactttatgtcatacgatcgtagtccctttcattagagggtctgaaagcaagctgttgcttaatcaagggcccagtcacagttgagttcagggatgctgaactcagtgatgcttcccagcccaagcaggaacaaagcaaatctgcccaataatttggaacatacagggaagtttgtgtattcccttgaaaacaggattgccatcactgacctagactcctgctgacagggcaggagacgcaacacaggtgttgaacactggggtggaaagaactcaggaagggaagggaggtggccatcctgcttcccctcgctgagaaccctctctctctgctccatgggctggacagggctgtcagggtgtaatgttagatccactgagcagtcctggcctgggagggagagtggatatttgactgggaacaaaggtggggacagtgccaacagtgactgtgcaggcccctggctgaggcaaatccctggggaacacattccactctgtgaccagcaaccctgtttcccttctccccttccagctcacttcccctccattatctccatccacatccattcccatactgaggccctgttctgtgccaggaactcatctaggagctaggggctcggggccagacgataaaaacaatcgttttcagaaccctacagtcatccctgaggggcagagtcctaaggacacagaacagggtcatcctcaaaaggcacagagcctgtgttaaagaagatgagactgtggtccagagatgagccatgggagtgaaactgctgctataggggctagataggggaaaacgcttcctctcaccccccacagcagtggacagacattgctgggagcgaggtgtcagctcaatctaagaactcccagagtcagagctgtccaaaaacaaaatgagttacacgggggtgtggcgggcttctagcccctggggttgttggagaaacaggctgaatagccaccttatgggcctgcttgacaaggtcccttccaggaccagtggtctgtgaatccgcaggggctggtccaccggaggggccagttctgggtggctcagtctgctgtgctctaacctgtggtgaggacgataaaaaggcctgatcaagaaagagtcatggaaaggagcctggtgatgagcgagctgcggactggacttgggagagggagggaagggagtgtacaggggccataacaaataccacacacgaggtggctttaagcaatggaaatgggctctccgttctgcaggcttgaagtccacatcaacctgcggcagagttggttccctctgtggggggaacctgtcgcggcctctgcgggcccaggaggtccttggctgggagatgtgtccctgccgccctcccgtctcctgcgctctctgcctagacgggttgtgcgacggcgggggtcgctgcccgtctgtccgtcggcttctccagcggtaaaaggaggtgaggcgattccaatgcagacattctatgatttcataataggcctctaaggaccactccaatgctggcagtccatgcttttataataggcagttcggctgtttacacgggcgaaatggaaagaggagatacccgttttcttcaagtcagctaacctctctgcggagtgacgtcacctcgagtctcagtctgctgatctaaaaaataaaaataacactacggcctcacaaggtggtgggacgagggtgctcgagagacgcgcgggtccgggaagcagcaagcccgggcgctctcccgcaggttctcagagacagctcccgcctcccagcgccgcgcgggggcggggcgagcagcccgggcgggacggagggggcggggcgaggaggtcggctttgttctcgccccgccctctccccgcctcctccctagatatcgcgagagggcgggtccgcttggcttcggcgtcgcgtcgctcctgcgctggagctctaggccggcgtctctccgcgagccgcgggtcaagtggcagtggctaagggtgcgcgagtagccgccacccgttcggcgttggctctggcgtcggggtcgttgtgt

SEQ ID NO: 31284 - DNA, 2300 bp, Homo sapien
ccagtaggttgtgagacgtgtgattcacaaatgtttatttctagaccatagttcatgtttcattctctttggatttttatattgctttatagaattataattttaaatttatgactaaatttaatttgtcaatcttatgaatcatgcttttggtgtcatgtctaagaacttttcgcctaaccccaggccatacgaattttcccctgtgtttttagctaagggtttgatagcgttatgttctccatttaggcctttaataaatgttgaggaacattttgtgaccgccatggccatacctttctccatctctcacggtatcgtgggcatttgcagctcccagtgcgccgtgctgttcccgtcttcttggtctgctcctcctgtcatacctttctccgtctctcacagtatcgtgggcgtttgcagctcccagtgccccgtgctgttcccggcttcttggtccgctcttcctgtgagtttcagggcacgtcttagtgctggcactgtcctggtccatcgggggtcccatgagcttctccatgtgggaaggttgggactgtgatgttgacgggatgccctgtgagtcaggaggaggtgctgacgggggtttccatgtaggagagagaggtgtttggttttccggatggggcagacttgagaggggacaaacttgagaaatgccaccaatgagaagggcacgcacagcaggtctcggggccgcccagccgtgtgggagacaaacgtggatgtgtcagtggccacgccaggaggtaaaccctcaaccaagggcctctgggtgtccaagaccaagtcttgctcaagaggtgtgttcagctgagccaaccatggcagaaatgcataagggagatcccacggttcctctgtttaaatcccctgctaatcccaccagactcagagaagcagccaagtcctcacagcagcctgcaacccccgcctgactcggcctcctcttggctctgattctctgcacccttctatccctgtctcttcttccatcagagaggagatccggcacgtttatcctggtggattcaaacccatctttgccccacatatagtcaccggaatgaataggtataatctagaaagagtccttttgaaaaagaaaaaagcaggccgggcatggtggctcatgcctataaccctgcagggaccagccccacagggtcggtgggtctctccctgtgtgcggcgacgagagagtgtagaaataaagacacaagacaaagagataagagaaagggcagctgggcccggggggccactaccaccaatgcgcggagaacggtagtgccccgaatgtctggctgcgctgttatttattggatacaaggcagaaggggcagggtaaagaatgtgagtcacctgcaatgataggtaaggtcacgtgggtcacgtgtccactggacagggggcccttccctgcctggcagccgaggcagagagggagaggagacagagagaaagacagcttatgccattatttccgcatatcagggactattagtatttttactaatttactactgctatctagaaggcagagccaggtgtacaggatgaaacatgaaggcggactaggagcgtgaccactgaagcacagcatcacagggagacggttaggcctccggataactgcaggcgagcctgactgatgtcaggccctccacaagaggtggaggagcagagtcttctctaaactcccccggggaaagggagacccccccccctccccgccctttcccggtctgctaagtatcgggtgttgttccttgacaccttttgctatccgcctggtaacaggcatcttcccagacgctggcatcaccgctagaccaaggagccctctggtggcccggtccgggcataacagaaggctcgcactcttgtcttctggtcacacctcactatgtcccctcagctcctatctctgtatggcctggtttttcctaggctacgattatagagcaaggattatcataatattggaataaaaagtaattgctacaaactaatgattaatgatattcatatataatcatatctaagatctatatctggtataactattcttgttttatattttattatactggaacagctcgtgtcctctgtctcttgcctcggtgcctgggtggcttgccacccacataatcccagcactttgggaggctgaggtgggagaatcacctgaggtcaggagtttcagaccagcctggacaacatggtgaaaccccatctgtagtaaacatataaaaattagttgggcgtggtggtgcgtg

SEQ ID NO: 31285 - DNA, 2300 bp, Homo sapien
agtgggaatgggaggggtcccgccatgctggaaagtggtcctggagtttcttacgaagttaagcacatccttaccatgtcatccagcaaccccactgctgaaatgtcccccaagggaaaacttaaacgtgcacacacaaacctgcacacaagtgtttaggcctcattcctcattgccaataactggaagaaaacaaaatgtccgtcggcaggagcaggagaaggcgtgaactaacgcggatgcttccacacagggggcaccaaccagcagtggaaagatgcacccaaatgccccaggtctcccaggctacatgcccgttgaaggaagctagtttcggtgggcacaggccaaaggatgccaacacatgacatcttggagaagacagtgtaccgtgtcggggagcagggcagtggtttcgaggggctacgggtggaggggcgaatggaggagctctctggggcgatggcgtgagcacctgcacctcactgtgggctgctgcggctgaggggctggtacggcaaacactggcttcagtacatgcagactgaaggaggaaggctcccacaactcagagacagagggtgtcgcctccatgaaacaaaaacatattttaaaaaaaaacctcttaaaattaagaaaaaaaccacaaaaagtatttcataagcgcattgactttgagttgacacaatctacctgggagcatggaactgaaaccacaggcttggcaatcccggagggagagggtggagggtttagacctcaattgaagggctcagtacctggctataggaaataacatttaaaaagcagcagggtggaaataatttctgctgatgaggttgcatctctccagatagccggcagagtaaattaaagcaatatagtcttgctctgttgcccaggctggagtgaagtggcgccatctccgctcactgtaagctccgcgggagaatctcttgaaccctggaggcagaggttgcggtgagccgagatcccgccattccactccagcctgggcaacaagagcgaaactccgtctcaaaccaaacaaaattaggtaactaacccaggactaaaacagcgtaactttaaaaaaataagtctaggaggtatgatgttcattccctgcaagccaataaaggtcacgtctggggcatacatctaaaaaaataatcctaaagagaaagttatggtcacaaatatgttctgtatggtgttattaagagcaaaaatgggaaacaacccaaatatcagtaaaatgggactgaacccttgcaaatttactaaaataaaattgttaaacatgatgcacaagacgaagattttaataaagtgaaaagacaggaaacatacttactaatgattattggtttatttttcatgccacttcattccacaaaaagatttcagatatcttagaaaaagacacactagaaatattaaaatactatctgaaccagaagcagaatcagggtaagctagcagaaaggcgtatgagccaaagggatctacccagctttcaaagctgaccacggccgtgcgcagtggctctgtctgtaatctccgcacttggggaggccgaggaggtaggatcgcttgaggccacaagttcgagaccagcctgggcaacagagcaagatcccgcctctaccaaaaatttaaaaatcagccggaagccagacactagggacatggctgaggatcgctcccgcccctcggaggccagaaaccgagggtcactcccgctctctagaggccggaggccccgggccgctcccgcccacctccgcggacgagcgccgccccttcgaccccattccctgaggtctggacgttcaggccctctcggtctgggagatcccggagaaccacccacggggctttaaaaaatgttggtgcccaacatctccccgaaatagggcccgccctatctcggtcggggagcgcgggacctccgtggccacccagcgccaccgtccgcgggtccgctttgcgcaggcgcggcgtccccgcccattagacccctgcccgggcgtgtcgtggtgcgcaggcgcgatgtcccccactagcgccccgccttgacccggccgtggtgcgcaggcgcagtctgcgcagggactggcgggactgcgcggcggcgactacagacgtgtcgggggtccggggcctgtcgcggttgccaagcgctcggcgcttggcgctggcgctggccaaggcggtgagtccctgccgcggaccggggcagggcaggcggggggcgaggcggcggtaggagcgggacggtccccagcgggtccgag

SEQ ID NO: 31286 - DNA, 2300 bp, Homo sapien
ccaacttcaagccaatgtcagtctttagataaaactcaaaactacttttgacacaaaactagtcttttgtgccaattattaattttttaggagaaactatcaaacatttcctctaagaaaaaacatggggaacatataactaaaaggaatacttagaccttgcttaacaatacagaatttcagatgactgaatcaggaggtggagggggaaaagtaacaagtgcagagacattcatatccgaaatctagcaaagtaaggggtcctcatcgaataaaatgcacctataaatcatgagcaagaaacgaatctgcatgtacagcctacacaatcacaaaagcagccaacgaagaacccaaaaacgcacgactttctgtaggaaaagctaccttcatcaagataaaaagacttttacaaaacccaagactaaattttggttccattttgctatcttgccatctggtctgaggtgcctggggccttagtctgcagaaggaacactgggcaccatctgggttggggacaaaggcactggctctatctagcttctctccaaccacaagctaccattgcccctaaaaagtcccactgaccatgggcttcacctcctgcttgtggacgccctcccagcagctcctaagagcccaagatgcggcgggggtctctgctcagtcagcaccaaccacagcaacacgctagaacggtttacacgctttccgatgttgacaggatggctgtatgactaatcctcacatttaattcaaagagattttcaataactatttcaaaaaggagaaaattgcacaatcacaggcataattcaaatcaatattgctgaatgccttggttcctctattgagatttttactctgcaatttaaaattactttgtaattaagaggtgggtggctaagttcatttaaaagaaccaaacaactaaacctatccaatttcgcttgattaaatgaaatcctagaaggccgattctgaagatgcaatcgtagagggcacattcagacactcagagagcaagggctcagggaagtataaccctgaccatcatcctggactaagccgagcccggccctcgaggtactcagcgcacaggcaagcacaggtcctggagtcctcgctcggtcagtgccctgagctctccgtctgatttttaaaaactggcacagctgcttttaaacaccggcacatttttgtggcacaagggccaccaaacgggacccaaagtacaggtccttaacttccaagatcccgaagtggacatgcacagatttgcgctctctggaaaggggaactgcaagcccaagctcgggcgcgccgcgcttcccaccggacacccacccggccgagcccggccactcctcgcacccacccaggcggtttcacccgccccgccggccccacccacgggctgcgggcggccccgcaggacaaccctcacagagggcggcagaggcccggcccagccaggactccaccccggtgaccttgggcagacacgactcctccccgagtccacccgccaggcagaggcgaggggctacctcagcccgcgaggtcgccggaccccaggcccggaccaaagcggcggaggggacgcccagcaagcccgcggggtcgcgaccttcaccgggacgcggcctacctgctaaggaccgagctccccaggcccccgagtacactccgcggctccccctcgcaccggcccagggctctcccagccccttcccgatccccgggcagggggcgcgggcacccggcgcccgctccgctcggacccgctggggaccgtcccgctcctaccgccgcctcgccccccgcctgccctgccccggtccgcggcagggactcaccgccttggccagcgccagcgccaagcgccgagcgcttggcaaccgcgacaggccccggacccccgacacgtctgtagtcgccgccgcgcagtcccgccagtccctgcgcagactgcgcctgcgcaccacggccgggtcaaggcggggcgctagtgggggacatcgcgcctgcgcaccacgacacgcccgggcaggggtctaatgggcggggacgccgcgcctgcgcaaagcggacccgcggacggtggcgctgggtggccacggaggtcccgcgctccccgaccgagatagggcgggccctatttcggggagatgttgggcaccaacattttttaaagccccgtgggtggttctccgggatctcccagaccgagagggcctgaacgtccagacctcagggaatggggtcgaaggggcggcgctcgtccgcggaggtgg

SEQ ID NO: 31287 - DNA, 2300 bp, Homo sapien
atacactcccttaatttcatctcctcctccacctactgccccatgtctctccctcttcctggctaaacgtctcaaaaaagtggatacactttctgtcaactcctaaacactcctcacgctcatttggcctctgctcctcccttcctcctcccacttcattggaactacttctgccaaagaggatccctgagtcagcctgactggtaaccccaatggactctactcaatatgcaacatccttcacttcttagcagagtttgaaacagcctgactctcctcttctggcaacattcttttccttggtttggggacgctgtactgttctggttttgcccctccctccgagcattccttgtgtttgtcctggcccattttctcctctcattctacatcctctccccggggattttagcttctctcacggctcaggttaccatctccatagtgatgactatcaaattctgtacctcatttccagaggctcctgacagacttgcttggtcaatatactactggacatattcatgagactgtctcacacaggcatctcgaacccagtgtgtcccacaattctcttcctatccatgcctgttcctcttccactgcctcatatgtcggtgactgtccaccttctctctctctccccctctccgtttggctcataggaaaagtgtcaccaagggctgtaagtgcagatttctaattatcccctaaatttgaacatttttcctctcgaaagtgtatggccattaccctattacagatcaacatcttcaatcactggaatgatggcaataatctaattgggttcattttatcctctatctaacaatgacaactcattgcctacacagcaggtagaaggagtttgttttcagaattgccctctgacctatttaagacgctcagatattccctgaggctccttggcctggccacaaaggccctacacattctggctgcttcctcctttccagcatcctctctcacgtctcctctcctcagttccaccctcaggaggcaccagaattcctcacttctttgactacaaggcaccgtcttactcccaagaccagtgaatccgaaggtggaccaccagctgagggactagattccagactgaatagaacaactttccctgtctctccacataaagtgtgtttgtttttcctcttacaggtttccttaatgacaacaaaaaagggagtaatcctacccactgtaagagtcatgactcttgattgcagctgacagaaactcatgacagcctgctttagatgaagggggagagaaggactggaagaatcttggagttgggaatgtcacacgtaattgaaggaagaacaagaaaactatagtaaagaaccctggggtggtgatgtagtcatgggccaagtgtcctggaaccctggggtggtgatgtagttgtgggccaagtgtcctggaaccctggggtggtgatgtagtcatgggccaagtgtcctggaaccctggggtggtgatgtagttgtgggccaagtgtcctgggttttgggtggagaaagagtcccctagataagttattaggtgggtgcaaaggtaattgcagtttttcccattattttaattgcgaaaacagcaattacctttgcaccaacctgatggagtcccccttgccatgcttctctctgtgaaaaaccccaagccgaagtcagcataacatccacaggactctatgtttgcaaaagccagcttagctatattacatgtataagcacattttttcaataagtcagccttagcttactgtaactttttaactttataaacttagtattttaactttttaaacttttttgttgaaaactaagacacaaaaacacatgttagcctagatccacacagggtcagggtcatcagtatcactgtcttccacctccacattttgtctctctggaaggtcttcaggggcaataacacacatggagctgtcatcgcctgtggtaacaatgccttctacagtacttcccaaagggcctgctagttcacttaattcttttatagagagaaggagtacactctaaaacactgatcaatagtatattatagtaaatacataaaccaggaacacatttattatcattatcacgtattgtgtattgtacagaatggtgtgtgctgtgctatccaggaacacatttattatcattatcaagtattgtgtactgtacagaatggtgtgcgctgtgcttttatgcaagtggcagcacagtagctttacacgagcatcactagacacatgagtagcattgcactcggca

SEQ ID NO: 31288 - DNA, 2300 bp, Homo sapien
agaaggggtggctgagcacagtttacagggaatggtcttggctgtttttttgtttttttttttttctcttctaggaagctgtgatttaaggatcctaattctagttcagagatgcatcctaaagggtcttctctattgctttttctcccaaaatgaatctcagtttgggttgtctatgtatttgcatgaggaactgaactgttgttgtcataggtaaatgagagattgagttttctcagctccaaagagaaagggcgtttgctcctcccagccgagtactccatagggttcatggcgcctctacttgccagagtttatgtaaagtggaagtaatatggtctttctgcacatttacattaaaaaaaaaggagccctgaggttgacctgcaaactgtagagttcctgagtcctcttttttctctagtttcttctctgcctgctttaaatttgctgttatttttctattaagataaaaaacactgtttggatcagatagtttttctgtttgtaaactggtgaatttgtatttatttcatggctaaatttctttttttcttttctttctcttttttttttttctttttttttttttgaggcagagtttcactcttgttgcccaggctggagtgcaatggcgtgatcttgggtcaccacagtctcctcttccctggttcaagtgattctcttgcctcagcctcccgagtagctgggattacaggcatgcaccaccatgcctggctaattttttgtatttttagtagagatggggtttctccatgttcgtcaggctggtctccaactcctgacctcaggtgatctgcccgcctcggcctcccaaggtgctgggattacaggcgtgagtcaccgcgcccagctttcatggctaaatttctgaagtaaaagctataggatctttgtgtgtgtgtatatatttaaaaggcctttataatttctataattttatgtttaattggcaattaaatctgttttaatttccctccagcacaccagactttttctctccatacgttatgatgtaaattttgctattcgattttcacctcagtttccttaaaatgcaaattcaaggctatttagctgacaaccgcttagagtagtaaaacaggttatcaagaattcgaaggtgtggctgggcacggtggctcacgtctgtaatcctagcatttgggaggctgagccgcaaagatctcttgaggtcaggagttcaaaaccatcttggccaacatgttgaaaccccgtctctactaaaaatacaaaaaaaattagccagatgtggtggcaggtgcctataatcccagctactcaggaagctgaggcaggagaatcacttgaagccaggaggcagagtttgcagtgagtcgagatcaagccattgcactccagcctgggcaacagagtgagactctgtctcaaaaaaaaaaaaaaaaaaagtaaaaaagaatttgaaggtgtaagaaaaaagctctttatgaatctataagatgaacttctttcagcatacctaatacatctgtgtatttatgtgttgttgtgtacacagtgttttgctactgaaaatatataaaagagctctaattaattggcttaagaaaataaaagcacttggctgggtgcagtggctcatgcctgtactcccagcactttgggaggctgaggtaggtagatcacctgaggtcaggagtttgagactagcctggccaacatggtgaaaccccatctctactaaaaatacaaaaattagcccgacgtggtggtgcgcgcctataatcccagctactccagaggctgaggcaggagaattgttggatcccgggaggaagaggtttcattgagctgagatctcattactgtacactccagcctgggtgacagagcaagactccatctcaaaaaaaaaaaaagaagctagtgattccatatcttcaaatcaaatttcagtggagtgtttaccgggcaaggaaggcaggggggtcagcttgctgacagcctcaacctgccagccctcagcctgcacatttgtgatcacctggtcacacacctgggcaggaggctgcccctcctccctggtttgaggaagcaggaaaaggtacccgcgagagacagccagcagttctgtggagcagcggtggccggctaggatgggctgtctctggggtctggctctgccccttttcttcttctgctgggaggttggggtctctgggagctctgcaggtaaggaggcctagaagggcctggtgggcctctcccctagtagggctctgggagtgaatttcagt

SEQ ID NO: 31289 - DNA, 2300 bp, Homo sapien
gctggccctcgtttgtgtctccctccagggatgatgcccggatggaaggaggagccacgttcctccacaggtgtcctccacaacaggtgtcctcacaacaggtgtcgtaacaacaggtgtcctcacaacaggtgtcctaatactcccgcagcccctcagcatctacaggctcactcccaccctacaacctttcagataggtgttatccccattttacaggtgaacgaggaaaacagctcgaagaggctgtgactttgtggtgacgcggtggcagagctgggatcaagcccaggtttgtaacgccctcctggagtctcggccgtcacagcagcttccggagagcgctgtgtgcctctggccttcctggcatgggaaagaggtcagctacctgtgttcggtcaacaagatgtccagcgcttagtttggtctcacctggatgctcctttctcctctagagatggaaaactgttgtcctgaaagcgtcaccaaacaaaacctgtggaaaggtaatggggggacccacgagcaagagctgacagaaaaatgaccacgggccgggtgcagtggctcacgcctgtaatcccagcactttgggaggccaaggcgggcggatcatctgagttcaggggttcgagaccaacctggccaacatggtgaaacctcgtccctactaaaaatacaaaaaaaattagccgggcgtggtggcaggtgcctgtagtcccagctactagggaggctgaggcaggggaatggcgtgaacccgggaggcggagcttgcagtgagctgagatggtgccactgcactccagcctgggcgacagagcaagactccatctcaaaaaaaaaaaaaagtgcaaaatgatcacgaaggccaagctgggccttggtgtctgcgaattccctgcagtaggtccctcctgctgccccgtccaggcgcccacaggatgctccacatgactctttacctttatgattttcttacctccaggaaagaacagggtcagctcgtccacccagagctggagggactgttgggggaccacgccacttccccacggtatccgcattattatggcgtggcccaggctttggcctggggccatgaacagactttcagcttctagaagcaagtggtcacagggcctccgtgaccctcggagacagcgccacagcgtcggttgcctactccttgctggacaaggctggctctgcttgggaatgcagaaaccctgagtccttgtcctgggccccacagtgtctgagcatcgaaggtccctgctctgggacgagtcaccccacagacaccccacattcgggaatcaagtcttgaggaatcagaagcagagattcacactgtggcaaagaggggagcggaggtatccccgttttcctttgcagagagctacaccaactgccctcttcgtctttacaaccctacttggggtccctttccctcctcgcttgtgcctgtgagttccaagaggtggaactggggtgagcagagcccccaggtctccaggagcagctccacctcctcacaggttacagtcgcttcctcctaccgaggttctgccttcaacccactgcccatgccagctccctcaggccagtctcccagactgtccctggctccctgcaccctggctccagctccctgccctggaaagaagaagtccaccatctggtgagggtctgccacgcatctggggtctgccatgcgtctgcactgaggttctgccacgagtctgcactgaggttctgccatgcgtctggagtctgccacgcgtctggggtctgccacgcgtctggagtctgccatgggtctggggtctgccatgtgtctgggatctgccgtgcgtctggggtctgccacgcatctgcactgaggttctgccacgcgtctggggtctgccacgcgtctggggtctgccacgcgtctggggtctgccacgcgcctgcactgagcagatattccaagcacaccacccctttccaaaagacggcatacagtgcatttctgttcctgcccctcacccacatggttccccgcttcccaattccttggggtctgcttaagtctcactctctttcccccattcatacagccccaaggtcgctccctctggggccctttcttccccattcttcccagcagcccaaagctctggtgggacaggggcagcccctggggagggaggagaggacccaggaacccggctaggagggtggcccacccatttccagtgtgacctgttcccattcccccatgtctcctcccatccctcccgccactcagctca

SEQ ID NO: 31290 - DNA, 2300 bp, Homo sapien
cagactcagaaaggtgaaataacatttctaagacgaaacagagctaggaatgaaatccaggtctaacagcaatgctcaacactcacttaatatgaacttgttctggctggatgcggtggctcacgcctgtaatcccagcactttgggaggccgaggcgggcggatcatgaggtcaggagttcaagaccaggctgaccagtatggtgaaaccccatctctactaaaaatccaaaaattaaaaatccaaaaattagtcgggtgtggtggtgtgcgcctgtggtcccagctactcaggtggcggaggcaggagaatcacttgaacccaggaggcagaggttgcagtgagccgagattgcaccactgcactctagcctgggcaacagagcaagatgccgtctcaaaaaaaaaaaaaaaaaaaaaaacttgttcccttttgtgatatatttgactaggtattttaaatcacagttaaaataatagaattcctgcctttgcaaacggcatatgcaaagctcccaggcctcagaacttctgagcctcggggcctacccacgaaggccagcctacagccagacacacacgtggcccagactcaccctgaatggcctctgttttgttttcaataaacccgagtcattaagcttactttcttatgatttacctcttttcctaaagttcacatgatcatatgtgaagctcaaagagctagtttccttgattgatccagtaatttcctggaaagcagtaagaaaccgatgaataatctaacattttgtaatgggccaaggatattaataggcaactcattaaaaaggaaatacaaatggctcaacttatttttgagtttattcgtaagagaaatgcatattaaaactatagaaacactattttctaccagtcagtctgccaaagatcagaaaactccttaacacatggaaagctcccttgcacaggtggtgtgacaactgagaatgtccctccgctgagagcaggttcagcaccacccaccgccatggcacacgccctttgacctagcagtcccactgctgggaactcatcttcagattgacgtgcgagtgaaaaacagcccacatacacaatttactgaggcaatggttgtaattgcgaaggactggatgcaactaaaattgcccttcatcaaaaggaacccagttaagtaggttatggtacacccgtgcatccacgcaacccgaaagaatggggaagcccagccgggcgcggtggctcatgcctataatcctagcacttcgggaggctgaggcaggcggatcacctgaggtcaagagtttgagaccagcctggccaacatggagaaaccccatctctactaaaaatacaaaaattggctgggtgtggtggcacgtgcctgtaatcccagctactcagaggctgaggcaggagaattgcttgaacctgggaggcagaggttgcagtgagcagagatcgcaccactgtactccagcctgggcaacaagagcaaaactgtctcaaaaaaaaaaaaaaaaaaaagaatggggaagcacgttcagtattgctatggaattcttcaaaatattattaagtaaaaacaaaaacaagcactacacaagaaactggtgatacaggcgtctctgcactggggaagtggacggccgcggtgggtgatacccagtcatttcactgtacactcctcagtgccttttcaattttgaaccgtatgaacatgagttattcagaaaagcaattaaaatacctaacatattgaagggttccttgttgctaacatttctggcttggttctatttaactgggttgctgtactctctcctgcagtatatatcctgccttacagaagtccacgcggcaagtgaaatccaggcagtgtgaaagtcactgaccagaccggcggggactctggccccgctgccggccgtgtaagggaagaggcctcccggtgtccaggcctgcgcgccctcccgctgcctccaggtggtgctacaaggcctgctgcccggagcagatgctggtggcctggggagcctcgcttggggcctggagcttgctgactaacaggcaaagaaacaggcaggcacaagtaagtaacataaaatagaaactaactttatttctctggaagaagcaggtactgaatgccggagcagcaacttcgccaacaggctggtgggaaaacatggaaccgcgtgggggaattgggtggaagaggaagcactgatgtccctccagggcggctgccccttggtctccttccagccctggggccttgggccctggtccccgcc

SEQ ID NO: 31291 - DNA, 2300 bp, Homo sapien
gtaaatgcactctgaattagcacttgctgctcagatgcaggggtcctgagagaagctttcccactcactgtagatgaaagtagggtcaggagcttctgaggatggactcctgtttggtggaaaggtccccggagccacagctgtaacccctcttggtactcgggccttaggaaaatgaacttgggaggaacccggtgggagctgctgaggaggagagcttctcccatgacccccctgtggccccctgtgaccctgtgaccctgtgacccctgcacacgagcagtggttttccttctcctgctggtggtgccagagtcctggagacgtgaacctgctggctcaggccctggggatgtatgcaggtccacatgggagtgagcctgctttccagaaccagagtgggactggggaccttggggactgcagagggaacgttaggtggcagctccgcctccccaccacacagtactctacggagctcactccatacctgggagaggccctgtctcctatgtaagaggataaggccaccgaggggcatctgggaaggacacgcagaatcagtcacttccgggatgccaccccccaccccccgaagcttcttgcgccaggcctccaagcctctctgctggccgcagggggattccaggcccctggcctctgcagcccttctcctgctgacttctgatactctggtctgccctgagaggcgtggaaagcaggggccttcacccaccgggccccacacaccagaaccccacacagcgggcccccacacaccagaacccacacagcgggcccccacacaccagaaccccacacagcgagtccccccacaccagaacccacacagcgggcccccacacaccagaacccacacagcgggcccacacacactggaaccccaagctcacagggctcagcccatgtgttttgcctaaaaagaacccagcaagggcctgagagttggggtgaaagactgcagacacctccaggagaggctggtgccctctgccccactcctggcatgctgtggccagcccagccccattcctccaggctttaatcagccccagtgactaagtctcagatactgacagttggtgcagggacggagggtggatccggagcaggacaggtggcccagcctctcccgcacctcctggccatgtggcagaagggtgcctcctgcccaccctggctgggcaccatagctgggatgccccgttcttaggccctccatcgtggcctgcgggacaggagtgtctgccctctggccgctgcctggtgtgggctgggggcctggggggttgtggaggaccacctctgcccttgtagggtgtagttggagtccctgaggtcctaggctttccatcctggggtcaggtgtcctttctctgccttctctccaggacaccccccagctgagacgtgcggtcaggttctgtggactgggaggcgggaggcctgtgcttcagacccaagactacacccggtttcctccaggacgaaggggctctgatgagattctgccacccctccacacgcttcccctgctctcttgacccagctctctcccccacagactgtatctgggaaaccccatggacccccccgacctcctgagcgtggaactgagcacctcccggcccccccagcatctaggaggggtgaaaagtaagagcccctctgctccctggtgtccctaactcatcggctactcaggaaggggcactgtcttcacaggccaccctaaggctgctgttctgtttttggggacagtggggtcagggcagcaggcgggacagctgtgtccctggctccggctgggcgtggggtggaagacaggcagctgtatccgccgaggtgggcctcctcgggctgggtctgcagcaggcccgtccgccccggcgtccctcctccctccttccacggccgagctcagatcctggctttcctcacttccccctaatcctgctctcctgtcccaagccaaaaccaccccacggctccggctctgcctggggcctcctccatctcccggtcctctgcctatcatactggaccgccgtgttcctcatcctgccgcctgcggcctcccgtttgctgggggcttgtacattcactcgcccccattcacttctctcccttcgtctctctacactctgccctctcgtccggccgtctccctcctttgtcctctgtcctgctccgtctctctccccctgtccgcatggcctttcttgcaggggagcctccacctcgcccacctcagcctgccttcttcactcagagtaagt

SEQ ID NO: 31292 - DNA, 2300 bp, Homo sapien
gcacacgtcctccgcactcttactctccttcccccaggagcaagcatgttttctcgagtggtgtcaggactcccagcagccatgggggctcttgcctcggccatacctgcactaagggaggtgggcttgatgtctcctttccctctcagaagtgggtcccaaaggaggcttctgtgcctggagctgggcagtgttggcggaagggagaggccagacggagtgacctgccttgggcacgagtcacgctgctctgagcaaggtctcggcctcagcggcattctcacccagttactgagcgcctctgaagaggtgtggagagcagagtccggcgtctggcccgcggcagccaccggggagcccgtgggtgtagcgggagagccgcagcccagccggtgccggggttcctcctctacgggccgccgtgggaggctgtgtgcgtgctggggagccggggctctgctccttcgagtggccctgctatttttcagatgggactcgtctcgtctcggggtactgtcctctctccttccttccctccctgcaggcagggtgggaatcacagggtggctgtgtgtggtggggccaggccagtggccctgtgtatgaggaggctgggcagggggagcacagccccgtctccccgcgccccgcgccccccgcctccccgccgaccgtggtgctctcgggtttgactttggtctctgggatgggctgttccggagtcaccccgctccagccaggcctcgtcaccttacaaggctgtgggtctgggtgcccaggcgtcgccacctcctccgtcctctctccccggcctggctgggtttcagaggagcccttcttcacgctttggccctgggacaggagaagtgggggttggtggggagggcgtgcagtgtggtgccacacgtgtccaccctagcagctctgggctgtcaccgcccccgcgtgcccagactctgcccacggggctgtcaccgcccccgcctgcccagacactgcccacggggctctcaccgcccccgcctgcccagacactgcccacggggctctcaccgcccccgcctgcccagactctgctcacggcatcacgtatgacaagtccagcagcagacgcgggagcctcacaacctgtgagagccttcgggagtcaggagtgtcttgcgggagccctgtgcttcctggcctgcctgcccctgcccctgcccctgcccctgcccaggccccggcttaggccacatcagcagaggtttcgtgtctgaggtcagagggggactggcagccctactgtctggtcactgtgggagagctgagttcccttttggacacaggtagagcccctcctgaggagacggggaggctcccgcaggccttccgggaggtggtggaaagctccggaagcaggtgaagcggtggagggagggactgagttgcccgagtgctcctagactctcccgcgtctgcattcgggaggcaggttgtagctggaggcctggcccccagcctagtgcaaggccctaggtgtcccccggcacccccgcacctctcagaactcctggaacccagccgaggagtgaaatcaagtggccagaagaggactggggccccggccttgccagggaactgaggggtgaggaggaggtgtgggcggggcgctggccccacagacctgaaagctggcgttgggtcccaggtctgctgggatctttctggtaaccgtggacaggtcatgttgcctgctgcagcagcttccagcgtgcctccttatttgcaaaccatagggaaagctgcctgacccacctagagagttgtgggtaaggccgtgtgcaaacaggcctgtacggggcatggtgggtcacgggggctgttggggaggagggccggtggcacacagcctggtcctgaggcctgagctccatcccccttctgccacagtggccagggtgtgaggagggtcccagtgccggggctgccccgccacgcctggcgttcaccgtgccatctctgtcgcgcagggccgagaactactggtggcgtggccagaacacacggacgctgtgtgtggggcccttccctcgcaacgtggtgacctccgtggccggcctgtcggcccaggacatcagccagcccctgcagaacagcttcatccacacagggcatggcgacagtgacccccgccactgctggggcttcccggacaggattgacgagtgagtactgggcggggatggatgctgacctggccccgctcgggactccagggccctcagcacggcacgcgtgggcggaatctgctcttcacc

SEQ ID NO: 31293 - DNA, 2300 bp, Homo sapien
gtcctcaggaccactcggtgcacgggtggcagctgagaactctgtcccagagccctgagggagcaggagggacatcagtaggtgctgatgtgtgatgagaacagttggcagttataaaggtgaattggagtttgaggagagtgaggccttccctaaagctggctacacaggagtcactccatgccccgttgtgattgttctcacgtagagtgtatgtcctccattgcccctccttcataagcatcgaattgagtctgttctcatcattctgactaccggggggtccatgtgcagagatctgtagggagaacgctaactctcagatggtttgctgattcgtgctcacgctctctttcttgctctctcacacgcacacacgcatgcacacgcacaggcatacacacacacacacacacacgcaggcacacacgcacatgcgcacacacgtgcacgcacgcatgcacgtgcacacacgcatgcacgtgcgtacgcacgcgctcacacgcctgcgcacacagacacgcacacacacacacacgtgtgtgcgcacacccgcatgcacacgcacggcatacacacatgtacacacacgcgcgcagacgcacacacgtgcgcacacgcgtgtgcacacacacgcacatacacacaggtttgctctgatttgagttcaacccttatcttcatatttttcctaaaagtgggggttgtagcatctaaaagtcatgatgttcttcatagaacattagaaacgtattagggctttcaagttaaaatagctaaataggtaataatgtgtcaagttagacactgacttagttaaaatagctaaataggtaataatgtgtcaagttagacactgacttagttaaaatagctaaataggtaataacgtgtcaagttagacactgacttagttaaaatagctaaataggtagtaatgtgctaagttagacattgatttatgctactttaggcctggatagttggtgtctgatgccagtagcataaaaaaattttacggagggaaaaaaacctcaacattgagaaaattctgttcattaccttgatttttcctgagaactgggagaagcccatcgcttcaagtttttggttaaacaccttcacccagtttgagagccagtgccaggaagtggagtgcagagaccgtcggtcagttgaggctccgggttagttggggttgatttcattgctatcatcgggtgggcggtgtctagtgacaggctcacccccaaggggaccacaggcagcagcctctctcgggctacggcggccttcacagcacgcggttccccgctctccctgcaggccagcggcggctgtgggaggctgtgaagaggaggaaggccttgtgcaaacgcaagtcgtggatgagtaaggtgggtgaggaggtgggtgaggaggtgggaggggggcagcctcgaacgcccccctccgcttctggtcctgggaaccttccccagctccccggcaggtcgaatctcgccgttctgccggcactttgtacaggaccccctcgtccagggtcttatcgggcagggcacttgtagagctgctgggctaagtgtctgtctccgccagatacggacacgtgagcagcctgtgtgcggtgaggccttcacagcccctctcggcacgcctggaacaggacctcattgacaagtgtgccttaacttagccctgctgtgtctgagcgttggggccagtgtccagcgtggggtggtggacctgtctggacccagaacgtctttgcttggcttccctcctccctgaccctctctaatctctgggtttctctggtcatctgtccctgctgacagcttccttccccacagcctgtccccacctctccccacaccttgtcctaatttgggtctgtggtgtagtgagtccctggtctgactcagtggaactttgcccattgtctggaagacaatgagagaggaagtgagccagccgtggtctttcctccccacttctggcttcagggctgggttggggggtgggcagggccgaacagctgcagtgggattgggcagcagagattttcctggctgcaatccggcaaaggggctgtctcttgggatcctttggcttttcctggaaacactgtcctggtcctttgcccgggttttagggaaggatgagtagtgtcgggatggtggaggcaggagaagagagcagcgtggtttgctgagatttaggggtcttggatctgccactggctcctgataggtccctgggcggtcagtggcctccagatttttgttgtgtcttcagtg

SEQ ID NO: 31294 - DNA, 2300 bp, Homo sapien
tgtttgcttttgaaaatatggtcacggtgttgatggatggggtagcttcccttccccttggagagaacgcacttcctctcccgaccggcagagggcagtagctgacaggagaaagggggactcggtaggagcgttggggcttaaggtcgggctgttttcctgggcgaggagaaagggggccgggccgggccgggcgcggtggctcacgcctgtcatctcagcactttgggaggccgaggcgggcagatcacctgagacgaggacgctgaggtcaggaattcgggaccagcctggccaacatggcggaaaaaaaaaaaatagctgggcacggtggcgggggcctgtaatcccagctactcgggaggctgaggcaggagaatcacttgaacccgggatcgcgccactgcactcaagcctgggcgatagagcaagactctcaaaaaaaaaaagggggtgggggttccaggagccggcctggcgctgacccacacatactttgcttcttcccgcagctggattactgggccagttacaggtcttgttcttactggacatccaaggtcaggcatggggttctggtgactttgagacacatatttctggggacgctagagtttttaatctggccattctgatccagcagacccattttgaaatagagggaataaccctgcttaaattgttccccggcccccggtccctgggtctccttccaggtgtgcttggtgccagggtaaggctgtaggcttctctgatgcaagggcacagtcagccaaggtttggggaaaagtcagctccagtgtaacgcaggcctgatcttgtccacctgacctcagcccccactccatccacacctgccatctccacaagctttgtgggctggatggcagggggatgaggaagagggactgaagttgggggtgtccttctccccacctcctggagttagaccaggaaatggctgtcccttttggcatcatcagggaggtcaagtgctgggagaggccctgggaagggagcctgggatgctgagtccccaaagccctgctccccagctgcccacccctccagccagctgaggctccctgagctggtggccagctggacagggacaagagagcagtgtgcaagaaacaggggctccctaggcatggctcagcagggaggggggtgcctggggagctggagagggcttcctgcagctgtcaggtgtgtctgggggccgtagcgaggggggtgtaagagcagctggcaccctttgaggagggccagagagatcatttgtcagttctagaaacatgagggccccacgggggcttgatggagtgtctctaggccccttaatctgaggccgtggtctgtgtcaggggttatacaggagacatcctacagctttggggtgggggcgtcccagcaggagtctcagggcatatttgtttgttttgagcgggtttgggaacttggccacctggtctgagtaggaggcaccctgggtgtttgggcagcagacagggccaccccaggggagggggtgaggatcctcaccccaccctacccttgctcttggctggactgccccactctggcaggctgccggccgcctatttccgtcgggcaccagggtaacagggccacatcagggtctgagccaggagacacccagccaaggctgggactcgggggtgggggagggtctctgaggagtcatcgcagggcccagcggagcctctggggtccaagcctcccactcaggctgtgtgttagtccccacgtccccacacaggtccatgagggagtccacagccctgcttcatacgtgctgtttgagtcacatagccgccaccctaaagtcccaggagttgtctgcaactgtgagggctggggtagaagccagagacaggagctttgtgtatggggaggcaggggggccagcgcgggtggctgggaggaagagtcccccccattcctgccgccctcttggcagtgattcagaaaggtcctttttcagccagtgtcagagctgctcagctggggagggagggagagagggagagagagaggcaggcaagagggagggcggccgggcgggcagttgggtggggaagccggggagtagggctggactgtgaccactgccctggagagaagacagaaacaggacagaggatcccggctgcagccagcgtgaggaaagctctgctccctgccagaccggccagctgtggaaacccagcggggcttgcagcagagcggaggggcccaccccgttcttcctcatttcccacccctggtgtgggatt

SEQ ID NO: 31295 - DNA, 2300 bp, Homo sapien
ggtgtgatagtgcacgcctgtaatcccagctactcaggagatggaggcaggaggattgcttgagcctgcgaggcagaggttgcagtgagccaagatcgcaccactgcactccagtctagggcacagtgagatcctatctcaaacaaacaaacaaaaaacatgtggggtgaagaggcttcagggctggaccatgggcctagcactgccagcagacacagccttgcctgccctcaggacctcagctgccaggcccccctgggagggagtgggcccccgtgtcctggagatggagagactatggacagtcatggcgtgtgtctgaatcactcccttttctttcttgggccctggccagcctcctccccagaccagtgtgatgtcaggcccagccgacctgaaggtgcagggttgcctggtgcaggttcctctgggatgaggttctgagggcacccagcctggccttgctccagaagcctgggctctgcgcacagaggggtgagttaaggctgactaaacttggtggggctgacatgtggaagcaagataatcctctggctgggggaggagctgtaagcccccctctcctcatcagtatgttcttttttccttcagggcttggagaagaggtaggtggaggtgggagagggcgggctgggaggtagggttggcatatattcctgagaatacggtagattgttttggaaaaatcctcttggccggaaattgcctgtcatgtctgcgccttggtgtggatttgtcacttcgcatgcagttggagaggctggagaggggaatggacagcagagctgggctggtttccagcctcttgtttcctttagctctgcagagtggagatataaagagacaagtgaagagcagagggggtgtacacgtggggtggattctcgaactcctagaggtagtttagatcctgtggatgtcttacgataggatggtactaggacgccagagatttacagggggaggtgaggcagggagaaagcaggaaagggcactggtttggatcagatcctttatccagccagggcaagaagggaggggcctggtattttctgccttgccttctacagtctcccggctttgcagctactcccaagactagtatgtgcctttagctgcagtaagatgccgaggagcttctgtacagcatagaagcaggcgttcgggggcctcgccggcagtcatccacctaccctggtgtgcttggggtgtggaaggggctgtgtgaggagagtgggccgtagagggagcctcacctagtgaccttccagggtctggctcagccttgacgctgcgtggggaggagaggtcacagcatctgtctctcctctgccccaacccagggaaggtgccctgagctcagccctaaatacctggtactaaagagtcagtggctgcttcagatgccaccagaatgagaagcggtgccttggggccccgggggagaggaagagcctctgccctgggacttcctgtgccggcgatggcctcgcgccagtgctgggcgcggcacccccgcgtgggcctgtgttgggcggcttttgagcaggagtccgggccctcgtgtcaccgctctgaagtcaaggaggtcagtgcgtgcccagcgcacagcgcgtgcggcgttgcgggagtggcgcgcggggaaccggccgcgggggcctcggggcgggggcgtggcctgcgcgggaggcgggcgctgggaggcggcgcggagccggctgagcgcagggccgagctgcggggcaggtgggcgcccggcgttctgggagcagagtggccgccggggcaggctgggggcggggtgggctgcagccccgggatgcctcggaggagggggtctcagatggagtcggacggaggcccctctgctgtgggcttctcggatggccccttaccgtgaatacgggggactcgtgaatccccaaggccccagttggtggctctggggccctggaggcgggctgagggctgagtggagcccggttccgcggccggcgaaggcagagccccggctctcggtgggggtcagcccggggctggcacagctggctcactgggagagggtgggagccgcgccccggagaggaggaacggagctgggacgggctgcaggagggaatggccgcaggccggcaggaggaggggcgcgaccacccggccgccggccgatggcggatgaggctatgggggctgagacgcagtagcggccctgcacttctggaggatgctcgaggcccggccccccaggacgcagggcagtgacgctgccggtgccgctg

SEQ ID NO: 31296 - DNA, 2300 bp, Homo sapien
ctcctggtggagctgccctgtaaatgtctggaaatgcgggtctggagccacaggaattcaggaatggagatagcacaaggtggtaataggagtccctggaggcataggtgaccccagggagcacagcatcagtggagaatagaaggaaacatgagttcaaaagtcttaggaaataccaacagttaagaagctgggggcggggggtggggggggggtgggggggtgagggggtgggcaggcgcagtggctcatgcctgtaatcccagcactttgagagagcaaggctggtagaatgcttgagcccaggagtttgagaccaacctgggcaacatgacgaaacctcatctctacaaaaaatacaaaaattagctgggtgtgatagtgcacgcctgtaatcccagctactcaggagatggaggcaggaggattgcttgagcctgcgaggcagaggttgcagtgagccaagatcgcaccactgcactccagtctagggcacagtgagatcctatctcaaacaaacaaacaaaaaacatgtggggtgaagaggcttcagggctggaccatgggcctagcactgccagcagacacagccttgcctgccctcaggacctcagctgccaggcccccctgggagggagtgggcccccgtgtcctggagatggagagactatggacagtcatggcgtgtgtctgaatcactcccttttctttcttgggccctggccagcctcctccccagaccagtgtgatgtcaggcccagccgacctgaaggtgcagggttgcctggtgcaggttcctctgggatgaggttctgagggcacccagcctggccttgctccagaagcctgggctctgcgcacagaggggtgagttaaggctgactaaacttggtggggctgacatgtggaagcaagataatcctctggctgggggaggagctgtaagcccccctctcctcatcagtatgttcttttttccttcagggcttggagaagaggtaggtggaggtgggagagggcgggctgggaggtagggttggcatatattcctgagaatacggtagattgttttggaaaaatcctcttggccggaaattgcctgtcatgtctgcgccttggtgtggatttgtcacttcgcatgcagttggagaggctggagaggggaatggacagcagagctgggctggtttccagcctcttgtttcctttagctctgcagagtggagatataaagagacaagtgaagagcagagggggtgtacacgtggggtggattctcgaactcctagaggtagtttagatcctgtggatgtcttacgataggatggtactaggacgccagagatttacagggggaggtgaggcagggagaaagcaggaaagggcactggtttggatcagatcctttatccagccagggcaagaagggaggggcctggtattttctgccttgccttctacagtctcccggctttgcagctactcccaagactagtatgtgcctttagctgcagtaagatgccgaggagcttctgtacagcatagaagcaggcgttcgggggcctcgccggcagtcatccacctaccctggtgtgcttggggtgtggaaggggctgtgtgaggagagtgggccgtagagggagcctcacctagtgaccttccagggtctggctcagccttgacgctgcgtggggaggagaggtcacagcatctgtctctcctctgccccaacccagggaaggtgccctgagctcagccctaaatacctggtactaaagagtcagtggctgcttcagatgccaccagaatgagaagcggtgccttggggccccgggggagaggaagagcctctgccctgggacttcctgtgccggcgatggcctcgcgccagtgctgggcgcggcacccccgcgtgggcctgtgttgggcggcttttgagcaggagtccgggccctcgtgtcaccgctctgaagtcaaggaggtcagtgcgtgcccagcgcacagcgcgtgcggcgttgcgggagtggcgcgcggggaaccggccgcgggggcctcggggcgggggcgtggcctgcgcgggaggcgggcgctgggaggcggcgcggagccggctgagcgcagggccgagctgcggggcaggtgggcgcccggcgttctgggagcagagtggccgccggggcaggctgggggcggggtgggctgcagccccgggatgcctcggaggagggggtctcagatggagtcggacggaggcccctctgctgtgggcttctcggatggccccttaccgtgaatacggg

SEQ ID NO: 31297 - DNA, 2300 bp, Homo sapien
caacacgaaaaaccctacacaattaaaaatgggcaaacgatctgaacagacacagcaccaaagacatacgtatggcaaatgagcacatgagaagatgcccgacaacatgagtcattaaggaaatacaaattaaaattgtaatgagataccactacagacatgagagtgtctaaaattagagactgaccacatcgagatgtggacatatcaaagacatggacaaaccagaactctcatacacagtggatgagtatataaaatgtacaaccactttggaaaacagtctggcagtttcttaaaggttaaatgtgtacctaccacatgacccagccattccggtcctagggatttacctaagataaataaaagtgtacatccacacaaagactaacaaacacgttcacagcagctttctctgaaaacccatcaacaggtcaatggataaacagactttggcacacgtgtacaatgactgttgatacgcgcaaccacctggacaaactccaaaatacttctgttgaatgaaagacgcgattccgtttacagtaaatgctgcaaactcagacacagtgacagaaagtagaccagcctgttacctggggtaggggatggcagaggagcgggggatggaggggttccacaagaaaacttctggggacaggggaataagggggatgttcactatcttgaaggtgggggtggtttcacgggtatatacacaggccacaacttattaaattgtgtgttttaaatatgctcagtttaccatatgtcattatatctcaataaaactgttatttaaaacaaacaaaaagaaacactgcatcttctagacgaagcacaaggtgggggctaatcccgggctcaggggccagagggaacagtctgacccttcctccctaacatctgccggggctccggggaggtgggcaccaggctccaaagggcctgaggtttctttactcacgacactgcaggggaagtcctggcccaccgcagacaccaagaaactgaaacctaaagacattatgttgcccaaggaagttacacagcttgtaagcgatataaccagatcaaaagcaatctgtgtgatgccaaggcctttctcccattcatctaccacaagttcaaaaacgccgacctgaaataagtaggtgaagattgtgtgtatgtgtttaaaacagaccgttctctccactgaagccagacagtgagagccactctggccattccagaagcgtcaggcaccgtgggcacagcagctgaacttccggtgcatgagtgtttgggtggcagcgcgacaggcatgggatgaagctgacaggcgggtttgagtttgtctgaggagcgggctaaccggctcctccagcagctgctacctccagcaccactccctctgcccccagaggagagcacccagtctggttcgggacaggggtctgggtccatctgactcacagccacacctcgggctggggcagaggagggtcctctagctaaggccctgggcaagcagcaaccctgcacccatccccacccaggggcaggggaagcaagcacctgacagtgccaggtaagaggcgaacagctctaggagagtaaggcccacaagcagcccgccaagccccctgggggcacgaggcggaatgagtaggtctggcactcaggccacgagggagtcaacaagccaaatacagcccccacccttggcccctacaagccctacctctagactgggctgggagctcctgtcctgacaggtgcagagcccatgataccacagcggcccatctgcaaacctccccagggtggggccacagaggcagcccagagccctggggtgcaagtgcaccctcctctcccgcccctctaacgctgggtcgtcccacccagagacgagagggctcaccagttgctctccctccttccgcccactaatcatccttggctctgggccctcagggtaaatcagctgtgacaggacggcgtggcagaagcgggccaggctcgtgccgtacccaagccactagctgtcacactcatctcagctcacgtgaccaacagggttacaagataaggttctgttaatcccacgctgccctcttcccttctgtgggacgtgttttgaggacttgtgtgttgactgcaccatgcagagcatatagcatggaggcacccctactgccatcggggggcaggtggaggggggaccgtcctgcagctcctccctggggctacccctctcttccctctgcacagacctggcagccacccagacgtcccgcctgctgcctagactc

SEQ ID NO: 31298 - DNA, 2300 bp, Homo sapien
tccaaagtgctgtgattacaggcatgagtcaccacactcggtctgtgccttagactttagagtcggaaagctggatttgaatcctggcttcactactaccagctgtatggcactgaacaagtcacttggccatgtagaacctcagttctgccacgtgtaaaatggggatattatgtgtctccttgggttgtcatggggttggatgagaagaatgcgaagtgcagggccttgcacagttgggctctgtgagtcttagcaatggccatgactgaggcagcgtgagggagactgggagaaaacctcctcagtttccttctcccaaatctgttgtcttccccactttctttcctgaagccaggcgacaggggggtggtcctggcccagcctcctggctccctggggaagggctgccattactggcagtgttagataatttagtagaaagttgccctgcccacctcgcaggcaagggaccgccacccaaatccacccagactgggcctcgtgtaggtttccagaagccacccctttctcattgccctactgcgctctggccaagtccctggggcccattgctggacagtgtgagcgcagaaagagccagccctacacagtttccgatgtgtctgatcttgccacctaccgtgaactgttttgttattacatccattttctagatgagggacagtaacaagggctgagtggccctgagcccttgggctccacgcgcccgctgcccagggctgcctccgtttgggctgggacatgggtctgtgggctgggaacagggcctgcaggctgccccgccgctgggaatccgagcgctgggttttctccttctggggtgggggcagggaggagacggctcaagtgcaggaatgaaggtccgcttgcctggggctgtttctgcccaagtcctcatcaggaatcgtcaggcctgagacaaaccctccctccttcaggagtgctccgttggccccggggaaagagaggtgatggtccgggtttctgggcctttggggtgccacggtgagattgggactagaaccccagcctcactggagtgaccccagaaaccttccagtccaacctcctcacttcaactgaggttggaacaactgagaccgggtggaagtgacttttacactcgcacagtgcaacggtagctactcggaatgagagacctgttccggcgctcctccattgcgcccctcgactcggcgggacttcttcacccagggcgccaccgctcctcggcaccgcaggaaggcgcaggccgggcccgggggagtcggggagagcggggtagggccccggaggctgggggaggagccgggggaggagcgatgaggccgggccctttaagagggcgggccgactcccccccaccccccaccccggggcggcgcaggcgcaggcgcaggcgggctcggggcgctcggcaggagggacggcgggcgggcgctcacctgcgggggccggcgcggggcgggcgcccggcgggccgacgttgacgcccggaggcgagggcggggaggcgggcgcgggactcgggggcggcccggggcgggaggggagggccggggcgggcgggcggtgtgagcgggcgccgagggcagcaccatctggaggggtgggagcgcgcggcctctggggggcaagcgagtgcgctgggccgagccggtcgggggcccccggcgggtcgcgcaggaggagcgcggcgggctgagccctgcgctgccggagcagcagccgcagcgcgtaggggttctcagctggggcccgcagcagctccgcgggctgaagctcggcgtggaggagcggggcggggtgggcccggcggtgcaggaggagggcggggtgggcccggggctgcaggagcgcggcggccgcggccacgagcccagccggggggtggtgtgggggccgccggacggcgcgggctgggggcgcccgccgtggtggacgggctcggcgggctggcctgtggcgcaggaggaggggctggggccccgcgggcagcaccaggagaagggcggaggcagccccgcagtgcaggagcgcggcgaggcccgggccggggtgcaggagcgcggggaggggagcccgcggaggctgctgcagcagcccgaaccggcgtccgagtccggggaaggcccccgcgagcgcagggaggggccggaaagttccggcgaactgggggagcggcagtgggagagcgtcgggcgggaggcggtggtcctgggagcggccccggcgccccgaagccgccccgagctggtggggagggcccggccggt

SEQ ID NO: 31299 - DNA, 2300 bp, Homo sapien
aaaaacttctagaatgaataaatgaatttgtcagggtcacgggatacaagattgctatattaaaatgatttgtattcttggttgggagccgtggctcatgcctgtaatcccagaactttgggagacagaggcaggaagaatgcctgagctcacaagtttaagaccagcctgaacaatgtggcaaagccctgtctctacaaaaaaataaataaataaaatcatttgtattatgtaacggcatcaaataattattaaaaattaatttacaatagtgctaaagaacatggaatgcttaggaaaaaacttaacaaaagatgttaaaatttttaatgctgaaaactacaaaatgttgctgagagaaattaaagatttcaattaatataccacatttctgaattggcaaaaatatatctcatgaattggaagattcagtatgattgtcttaatctgtttgggctgctacagcaatataggtggcttaaacagcaaacatttatttctcatgttctggaggctggtaagtgtaagattgaggcagcagatttggtatctggtgaggactggctttcctgttcatagacagctgtcttcttattgtgtcctcacatggcagagggagggaggcagctctctaaggtctctgttgtaaggacacgaatcccatttatgtgggatctatcctcatggccttatcatctcccaaagtccccttgtccaaataccaccacactgggtatcaggtttcaacatgtaaatctgggaggcgggcaaagacattcaatcaatagcaattgttaagatgtcaaattttcccaaattgatctatagagttaacacaactccatacaaaattcaaggcttttttacataaattgacaacgtgatactaagagttatatggaaatatggagggcctagagaagcttttattttttgagatggagtcttgctttgtcgcccaggctggagtgcagtggcgtgatcccagctcactgcaacctgtgcctcctgggttcaagggattctcccacctcagcctccccagtagctgggataacaggtgcctgccaccacgcctggctaatttttgtattgttagtagaaacagggttttgccatgttggccaggctgttcttgaactcctgacatcaggtgatccacccacctcagcctcccaaagtgctgggattaaaggcatgagccactgcgcttggttacaattttttattttattttattttgtattgtttgtttatttatttatttttgagatggagtctttctctgttgcccaggctggagtgcagtgacataatctcagctcacaggaacctccgcctcccaggttcaaatgattctcctgcctcagcctcccaagtagctggaattacgggcgtctgacaccacactcaggtaatttttgtatgtttagtagagacggggttttgccacattggctaggctggccttgaactcctggcctcaagtgatctgcccgcctgaacctcccaaagtgctgagattacaggtgtgagccaccgtgcccggccagaaacagttgtgttttttttttttttttttttcttttttaaagaagaacaattctttctcagcctttcggcaaagattaagtgtagtctatattattagtttagtatttgatatgtcctctatctgaggacaatatattaaatgggcgtctagagcaagaaaatagaataggagcttgttctgtccattccactcattaatctgatgttgcggtatctggtgcctggagaaggagatggagaagtaggagcagaagaaggagaaggaaggaaagaagaagaacaaagctagaggtattaccctacctgatttcaaagcttataaactctcaggtgtggggaaaagcaagagagatcagattgttactgtgtctgtgtagaaagaagtagacataggagactccattttgttatgtactaagaaaaattcttctgccttgagattctgttaatctatgaccttacccccaaccccgtgctctctgaaacatgtgctgtgtcaactcagagttgaatggattaagggcggtgcaagatgtgctttgttaaacagatgcttgaaggcagcatgctccttaagagtcatcaccactccctaatctcaagtacccagggacacaaaaactgcggaaggccgcagggacctctgcctaggaaagccaggtattgtccaaggtttctccccatgtgatagtctgaaatatggcctcgtgggaagggaaagacctgaccgtcccccagcccgacac

SEQ ID NO: 31300 - DNA, 2300 bp, Homo sapien
tgatgttccagtttgagggctgtgcagctggagacccggcagggagctgatgttccggttgtagggctgtgcagctggagacccggggggaagctgatggtccagttgtagggccgtgctgctggagacccaagggtggagctgatgttccagtttgagggccgtgcagttgatgacccggcggggagctgatgtccaagtttgaggtctgtgcagctggagacccgcgggggagctgatgttccagtttgatggccatgcagctggagactctgatgggagctgatgttgcaatttgagggccatgcagctggagacctggcggggaggtgatgttccagtttgagggccatgcagctggtgacctggcagggagctgatgttccagtttgaggcccgtgctcctggagacctagcggggagctgatgttccaatttgagggccgtgcacctggagacctggcggggagctgatgttccagtttgagggctgtgcagctggatacccagcagggagctgatgttgcagtttgagggccgtgcacctggagacccggcgggaagctgatgttccagtttgagggccgtgcagctggagacctggcggggaactgatgttccagtttgagggccgtgcatctggagacctgggcggggagctaatgttccagtttaaggccatgcagctgtatacccggtggggagttgatgttccagtttgagggccgtgcatctggagacccggtgaggagccagtgttgcagtttgagggccgtggagctggagacccggcggggagctgatgttccaggttgacgcggtgtagctggagacccggggggaactgatgttgcagtttgagggccgtgcatctggagacctggtggggagccagtgttgcaggttgaggaccgtgcagctggagaccctgtggggagctgatgttcctgtttgagagccgtgcagctggagaccctgtggggagcagatgttcctgtttgagagccgtgcagctggagacccggtggggagctgatgttgcaagttgagggctgtgcacctggagccccggggtggagctgatattccagtttgagggtcgtgcagctggcgatctggtggggagctgatgttccagtttgagggccatgcagctggggacccggcagggagctcatgttccagtttgcaggcagtgcacctggagacccggcggggagctgatgttccagtttgaggtccgtgcagctggagatctggtgggggagctgatgttccagtttgagggccctgcagctggagacccatggggatctgatgttccagtttgagggtggtgctgctggcgacccaggcgggagctgatgttctagttttagggacctacagctggagacccggggaggagctgatgttccctttcgagggctgtgcaggtggagacctggggaggaactgatgttgttctaatttgagtgtggtgcagctggagatccagggatgagatggccctgcggttcaaatatgagggtcccggagctggactctacgtgaggaaccaatgctgcctctgatgtcttaggttgtggagctggaaactcgcggaggagctggtattggtgtttctagttgagggttgtggtatttccagggtttcacaaaggccagattttatttcagttactcagaagagaaagaaaatgtcttctgaaagaggtgaattcaatcattaccaatagaaaaagtatccactgtatttatctcttataccaacagaaaaatataacattttcccccttagaataatatatacatatatataaaacttaaggttctattgtatgtagccgaacaatacaatctggaaaccagcatgaaactctattattcacatgttaaaatgttgaaactatgaccaaaatatgaaaactgctagagctatcagaaagacacaagacaaaaagcttcttgcatatgtataaactaaatgtgataatctcaaaaaactgttcaaaattataattactttccagtttaaagacttcagtcctaaattaaaaaaaaaacttctatatacaaaccactgatttgcccagaccaaaaaaagaaagaaagaaagaaagagaaatcagcggtaaggtaagcaggacccagaggagctgatattcacagttcttacatggacaactctttcaggaattatccataaagtactttattttacaacctgcttttcttgtaaaactaaaggtgcacgtttttacataaaagttttacacagtgttaaaaccagaactgtg

SEQ ID NO: 31301 - DNA, 2300 bp, Homo sapien
cccagagtttccgactgttagcgtgaatcacattcacgtcaaaacttctttttatacaagaactaaaaggcaaacgaaatccctgctccatcactgcctgtcccgggtcgcggcgcgggacatttcctccaagcgccttcccggccccgcgcgcaggtggcctgcgccggaggatctcggacaacgcgcatttcctgcgcccccggaagcggcggtaacgcctggccctgccccggcagaggcggaagtggtgtcgctctgaggtcgccagtcgccgcacgcgcctcagcccagccgcgcgccttggcccttggccgcctactcctaccgccccggccttgggcggccctgggcctgctgcgggcgcggcgctgcccgaccagagcttcctgtggaacgtcttccagagctgccacctggcaccgccccggcacctcccgcctcccccgcagctgccccggacccgtgtcccgacccccgcggccaaccccgttccctgccggttgccccgcggcctcccccgtcacctgccgggtccccagcggcctcccccgtcccctgccccgacctccgccgtctccaccgcccctgcccggacccccgcgggcgcccccgaaccctaccccgaccgacgcggccgcccccatcccctgccccgacccccgcggccgcccccatccccttccgggtcccccgcggtctcccccgtccgctgcccggtctcctggggccgcccctgcctcctgcccggtccctgtcctgtgcgtcgggcgcttcccaaggtgcagagggcgccactgcatacccgaggtcgcggccaccggctcctgggccaggccccgtttctcgcctcgagccgtcgggggagggtctccagggtgcttgtttggggaaagcggaaacagactgtctgggccgctgttaaaatgtcagcagccaaggaagaagcagcgacctggcgtctgctcgggccaggtgacctttatggcggcgccttctgtccctggtcgcttttccactgaatgaatgaccgaaactgtagtaactcatggccagggaatggcttagttatctgagggaatcttgtcttgtctgtgaaaaagggaaactggtgcaaatgggaattcagacaggtcaggaggggaaggaagggaaggattgaggtgggaaaagagagagaaagatgattggcctcttaggggaagaacacacttggacgtggctcctggggcacttccttgattccgctgtactcgtcagcgggaccggagaggcggaggttccaggagggagccttccagagtcggtgcagggttgacaggagacgtttgttttgcttttcctgaactttcgatcgccagcttgtttggtcttcttgatgttatagggttgatagagaggagtggagtgatatcggacacccagcttcggcaagctctctccaagggtgagtgggccagtgggacctgggtctccggaccaagaagccgcgagcctgccctgctcacagtggataactttctttctgaagttgattttccaaggacaaaggaatcattagggcaaattattattactgcttcatggtggagatgcttctggtttattctgtggctaccgctgttactgcttggagtgcctcaccgagccagctaacaacggcgtgcgtgagcacagggaaaggcttcttgagaaatgaaaactaggttgtaggtttaggaggggaataggaaggttagctctgtccagccgaaagccttttggtaagttgggggtccttgaatttcctgggtgactgcatcttggtgacttctctgaatagaccttcgagggcactggggggtgattgttggagggcttggggagctcaggcagcacttgtgtgggaacgtggctgttacaggaactgcagaaactgggactgggttcctggggaaaggattgggggtgttggaggcgctggcaggggagttatggggaggcgttcttatcagtgtgcgaatagtgggcgttcaggcagcgggaaatccgggtccttgcgtgttgtgagctccctggagttacgttcttgccagtttcagctcaattgatccccctcccctgagctatcattggatacattttacttcattgaacacctgactgctgctttttctgtaatccctcaggggcagtcatcttttctgattctgagtatagtttgcctttccagatccgtgccatttaagctagaaaaggggtcagttttgagatgtgaaaatgttgaaaggctcctcgttattagtgggaagtatctgatg

SEQ ID NO: 31302 - DNA, 2300 bp, Homo sapien
attgtagggacagggtctcactgtgttgcctaggctggtctcaaactgctgggctcaagtgatcgttcctccttggcctcccgaagtgctggaattataggtgtgaaccaccatgtctggccttattgtagtttatttctaagttcaaattaatgttggtgcttttcctcctttttcttggcagatggtttgctaggtgagtgtgtcctcgattctttaaatcagggtccccagtccccaggccacagatcgttaccagtccatggcctgttaggaaccaggccacacagtaggaggtgagcagccagccagtgagcattactgtgtgagctcggccccctgccagagcattactgtgagctccgccccctgccagagcattactgtgtgagctccgccccctgccagagcattactgtgagctccgccccctgccagagcattactgtgtgagctccgccccctgccagagcattactgtgtgagctccgccccctgccagagcattactgtgtgagctccgccccgtcagagcattactgtgtgagctccgccccctgtcagagcattactgtgagctccaccccctgccagagattactgtgtgagctccaccccatgtcagagcattactgtgtgagctccgccccctgccagagcattactgtgagctgcaccccctgccagagcattactgtgtgagctccgccccgtcagagcattactgtgtgagctccgccccctgtcagagcattactgtgtgcgctccgccccctgccagagcattactgtgagctccaccccctgccagagcattactgtgtgagctccgccccctgtcagagcattactgtgtgagctccgccccctgtcagagcattactgtgtgagctccgccccctgtcagagcattactgtgagctccgccccctgtcagagcattactgtgtgagctccgccccctgtcagagcattactgtgtgagctccgccccctgccagaacattactgagctccgccccctgccagagcattactgtgtgagctccgtcccctgccagagtattactgtgtgagctccgtcccctgccagagcattactgtgtgagctccgccccctggcagagcattactgtgtgagctccgccccctgtgatcattactatgtgagctccgccccgtcatatcattactgtgtgagctccaccccctgtcatatcattactgtgtgagctccgccccctgtcatatcattactgtgtgagctcctcccccggccggagcattactgtgtgagctccgccccctgccagagcattactgtgagctccgccccctgccagagcattactgtgtgagctccacccattgtcagcattactgtgtgagccctgcccccatcagatcattactgagctccgccccctgccagagcattactgtgagctccgccccctgccagagcattactgtgagctctgccccctgtcatcattactgtgtgagctccgcccccatcatcattactgtgtgagctccgcccccgtcagagcattactgtgagctccgccccctgccagagcattactgtgtgagctccgcccccctgccagagcattactgtgagctctgccccctgtcatcaatactgtgtgagctccgcccccgtcatcattactgtgtgagctccgcccccgtcagagcattactgtgagctctgccccctgccagagcattactgtgtgagctccgcccccgtcatatcattactgtgtgagctccgccccctgtcatatcattactgtgtgagctccgccccctgtcatatcattgctgtgtgagctccgccccctgtcatatcattgctgtgtgagcctcgcctcctgtcagatcagtggtggcattagattctcataggagtggaatcctgtcgtgaactgcgcatgcgaaggatctaggttatgccccgcttatgagaatctaatactgatgatctgagatggaaccgtttcgtctccaaaccatccccacacttgtcagtggaaaaagtgtcttccgtgaaaccagtccctggtgccaaaaaggttagggactgccggtttaaataaccaaatgctaaaagaactggcatagaagtaaatgggctgctgctttatttttaggctgttctttttagagaacaatgacagttatttccaagtttgtcattagaaaataatattaggttggtgcaaaagtaattgcggtttttgctattgctttcaatggtaaaagccacgattacttttgcaccaacttaa

SEQ ID NO: 31303 - DNA, 2300 bp, Homo sapien
gcacagcgtcttgggaacagccagccgagggtgtggtaggggggttgcagcttgttccacacaagcacagttcacccgtgtggcatttccgctgggcattgagattcagaaatcatgaagatagaaagcttttacccttaagcttttcataacttgtaagggagagtcgtataatcacttagctgtgtctgtggaagttacctttggactctcactatcatctagtgtgtctgtgattcaggcagtaggtcattttcagaatttatcatgaaggccatttcctgatagtatagagaggtcacacttgcttagcacaagtctatttttaatgtttccgggttcaggttttttgttttgtttttgttgttctgagatagagtctcatctcttttgcccaggctgaaatgtggtggctcgatctcgtctcactgcagcctcaacctcccctcggctcaggtgatcctcccacctcagcctcccgggcacatgccaccatgcctggctaatttttgtatgttttgtagagacggggttttgccacgttgcccaggctagtcttgagctcctgagctcaagtgatccacctgtcttggcctccccaacaggcatgaaccaacacgcccagccagtttcagtgatttttcaagaaatacgtactcattttagaaagtacaaagagattgaaataagagctcactaaccagagatgacccattatggtttaaatttctttgtatatgtgcctaccttttcctgtgtgtgcatatttaatacacggcttgagtattccttctctgaaatcgttgggaccagaagtgttttggatttcaggcttgttcagactttggaatatttgcattacacttactgtctgagcatccctaatgggaagatctgactccatagcacatttcttttgaatgtcatgctggtgctcagaaagtttcagatttgggagaatttcagatgtttggattagggatgttctacctatataaatatttactttgaagtagaaaaactggaagtagatagtttaaacatgaagtgtcttggtatagacaagggttctcccacttttcatgatgggagcatttttgtaaagcaaagcactgagaatctggtacagtgtcattttcgttgctctgttccactctaccgatctgccgtcatttacagtcccctgttgcgcatgtagatcatttttgaatttgttattggaaaatactgcagcaaataccttaaagtttacatgccgtaaatctacttttatagttaaaatttttcaaaaggaacacaagagatggctttttgtacatttttgtgcttaacttaccactgacttcttttcaaggtcactgtggaatatagacccataatcgacaaaactttgaatgaggctgactgtgccactgtccccccagccattcactcctactgatgagacaagatgcggtgatgacagaatcagcttttgtaattatgtataatagctcatgcatgtgtcaatgtcataactgtctttatacgcttctgcactctggggaagaaggagtacattgaagggggattggcacccagtggccggggagcgtggcactttgtcccttgcttcattcttgtgacaagataaaactgggcacagctcttaaataaaatataaatgaacaaactttcttttatttccaaatccatttaaaatattttactgttgtgactttagtcatatttgttgacctaaaaatcaaatgtaattatctttgtattctgttacatcaaaatccagatattttgttgtagtttcttttttttttttttttttgagacaggatcagtgcagtggtgcagtctcagctcactgcagcctcaaactcctgggcagctcaggtgatcttcccgactcagccttctgagcagttggggctacaggtgtgcaccaccacgcccagctcatttattttgtaattgtagggacagggtctcactgtgttgcctaggctggtctcaaactgctgggctcaagtgatcgttcctccttggcctcccgaagtgctggaattataggtgtgaaccaccatgtctggccttattgtagtttatttctaagttcaaattaatgttggtgcttttcctcctttttcttggcagatggtttgctaggtgagtgtgtcctcgattctttaaatcagggtccccagtccccaggccacagatcgttaccagtccatggcctgttaggaaccaggccacacagtaggaggtgagcagccagccagtgagcattactgtgtgagctcggc

SEQ ID NO: 31304 - DNA, 2300 bp, Homo sapien
gaatgggaggggtcccgccatgctggaaagtggtccgggagtttcttaagaagttaagcacatccttaccatgtcatccagcaaccccactgctgaaatgtcccccaagggaaaacttaaacgtgcacacacaaacctgcacacaagtgtttaggcctcattcctcattgccaataactggaagaaaacaaaatgtccatcggcaggagcaggagaaggcgtgaaccaacgcggatgcttccacataggggacaccaaccagcagtggaaagatgcacccaaatgccccaggtctcccaggctacatgcccggtgaaggaagctagtttcggtggccacaggccgaaggatgccaacacatgacatcttggagaagacagtgtaccgtgtcggggagcagggcagtggtttcgaggggctacgggtggaggggcgaatggaggagctctctggggcgatggcgtgagcacctgcacctcactgtgggctgctgcggctgaggggctgtacggcaaacagtggcttcagtacatgcagactgaaggaggaaggctcccacaactcagagacagagggtgtcgcctccatgaaacaaaaacatatttaaaaaaaaaacctcttaaaattaagaaaaaaaccacaaaaagtatttcataagcgcattgactttgagttgacataatctacctgggagcatggaactgaaaccacaggcttggcaatcccggagggagagggtggagggtttagacctcaattgaagggctcagtacctggctataggaaataacatttaaaaagcagcaggtggaaataatttctgctgatgaggttgcatctctccagatagccggcagagtaaattaaagcaatatagtcttgctctgttgcccaggctggagtgaagtggcgccatctccgctcactgtaagctccgcgggagaatctcttgaaccctggaggcagacgttgcggtgagccgagatcccgccattccactccagcctgggcaacaagagcgaaactccgtctcaaaccaaacaaaattaggtaactaacccaggactaaaacagcataactttaaaaaaataagtctaggaggtatgatgttcattccctgcaagccaataaaggccacgtctggggcatacatctaaaaaaaataatcctaaagagaaagttatggtcacaaatatgttctgtacggtgttattaagagcaaaaataggaaacaacccaaatatcaataaaatgggaccgaacccttgcaaatttactaaaataactcaaaattgttaaacatgatgcacaagacgaagattttaataaagtgaaaaggcaggaaacataattactaatgattattggtttatttttcatgccacttcattccacaaaaagatttcaggtatcttacaaaaagacacactagaaatattaaaatactatctgaaccagaagcagaatcagggtaagctagcagaaaggcgtatgagccaaagggatctacccagctttcaaagctgaccacggccgtgcgcagtggctctgtctgtaatccccgcacttcgggagaccgaggagggaggatcgcttgaggccacaagttcgagaccagcctgggcaacagagcaagattcccgcctctaccaaaaatttaaaaatcagccggaagccagaggctagggacatggctgaggatcgctcccgcccctcggaggccagaaaccgagggtcactcccgctccctagaggccggaggccccgggccgctcccgcccacctccgcggacgagcgccgccccttcgaccccattccctgaggtctggacgttcaggccctctcggtctgggagatcccggagaaccacccacggggctttaaaaaaagttggtgcccaacatctccccgaaatagggcccgccctatctcggtcggggagcgcgggacctccgtggccacccagcgccacggtccgcgggtccgctttgcgcaggcgcggcgtccccgcccattagaccccggcccgggcgtcgcgtggtgcgcaggcgcaatgtcccccactagcgccccgccttgacccggccgtggtgcgcaggcgcagtctgcgcagggactggcgggactgcgcggcggcgactacagacgtgtcgggggtccggggcctgtcgcggttgccaagcgctcggcgcctggcgctggcgctggccaaggcggtgagtccctgccgcggaccggggcagggcaggcggggggcgaggcggcggtaggagcgggacggtccccagcgggtccgag

SEQ ID NO: 31305 - DNA, 2300 bp, Homo sapien
tgtgagacgtgtgattcacaaatgtttatttctagaccatagtttgtgtttcattctctttggatttttatattgctttatagaattataattttaaatttatgactacatttaatttgtcaatcttatgaatcatgcttttggtgtcatgtctaagaacttttcgcctaaccccaggccatacgaattttcccctgtgtttttacctaagggtttgatagcgttaggttctccatttaggcctttaataaatgttgtgtaacattttgtgaccgccatggccatacctttctccatctctcacggtatcgtgggcatttgcagctcccagtgcgccgtgctgttcccgtcttcttggtctgctcctcctgtcatacctttctccgtctctcacagtatcgtgggcgtttgcagctcccagtgccccgtgctgttcctggcttcttggtccgctcttcctgtgagttccagggcacgtcttagtgctggcactgtcctggtccatcgggggtcccatgagcttctccatgtgggaaggttgggactgtgatgttgacgggatgccctgtgagtcaggaggaggtgctgacgggggtttccatgtaggagagagaggtgtttggtattccggatggggcagacttgagaggggacaaacttgagaaatgccaccaatgagaagtgcaggcacagcaggtctcggggctgcccagccgtgtgggagccaaacgtggatgtgtcagtggccacaccaggaggtaaaccctcaaccaagggcctctgggtgtccaagaccaagtcttgctcaagaggtgtgttcagctgagccaaccatggcagaaatgcataagggagatcccacggttcctctgtttaaatcccctgctaatcccaccagactcagagaagcagccaagtcctcacagcagcctgcaacccccgcctgactcggcctcctcttggctctgattctctgtacccttctatccctgtctcttcttccatcagagaggagatccggcacgtttatcctggtggattcaaacccatctttgccccatatatagtcaccggaatgaataggtataatctagaaagagtccttttgaaaaagaaaaaagcaggccgggcatggtggctcatgcctataaccctgcagggaccagccccacagggtcggtgggtctctccctgtgtgcggcgatgagagagtgtagaaataaagacacaagacaaagagataagagaaagggcagctgggcccgggggaccactaccaccaatgcacggagaacagtagtgccccgaatgtctggctgcgctgttatttattggatacaaggcagaaggggcagggtaaagaatgtgagtcacctccaatgataggtaaggtcacgtgggtcacgtgtccactggacagggggcccttccctgcctggcagccgaggcagagagggagaggagacagagagaaagacagcttatgccattatttccgcatatcagggactattagtatttttactaatttactactgctatctagaaggcagagccaggtgtacaggatgaaacatgaaggcggactaggagcgtgaccactgaagcacagcatcacagggagacggttaggcctccggataactgcaggcgagcctgcctgatgtcaggccctccacaagaggaggaggagcagagtcttctctaaactcccctggggaaagggagaccgccccccccttctttcccggtctgctaagtatcgggtgttgttccttgacaccttttgctaccgctggaccacgatccacctggtaacgggcgtcttcacagacgctggcatcaccgctagaccaaggagccctctggtggcccggtccgggcataacagaaggttcgcactcttgtcttctggtcacacctcactatgtcccctcagctcctatctctgtatggcctggtttttcctaggctacgattatagagcaaggattatcataatattggaataaaaagtaattgctacaaactaatgattaatgatattcatatataatcatatctaagatctatatctggtataactattcttgttttatattttattatactggaacagctcgtgtcctctgtctcttgcctcggtgcctgggtggcttgccacccacataatcccagcactttgggaggctgaggtgggagaatcacctgaggtcagaagtttcagaccagcctggacaacatggtgaaaccccatctgtagtaaacatataaaaattagctgggcgtggtggtgcgtg

SEQ ID NO: 31306 - DNA, 2300 bp, Homo sapien
tttatcatgctggccaggctggtcttgaactcctgacctcagaagatccacctgcctcagtctcccaaagtgttgggattacagggattagccatcgcatctggccacctaaacctatgtcctccatgaggctataagattttcacctgcaaataccagcattgtttgtttctttttaaaagatacttcagtcaaggaaaggcagaaagccaggcatgttagctcatgcctataatcccagcactttgggagaccggaggcaggaggattgtttgagcccaggagttcaagactagtctgggctacatagcaaaccctgcgtcaaattaaaaataaaaaataaataggctgggcatggtggctcatgcctgttatcccaacattttaggaggccaaggtgggcagatcacctgaggtcaggaattcgagacaagcctggccaacatgataaaatcccgtcactcctcaaaatacaaaaattagcctggcatggtggcacacacctgtagtcccagctacttgggaggctgaggcaggagaatcgcttgaatccggaggcagaggttgcagtgagcccgagatcatgccactgtactccagccagggtgacagagcaagacactgtcttaaaagtaaaaataataaaaataaataaaattaataattaaagaaataaagaaggaacaccacaggggagcaggcctggtgtctgaatgttaaggtaggccctctgtggatgtgcatccttaaccttttcctgattagatcattaaaggtgcagcaatgctcctgctcatatgacttttttttttttttgagatggaatcttgctctgtcgcccaggttggagtgcaatggcgcgatcttggctcactgcaacctccgcctcttgggttcaagcgattcttctgcctcagcctcctgagtagctgggattacaggcgcgtgccactatgcctggctaattttttttgaaatttttttagtagagatggggtttcaccatattggtcaggctggtctcgaactccagacctcgtgatccgctcacctcggcctcccaaagtgttaggattgcaggcgtgagccaccgcgcctggcaactcatatgacttttaaacacttctctttggggagagagattttagagaatgggagtaaagagaaaggcggtgagaatcccaagtactttctctatcttagagcagaagaaataaagggaagagtaaaagcccaaggcccagaaacggatttgcttcttaaagggctgttctgtgtccctacgggcctgaaggtcagtttatgtgcaatgctttttaaggtatgggttgctttcttgcattgtagctactacctccctggcctgctggttactgaccagagggagggagagggtgtgattgtttggaaagagtttaaacagtgacaagaattgaattttatttatttgttattcattgcacaatccaataacagcgatggcaatgaaaacgaaagttaatctacaatcctatcaccctattaagtcacttgtttctattttcccttttattccctcatgcattaaacattacgcaaagcactccgctagtcttggttaaagtgcagcttgtatacattctgaataaaaatttgcattttgcttttcttttcctttttgtatttctgaggctgcaaaatacatcttcacaagagtggctttaatagttacctaacattccatcctgcacgtacatttcaaggcactgccgcagtgcaatatccaacatttaagcgtcaacgccaacagattggacctagcactgcagggactggaggttggtcaaggtcaggcggaggctgccaggctaccagggtggaggaaggcgccgaggcagaggccagtgcgcccatcgcgcggctcctcggggcacctgctgccttggcgccttttcccttggccttcgcctcgcccgcagcgccctccgcatagggccccgcccgctgcgcgcgcatccccgccccccgggcgatctgtcagagcacctcgcgagcgtacgtgcctcaggaagtgacgcacagcccccctgggggccgggggcggggccaggctataaaccgccggttaggggccgccatcccctcagagcgtcgggatatcgggtggcggctcgggacggaggacgcgctagtgtgagtgcgggcttctagaactacaccgaccctcgtgtcctcccttcatcctgcggggctggctggagcggccgctccggtgctgtccagcagccatagggagccgcacggggagcgggaaagcggtc

SEQ ID NO: 31307 - DNA, 2300 bp, Homo sapien
cagagctataaaaacagacatccaccaggcacggtggctcacgcctataatcccagcactttgggaggccaagatgggtggatcacctgaggttaggggttcgagaccagcctggccaacatggtgaaaccccatttctactaaaaatacaaaaaactagcctggcatcatgtcatgcgtctgtaatcccagctacttgggagactgaggcaggggaatcgcttgaacccgggaggcagaggttgcagtgaaccgagatcacaccactgcactccagcctgggcaacaagagcaaaactccatctcaaaaaaaaaaaaacaaaacaaaaacactcagacatcaggctggccgccgtggctcatgcctacaatcccagcactttgggaggccgaggcagggaggatcccttaagcccaggagttcaagatcagcctgggcaacacggcgaggccccgtctctactaaaaatacaacaaaattagctaggtgcagtggtgcttgtggtggtctcagctacttgggaggctgaggtgggaggatcacttgagcccagaaggcagacagaggttgcagcactgcactccagcctcggtgacagagtgtgactccaagtcacaggaaaacccaacaaaacacagacgccgcccccacctgctttgcccgactctgcagagtcccacccggatgatctgggggagggaaggagtttgtctttttcgaagccctctgtggttttcggatgagcggatttagggacagtctgcacatgtctttcactcctgctatggaccccagaacccaccacagtgcctggctaaattgcacgtgcttaaataaatatggaacaaatgaaccaactgacctcttttgatgttcccagccattctgtgaggcagaggatcaaatgggtattattgtccccatttgacagaggcccagagaggtgacaggaattccccaaggtcacagatggaggggcccgaggctgcctcccactaccaggctgatttccagaggcttaaggtgggggctgagtttaaggaggggaaaaagaaaaacacatccccttacctagtgggtagagaggagtaggggcaagggagagaaaagaggaaacgaaagaagaggggaaagaggaaagaagaaggggaaggttagagatgcctaaaagcatggaactggaggaaagacatcaaaataacaaagagcaagactagccgcgtggtggctcacgcccgtaatcccagcactttgggaggccaaggtgggcagatcatttaaggtcatgagttcaagaccagcctagccaacatggtgaaaccctgtttctactaacaatacaaaaaaattagctgggcgtggtggtacatgcctgttatcccagctactcgggagagtgaggcaggagattcacttgaccctgggaggcagagtttgcagtgagccgagatcatgccactgtactccagcctgggtgacagagtgagagtccttcgaaagagagagagagagaaagagagagagagaggaaagaaggaaggaaggaaagaaaagagagagagagagggagggagggaagggagggaaatgagggaagctaagagggggttgggctgcaaatcctatctctgggcagcgggtctgggcccctcgtccctgcagcaggtctgggcccctcgtccctgcagcgggtctgggcccctcgtccctgcagcgggtctgggcccctcgtccctgcagcaggtctgggccactcttccctgagtttgatgcttggtttggagtcagggctctgagcccagagtccctgtggaaaacacatccctccactgactatggcctctgtcccacaacctcccccctccccaggcctgtgtgtgtttagacagcttgccctgcatttttagaacaatttttaacttgtaggctgtacctgcggaaccagaatgtctggccaagacctgttacctaacagcctcagaccatttgggtgccaacagcaactgcagctctggcccaagccaggtgtgggctgacctagccagggagcggggaagtgaaaggaatgggtcccttcccactcagagggcggagcccccacttctggtgagagaaagctgagcagaatggatctaatctgattcctccacccagaagcccttaaaatgcagctttgttttaagccttcttgaagatttgggctagatctagaaaagaacctcaccacggaggatgtgcaaagtacaacacgtgaccccggagacggaagctcttctctacctccgtaaagatgatctct

SEQ ID NO: 31308 - DNA, 2300 bp, Homo sapien
catggtgaaaccccatctcttaaaaatacaaaaattaggccgagtgcagtggctcactcctgtaatgcccgtactttgggaggctgaggtgggtggatcacctgaggtcaggagttcgagaccaggctggccaacatggtgaaactccgtctctactaaaactacaaaaaaaaaattagctgggcatggtggcaggtgcctataatcctagctacttgggaggctgaggcaagagaattgcttgaacccgggaggcagagattgcagtgagctgagatggtgccattgcactccagcccgggcgacagagtgagactcagtctcaaaacaacaacaacaaacctcatctcttccagtccccctcctcccacaccctggcaactgtgaatctgcttttgatctctatggatttggctactctggatatttcatgtaagtggaaccatacaatatgtggctttttgtgcctagtttcttccattttgcataatcttttcttttcttttattctgtgtttttgagacatagtttcactcttgtttcccaggctggagtgcaatggtgagatctcggctcactgcaacctccgcctcccaggttcaagcgattctcgtgcctcaggctcccgagtagctgggattacaggtgcgcaccaccacacctggctaatttttgtatttttagtagagatgttgcaggaaactgaggactggcaagactgagacagagaacgagaggactgtttatttcaggtacgcactggcttagtggactgtcatctaaaaagctgagcatcgaacaaagacagagcggggtttttataagcagacttccaataaataaaagtagttaatcatatgacaggtcacatcatctatagcataacttgtggccttgcatagctggtgactttgtagctgcattgaaagaaaaacaagaactggctaaatacagacatttgtaaaacataatcatgcttaagaaacctgggaaaggagtaacagtcaaagaatttgtctttcttttttttcttcaactttgctctggaggcgaggggtgtctggagcttattcttttggccttggcctcttaaacagcgttatcttataactgtccttgaagtgagcttgctgggcagaggaaaacttgttcttttctttttaacttttgccttgcttgttacttgtcttggagtgaatgaatgcatatttatttttaaatttctgcctcagtttcttctttttgaggccttttataaaggaagtttaatatggctcatgcttgtaatcccagcactttaggaggctgaggtgggtggatcacctgtggtcaggagttcgagaccagcctggccaacatgactaaaccccgtctctactacaaaatacaaaatgagccgggcatggtgatgcatgcctgtaatcccagctacttgggaggctgaggcaggagaaccgcttgaacccaggaggcagaggttgcagtgagccgagattgcgccattacactccagcctgggcaacaagagcgaaactatctcaaaaacaaacaaacaaacaaaacaaaccaacaaaaaaacccagcaactttctttctttttttttttttttttttgagatggagtttactctgccacccaggttggagtgcaatggcgcgatcttggctcgctgcaacgtccaccttccaggttcaagtgattctcctgcctcagccttctgagtagctgggactacaggcgtgcaccaccactcctggctagttttgtatgtttagtggagatggggtttcaccatgttggccaggctggtctcgaactcctgacctcgagtgatctgcctgcctcggtctcccacagtgctgggattacagggattacagcgccggctgaaaattaccaactttcttcccatgtgtttctccaggtcatattttctccaacaacatcagcctctcaggggcaggaactcccggttccccagcacatgtcggggtgggggtggggtttgctgttggaagtgcctgtcaccggaggcagctagagcagggctgcagacagttctgctgaggtcccccagcctctgtgatgtcacactgggccttctttcctttcaccctgggctgcggctctgaggctgccgtggccatggagctctggaagctgggctgggggaggaagcctggtggctctgacctcccctggaggcgaaggaggcccagccatgacactcttaacggatgccacgccgctggtgaaggagccccatcccctgcctctggtcccacgtccctggttcctc

SEQ ID NO: 31309 - DNA, 2300 bp, Homo sapien
catttttcaaggtcgtgtgatcagtggatgtggcattttgtgtaagatttacagtggaatgctgcttatcttaatgctttcactgtccttcaatgagcaggtaagaaaaaaaaaggaagaaagaaaaatgttgggggggggaatgcattagcgaatgcattagtggagttggcagccgagtcccatccctcctctgtctcaataagtgtcagatgatgctatcatataattttgtgggaaaaaataggccaaagaaatgaaattcagaaggacttattctttttggttctaaaatcagtttctgagagctggcaggccccaactgccaagaggagaccctggcggccacagctcatcctctctgaccaagccttagctggggatgggccggcctccaggcagggcctcccgctggctggatcccgggccacactgtacagaagacaaccccgtagagaccttgggtggggcagaagcccccttccctcactgacaccctgccggtctctcctggggtctcccagtctctgctgcccagtggggaagcacccgtctcagcccaaccgcagccccccccggctccctcctgccctttcacctttcctgccattccccactgtgtcctgaagtttctaagaacatccccagcgccctgttgtcagctctgggaagtctaaagttcagggctttgggtaattaaacccaaggcctctcagtgggctgggggtgaatgacctggcgaacgtgcctgcggagatgctgggaggaagctgagtcagtctgcgtctttgtcagggtgggctgaggccagtgaccctctgggggtcagggcccttgcaggcctcttccttccctgacctccaccttaggaggcagctggcccctgagacgcctgcctcacgacattgtcctgtcccaggaactggactttaggaggaggggaagctggagggggatgcagcttgactcttgggagagactttgaggtgtctgggcacaggagtggggagtcctccgggtaccccatcagggactgcttccactgcttgtatggcctcaccagcccagcgcaggaagccccctctcccttcccagaattgaccctctgcaccctctcctgggccctcttctcactacctccatctccaccatgccccaacagagcccctcccccaggcccctttggccgctctccacaccccacagctttctgtctgacctggtttcttagcctctctggacctcagcctccttatctgtaaaatgggaataaggatactacttcccttgtaacgcggtggtaaagtttaaataagctaaggaacacactgcatgtcctgcgggccctggcacaccagacatgctgacagacgctggctgctttcatcagctatgcaaccaaattctaaggggcccttcgtatgtgtcaggctgcgtgccaggaacctagaggtaccaccgtaccacagtacaagatgctgtgtctggcttcgaagagatttcagtctatgtggagagagagaaaagggaagctatcagccaataaaatcgtttgcaagcctgtaattcagcaggttttcaagacctgtcaaatgcccagcaatctcactctgcaactctgcctcttaaatacagcatcttccggcccagcgtgggggtggctaagcccatcatccagatgtgatgaactggggtctgggaaacccacaccggcctcatctggcttttccagcctgtcctcccttccacacatcaggctgacagcaccaaacacggccgaggcctcagccctgagtctccccgctgcagagtgcccaagcctgagttccagcaggttcttcaggggccgctgaccagggaacactgcggtgaggagcgaggacttcgtccccaccccggcccagggcaggggcttcgtggtgagcccaccccaccccagaaggctcctggaagggcagggcagactggcagcaaaatcctataggatgggccgggccagaggcaaggggtggccaaaggcacctgtccaagaggtgggagggaccacacctgggggcagggacgagtcaggcacagggaactccgccagcctagaggatcaaattcctccggggtgaactctgagatagaaagttggcccgggaagctcaaggagggagagcggcagaggggaagactctgcaattctgcttgccccccaccccggcccaggcaagccaccctgcccccggcccccacctgcccgccccgcctgcccttcctcaccccggtgcctgcgggattgctggagagaacgcggc

SEQ ID NO: 31310 - DNA, 2300 bp, Homo sapien
atggacgcacatgtctgaacgtagggcctgggcagctagctgctttttaacaactcccaaaatgactgcaatatccacgaaagtttgaaaaccttggactatagttcatgtaagaccaagcatgaggccagcgtgcgtcaggtgtccttggggtttttatttgatccgtttctcttttgttgaagttctcccctggccgagtgtggtggctcacgtctgtaatcccagcactttgggagaccagggtggaaggactgcttaagcctaggagtttgagaccagtctgggcaacgtagtgagaccccgtctctacagaaaatgttaaaaattagccggccgtggtgggggtgcacacctgtagtcccaggctacttgggaggctgaggttggaggatggtttgaacccggaaggtcaaggttgcagtgagccatgatcacaccactgccctccagcctgggcgacagagtgagaacctgtcctcctccccacaaaaaagttctctgctaatgtcctggtttcaccatataattttggtgaaatcaacttaaacagatccagaatgtcccataaattatattcggcttcaattatgttaattgatctacattcgctagtgcagcacctggcactggagatagaaaagtgaagtggggttgggcacgggggctgaggcctataatcccagcactttgcagggccaaggcgagtggatcacttgaggtgaggagttcgagaccatcctggccaacatggagaaaactatctctactaaaaatataaaaattagccgggcatagtggtgggtgtctgtaatcccagctacttgggaggctgaggcaggagaatcacttaaacccaggagatggaggttgcagtgacccaagttcacaccactgcactccagcctgggcaacagagtgaggctccgtcttaaaaaaaaaaaaaaaagaaaaagaaaaaaaaaagactatttcttaggttgaatactctaggtctaaaaaatcctcattcctgtgcacgggtgggagcctagatccagtaaggcaatttcgatccgaggaacaagcccaggccttctcccgctcagtcccggtcgtcagctctctgccttctcctcctctagccctgggccctgtggaacttgccctcactagcatcctgaccttgctggcgctgggctccattgccatcttcctggaggatgccgtctacctgtacaagaacaccctttgccccatcaagaggcggactctgctctggaagagctcggcacccacggtgaggcccccggggctgccctgtggggggaactgaaaagaaggcagagaccaaggtgagaattcctctaaactcagcacgtcacttcggcaaagagtgtcctgccacgacccgcggagggccgaggtttgcaggccgacctccccttgcagttaggatcctctgcttggaaggctgtgcagtgtttgcattctaagggctgcggagacagctggagatctgctcagcccaccagccgcctcatccttgctccccgctacagtgttgccacttgaagagcttccttcagtggttcctcagagtgtgggggaaagtctcattccacagggtcacactcagctccacccttacgctgaggcttttgaaacaccctcccacaggtccttggtttgcttgacttaattagtgctttttccagctggcaacgtttaaggaacgctgcctcgaatgtgtaggttttgcctcctgtgtccttgccgcaaaaggcttccggagcctcagggtctccctcccgccctcacctgctcctgccccttctgagcaggtggtgtctgtgctgtgctgctttggtctctggatccctcgttccctggtgctggtggaaatgaccatcacctcgtgagtgccctgcctcgccccacctccaagggcccctctgctcccgctcaccaggactcgagtccgtgtccttgatcccagctgaccatgtatctggcccttcccagcttgtgctagttccgggctcttgcgctcctggctctgctcagggaatgcctcattttggcatctggcacattcctcagccagccctctgttcccacagtctgaaattccccttctcccagtcctgtgggccgtctcctctccctcgcccctcttgggtcacacacccagaacgcccagccctagctctgctcctcagtaagccccacctctccctgctgtctttctctctggcagcagacctcgtaggccctcttctctccccaccccaggttttatgccgtgtgcttttacctgc

SEQ ID NO: 31311 - DNA, 2300 bp, Homo sapien
cctcagcctcccaggttcaagagattctcctgcctcagcctcccaagtagctgggattacaggcatgcgcccccacgcctggctaattttgtatttttagtagaggcagggtttcaccatgttggccaggctggtctcgaactcctgaccttgtgatccgcccatgttgccctcccaacagtaattttattttttatagagatgaggccttgctatgttgcccaggctagtgttgaactcctggcctcaagtgatcctcctgctttagcctcccaatatgctgggagtacaggcatgaaacaccatgcctggctgctttttcctacattttgaattgttgccttcatctttctcacacagtgtttttgctcagctcttgccatcctatgtcttacatagcttattagcctaaacacccatccattttctttgtccacagtgtcagggtcttatgaaattcatcctcccttaagactgagattctgatgttggttactatctcaactctatttttgtagtgatgttccccttagaggccgcggtgtcttctccagctaactgtccttatttggggtaccttagtctaaccgccatgttcaaagacatatttgaaattcaggtttaaatcctttttccccctggaaactcctcagcagatgcagttatacccatcctctttcttctcagccactttcaagttaagcatgtagaccaagcttgtccaagccgcggcccagaacagctttgcatgcggcccaacacacatttgtaaacttctaaaacacatgaggttttttttttttttgcgatttttttttttaagtcatcagctattgttactgttagtgtactttatgtgtggcccaagacaattcctcttctaccaatgtgccccagggaagccaaaagattggatacccttgatgtagacaaaaaaagcaaaataaaataaaaaaagcaaagcaacaacaatagcaacaaaaagttgactgggcgcggtggcctgtgatcccaacacttcgggaggctgaggcgggcagatcacttgaggtcacgagttcgagaccagcctgaccatcatggtgaaaccccgactctactaaaaatacaaaaattagccgggcgtggtggcgcatgcctgtaatcccagctactcgggatgaggcacgagaatcccttgaaccctggaggcggaggctgcagtgagctgagatcgcgccactgcactccagcccgggcgacagagcgaggctccgtcttttaaaaaaataaaagaataagtaaataagtttaaaaggtcttttacttcagtccagttggtaactaaaaaataataatacattttttttacatccttcttccataatattgtgtagcctcttacatctacggaatcaaaagggatccttcccaaggttcattctagcaaaggaaaacgtttctttccaccatacaccctgcgacacgtgtcttaatccactcctgctcaactggctcccagtggatccctagggatttttttttttggagccaacgtgggtcagaaaaaggaagagggtgggtcagccacaggttttcagcggactgggctggcggtcgcaaattccccttacttccccacgtaggtaaaagctaacgctgcggcgaggcagccgcggtcggggcgtctccgctgaaggcgcccgggcctcctgcacgttggctgcccgggtgcgggggtgcgggctgcggtaggcgcggaggtgcagcggtaggacctccgcgcacaggcccgcctgggcggacacagcccgagttggacacgggagcagccgggcagcgcgtcttgacggaccggcgagcacttgggccggttcacatccgtatcccacttcaaggagacgtcttcgctgcatcctccggttccgggtggaggctgaccctgggccattccgtctccggtctctggtatttctgctgggtcacttcatcccgggggcctctgaggaggcggaactactgtgtcaggagtcgtggttttcaaggagaagtcgtggtcggattgacagaggtaggggaagtaggcggaacttccggctggctcttccatcagctgccttccccgggcgtctccccgcaacctcctcaacttccctagtcagtgacgcggcgccggccagaaatccgaccggaccgggctcgggggagcgtgagttgcaggtgtgtgcctatctttgcgtctctgtttgagaggacaaactgtggggctgggaccgcgaggtgactgtgactgaggaagagtggtaagtgacagcgagggc

SEQ ID NO: 31312 - DNA, 2300 bp, Homo sapien
gaacatccagtcggtgactccacaaccccagcttaccttcataccgcaacttctcccatctttttgtcattagtaccacttaatccttctttttcatattttttattataaaatataaacaaattaagacaaatcataggccacatgtgtatcttcaacctggacctgcactgaacttcaacacattccaactcatgctccatatgaatgtttattaggcaactcaatacatccaataatgagcttctcatactcccctctcccccaaaacaaaatatatacttgttgttaattttgttctgcacgctttcacaaaataaaataaaataaaataaaataaaaaaatacggctgaatggcattctgggcattcagaaccttttaccaagataactgagggtatctttctctgtgttcattctacccaagggaaaaatcctgtatgaaatttgtatcactttttctgtgagttaccaagagaataaaaataaacaaagaaatttgtatcacattataatcaaaattcctgttttccatatttgccaagcaaatatggggtgtgtgtgtgtgtgtaaagttagtgatcttacaaacctagctgagtaccctctgctctggcccgtgagcctgacatttttttcagtgtgtgtgtgtgtgtgttgtgtggtgtgtgtgtgtgttgtgtggtgtgtgtgtgtgtgtgtaaagttagtgatctcacaaacctagctgagtaccctctgctctggcccgtgagcctgacatttttttcagtgtgtgtgtgtgtgtgtgtgtgttgtgtggtgtgtgtgtggtgtgtgtgtgtgtgtgtgtgtgtgtaaagttagtgatcttacaaacctgagtaccctctgctctggcccgtgagcctgacattttttttcagtgtgtgtgtgtgtgtgtgtgtgtgtgttgtgtgtgtgtgtgtaaagttagtgatcttacaaacctagctgagtaccctctgctctggcccgtgagcctgacattttttttcagtgtgtgtgtgtgttgtgtgtgtgtgtgtgtgtaaagttagtgatcttacaaacctagctgagtaccctctgctctggcccgtgagcctgatatttttttcagtgtgtgtgtgtgtgtgtgtgtgtgtgtgtgtaaagttagtgatctcacaaacctagctgagtaccctctgctctggcccgtgagcctgatatttttttcagtgtgtgtgtgtgtgtgtgtgtgtgtgtgtaaagttagtgatctcacaaacctagctgagtaccctctgctctggcccgtgagccttaatcctagcgagggctcgctgcggtggtctaagggcctccagatcccacccgggtaggacttcgcacagatgcagctcccgcgccgggagtgagcccatcctggcacccgtgtgcacagtcaccctcgaatcacggctgaacggcatccgacgcgagtggcttcctgcctctattctacccatctccttactcaggacgccatcgcgggtttcccagggccaaccattcccgccgcgccaccctaagacgcgcccggcgcccaaacactgaggaagcgggtggggtcccctgcggcccctgcagcgggaggggcgcccggacgtcacagcagggccgcccgcccgcctcgcggcctcccgcctcccgccccgcggaccccgcgcgtcccccgcgctccttccgtggcccaggtcccaggcgagctccgcccctcagaccagcgcgctcgaggtcgccccgccacagcccgtcctctacccgcctctgctggaaaacaggccgcagaatataggtgttctcgggctcccctgcgttcttctcagcctcaggcaccccgtcgcccaccgagaaggacactccgatggacgtggccatgccggggcttctcggtccgggcgtagctcgcgatgaaggcctagcgggttgcggtcgcggccggcagcagggaaagcgtctccagggcaacagggccgccctcccgcctcgctgaagcccgcgagcgccccgcacagccgccctccctgcccgcgcctgcgcaccggctgctgggcgggaactggtcgcgtccggacgcgcgacagcttccacccgcctcaggcagtatcagccgcgccgcagtcggaggaaatagacgcggggcctgaggctcctggacttgaggtattaggctggtgcagaagtaattgcggcggccgggtgcgggggctcaggcctgcaatcccagcactttgggaggccgaggcgggcggatcacctgagtcaggaagagttc

SEQ ID NO: 31313 - DNA, 2300 bp, Homo sapien
ggggaaggtggacacagaggcctgtgggagacacaaggaggcacagcctcttgagcaggcaggaagtctccaagtccagagagcacatcctattcctgcatacaacatccaggaagcttgcctgggcttgtctcacatttccctcttggctggttagtttcagggtcatggctaggatatgcctgatatggagaagcttctcttgctggggaaaggtactgacacctccacacaactcacgcagaatttttttttttttttttttttttgatacagagtctcatgctggagtgcagtggtgtgatctcggctcactgcaagctccgactccctggttcaagcaattctcctgcctcagcctcccaagtagctgggattacaggcacatgccaccacacccagctaatttttgtatttttagtagagaccgggtttcacaatgttagccaggatggtcttgatctcctaacctcatgatccgcccgcctcggcctcccaaagtgctgggatcacaggtgcgagtcaccgtgcctggccaactaatgaaaagtttaaagaatttatatctagttttggatgttaggcatgcacacacaagtgcatgcacactcatacacatcatctccacaagccccatcctggctcagccctattctgatgggtcagcaggaccccaaggagagaagggtgggtccttggcactaagacagttcacagtggttagctgactccttcttgcctccattctttcaggaactgcatatagtacagaacatgacagcgattcgaaaaacaatatcccagctggctgtgatggctcatgcctgtagtcccagcacttcggaaggctgaggtgggataatcacttgagcccaagagttcaatagtagcctgggcagcatagccagatcctatctctacaaaaattaaaaagattagccacgcgcggtggcattcgcctgtagttccaggtactccagaggctgaggtgggaggactgcttgagtccaagaggtcgaggctgaagtgagcggtgagtgtgccactgcactccagcctgagaaacagagcaagaccctgtctcaagtgggaaaaaaaaaaaaaggaatccctgccctttcagcctctcctgtaaacagggattacaggcacgagctacctcatcgggccttagtttttgaagctagcagaggccaagatacaacagccttctaaaacaggaccagggactggtgcttataagcagggaatgcggcagagtacgatggctcacgcctgtcatcccagcacttcgggagaccgaggtgggcgatcacctgaggtcaggagttggagaccagcctggccaatatggtgaaaccccgtctctaataaaaatacaaaaaaaattagccggtcgtggtggggcgcgcctgtaatccctgctgcttgggaggctgaggcagaattgcttgaacctgggaggtggaggttgcagtgagccgagatcgcgcctctgcactccagcctgagtgacagagcgagacttcgtttaaaaaaataaaaataaatatatatttttaaaagcggggaatgcagcctaagtctctttccttccttcctttttttttttttttctttttttgagacgcagtctcgctctgtcgccaggctggagtgcagtggcgcgatctcggctcactgcaacctcggcctcctgggttcaatagattattctgcctcagcctccagagcagctggggttacaggcacgcgccaccacgcccggctaatttttgtattttcagtagagatggggtttcaccatgtcggccaggatggtcttgaactcttcctgactcaggtgatccgcccgcctcggcctcccaaagtgctgggattgcaggcctgagcccccgcacccggccgccgcaattacttctgcaccagcctaatacctcaagtccaggagcctcaggccccgcgtctatttcctccgactgcggcgcggctgatactgcctgaggcgggtggaagctgtcgcgcgtccggacgcgaccagttcccgcccagcagccggtgcgcaggcgcgggcagggagggcggctgtgcggggcgctcgcgggcttcagcgaggcgggagggcggccctgttgccctggagacgctttccctgctgccggccgcgaccgcaacccgctaggccttcatcgcgagctacgcccggaccgagaagccccggcatggccacgtccatcggagtgtccttctcggtgggcgacggggtgcctgaggctgagaagaacgcaggggagcccgag

SEQ ID NO: 31314 - DNA, 2300 bp, Homo sapien
aatattcacctgccctatgatagcaatcctactcctaagaatattccctggaaaaattagtgcatagttccttcaaaagacatgcagaagaatattcatagcagcattatttataacaggcaaaagttgaaaatataaatgtccattaagagtagaaaaagttgtaatatccaatgtaataatactcagcaataaaagaaaaataaattacatgatggatgaatcttacatatagaatattgagtgaagaaagccacacacaaaagccatactgggctgggcgcggtggcgcacgcttgtaatccagcactttgggaggccgaggcaggaggatcacttgagcctaggagttcgagaccagactgggctacatggtgagaccccatctgtacacgaaattaaaaaatcagctggcgtggtggcgcttgcctgtggtcccagctactcaggaggctgaagtgtgaggatcacttgagcctatgaaggcaaaaggctgcagtgagtcatgattgtgccactgcactcccgcctggatgacacagcaaaaccgccttttttttttttttttttaaagaaaactgtttgattccatttatgtgaaattcaagaacaactaaaacctaatcaattattataagagccaaaatgaaagttaacactggggacaagggatacgaatgacaggcgacacaatgaaacctctggggatttggaatgtcctgtatcttgatttctgtgctggttcaccagggtatacatgtaaaaattcatcagactttaacattaagatttgtgcactttaggctgggcgtgctggctcacacctgtaatcccagcactttgggaggcggaggcgggtggatcgcctgaggtcgggagtttgagaccagcctgaccaacatggagaaaccgtgtttctactaaaaatacaaaattagccaggcgtggtggcacgtgcctgtaatcccagctacttgggaggctgaggcaggagaattgcttgaagccaggaggcagaggttgcagtgagctgagattgtgccactgcactccagcctgggaacaagagtgaaactccgtctcaaaaaaaaaaaaaagaaaagaaaagatttgtgcactttactgtatataatatctagatgtttaaaatgcaatgggagcatagagaaagaagtacctaactcggagtaaagaaatcctggcagacttcactgggaatgtttgaactgaatcttgaataggagcttgtccatagagggtcacggatctcccacacagagagcaccacaaaatcctcagcaatttggtgagagtatggtacaagatgatagtggcctggggcttgaacaagaggctgagtgcggtggctcacacctgtaatctcagcactttgggaggctgaggcgaacacctgaggtcagcagttcgagaccagcctggccaaaatggcaaaaccccgtctctattaaaaatacaaacattagccgggcatggtggcaggtgcctgtaatcccagctactcaggaggctgaggtgggaggattgcttgagtgtgggaggcggaggttgcagtgagccgagatcatgccactgcactccagcctgggtgacagagtgagaccctgtctcaaaaaaaaaaaaaaaaaaaagttagacgtctagtacaggaaccatgcaacacatcgagtcagccaagggcaaggtaaggagagtgatgaggaaaaaggggtggctgccctgctcggtgctgttctgtcaaagagccgaaattcttcgcggggtggcagatgaggacaggaacagctggggtgtggcaagtgttgctgcctggggagagcggagggtgaggtgtttctcacgggtgcatccagtgactcatcaggacagcggagctcatgaggccatgtctcccgtttcctgccttagaatcacatgaaaatgagcagagggtgggtcatcaggacagggctctccggggagcggaagcgccttcaatgcaggcctgtgggcaggggcgtgggggcgcgcacacacacacgcctgggtgacctctacgtatatacagagcctccctggccctcctggaaagagtcctggaaagacaaccttcaggtccagccctggagctggaggagtggagccccactctgaagacgcagcctttctccaggttctgtctctcccattctgattcttgacaccagatgcaggtaagcagagatgaaagggtgaggtgacggccagggaacagcctagcctcacagatgagagtgcacgcttccactccagtgagcctggct

SEQ ID NO: 31315 - DNA, 2300 bp, Homo sapien
cacatgacatcacagtaaaaaaatcacaaatcacacaaaaactgtgacacagtgagcaagatccagcagaaacaagaaacagtgacctatagaaactgtagaaaatttatttttttccttagtgattagtgattccaataagttgggttaatatgtttgaagaaatgaaagattggaatagtaggaattaaggatctccaaaacatgatcaagcagatgaggacgtaaacaaaaacagaacttctagttataaaaaattagctgaaatcaaaagctcagtgagcaagtgaagaaacagattggcacagctaaagggagaatgtgtgaactggaagatagcattgaagagattacccacaatgcaccatagacagctcaaagagacaatatgcatatgaaagaaaggttgagacataagggttagagtgaagagttgtaacatacatctaattggagttacagaggaaataagtatgaatggagggggcgagacaacgatcaaatataaatcactgggaatttttcagaattgataaaagataatcttcaagtggtagaagtccattgaattccaaagaggataaataaaatcaccctgacaaatcagagtgaaattgcagaaggctaaagacagagggtcttaaaagcaactagaaacaacagattgctataaaaacatttttctttagtctggcaactgatttcccagcagcaacaacagaagccagaggacattggaatgctgtcttcaatattctgagagaaaatagctgtcagctttgaaatggaatacccagtaaaactgtcaggaatgacagcgaaataaagacatttgcagacaaaaacttaagagcatttaccaccaagagaaggagattctaagggacataattcagatagaagaaaaatcatcccaaatggaaagcttgaggtgctttttagtggccagaaaatgttcaatttacattctatcactagacatttatgttatttccaacttttcaatataaactgaagctatgctggacatgtgtatgaacatgtttatgcatatagtattttatgtagattttattttcttttgactagaagcccaaattactgagtcaaaaaaggaatgagtatttttgtttctggaatacatgttgtaaaattgttgtcttaaaggaccttaccaatttacatttcatttagcagactctgttagctttactttatttacaaatgagtacatttgtaatagggacatttttaaatgatgaagattgacatttcttaccagattttgacttagttatgtcttagacaaaaaatgttccatctcacttctttgccattggtattaaagatgcttttttttttttttttttttttttgagacagagtctcgctctgttgcccaggctggagtgcagtggcgtgacttcggctcattgcaacctctgcctcctgggttcaagcaattctcctacctcagcctcccaagtagctgggattacaggtgtgtaccaccatgcctggcaaatttttgtgtttttagtagagacggcatttcaccacgttggttaggctggtctccaactcctgacctcgtgatctgcccgcctcagcctcccaaggtgttgggattacaggtgtgagccactgcgcccagcctgatgctttctttttaacagaaacagaaatgctaactgaaatgtattctttctaacaaagcatttctaactttctagaatgtagtctttcatttttctttatcttttttcagcttattcccaaatatatactttggccatttaaataaatggccaaagaaatggccaaaaaatgctttatttagtttttgttttattatgaaggatgattactctttaatgctgctaaattcttttctagctctgtatttcacttcaagaatgtctacatttttttctagctctgtgtatttcacaagaaagtcattcattctaaaagggaaaaatactattaatttacttgggaattctaatatgagctgaagaaagaggctgtcttttttttttttttttttaacgtttttcctgtctttttactgtttcaggtgcaagtgaaagtgtaggaaaacatatgcttgaagcgtgcaacaataatctggaaatggcagtcactatgtttttggatggtggaggaatcgctgaagagcccagtaccagttcagcaagtgtctctactgtcagaccacacacagagtatgaatttattatgtgttgtcaggagctatccattgcctaaattaagtagttgcatttttatcaaagcta

SEQ ID NO: 31316 - DNA, 2300 bp, Homo sapien
ttgcagtgagccaacatcacgccactgcactccagcctgggtgacagagcgagactccgtctcaaaaaaaaaaaaaacatcagtcattatttcatactcactgaatcagagagagatctgttctattcagtaagaaataagacttttctaaaatctttcaattttccgttctatttctaaatgccaaaaaaagataagactcacatttatttttattttttctttttcttttttttgctcctgcctaaaaagtaaggactcacatttttgatgatgcatttgtttttacaagaatattgagcttccaagtaaaacctttgtgaaatcagagcataagctattaaggtcactaaaataaatataaaataccttttaattataaacactacgattaaaacgtatgtggagagaaccccaaaaaaattttaagacatgtaaaaaaggcaaaaagaaatcaatcatgtgtttctaacggttaatcactatcttgtaaaaagaatcccaaaaattatcaatagaaattcacaatatttgaagaacactcaaaggtattttcgctctgtagatctccagataccactgtctactgattgagggactccaacttgatccagcaatcaagctacgtagacgaacagaaacagaattaaagcaattaagtgagtcaattcaactcaccacacttcggtttttgtgtgtacctaataaaaatgttgcaacagaagaagtaatgtggcgttaaaccaatcagagtttgggaagagtagtaattagcataagaaactgaaaattaattaagtggcttttagggccaggcgcggtggctcacgcctgtaatcctagcactttgggaggctgaggtgagtggatcatttgaggacaggagttcaagaccagccaggccaacatgatgaaaccccgcctctactaaaaatacaaaaattagccgggcctggtgacaggcgcttgtagtcccagctactcgggaggctgagacaggagaatcgcttgaacccgggaggtggaggttgcagtgagccaagatcgtgcctgggagatctgcactccaacctgggcaacacagcgagactgtctcaaaataataataataataataataataagtggctttttttttctttttgagaaatgatcttgctctgttgccagggatggagcgcagtggtatgatctactcaccgcagccttgaactcctaggctcaagcaatcctcccacctcagcctccccagtagctgggactacatgtcggtgccactacatccagctcattttcttatttctgtagagatggggcctcactatgttttgcccaggctggtctgcaactcctcgccccatgtgaatctccagcctccgtctcccaaactgctaggattacaggcgtgagacaccgcgccaggcccaagtggcatcataaaccatctctaggaaatctaaaggattaataatgatattcacttctctatcagattcactgcaaagatttttctatataagcataatgcagcaacactaacttatatacacaataatcttctccatagcaatgatttgtcagacattaggaaatcctttacatatttaatataataatccaatcctttatatcttcaataatccaatcacaaagttcaaaaatattaagagaagttatcatgcaactcctcaccccaattttattgcaaattttactttactttgacctgatgttccatgcccacaagctagataacaatgcgtcaaatatctcgttatcattgcaaagcaaaaaaataaaacttgctttaatataaaacggtaactagtatacaacctgtagtagttaaaacaatataaaattttacttaaccagatattgcacgttaaactctaggaacattaacagtggaaacattctccgcatctaacaaattacgagataaagtatagatccgttgagagggaactaacattctgacctccttccaaaacgacaaactagaacggcaaaattacactcaggcacattggagtactcttctctcaaatcactccacagagaacttcatcatttgctccgccctctaataactcatgcaagaaaagttcagcaccatcagagagaaacaagacagagagaattcatagaatggctttagggcctttcctccaggcggtaagaggatctgcgtgtgtccttcgcaggggtccaaagggagagaacctaggcctagggtttcggggataccgacacccagaaacagattttctctcaaagaagtttctgccgccatccct

SEQ ID NO: 31317 - DNA, 2300 bp, Homo sapien
atggctggctagtgactcagcctttaggatgaagggagacagaggtaacactttcttgatttggctttcttcccttgcctgtttttgcacctctgcatcaaatgtgaaggaatcagctgccgaaatttatgactgatccctgcccttcctcagcccatctagagaactgcagcaacctggaaggcagtgccaggaccaatctgtcatttaacttaaaatacatttttttttttgagacggagtcttgctctgtcacccaggctggagcacagtggcatgatctcggctcactgcaacctctgcctcccgggttcaagtgattctcctgcctcagcctcccaagtagctgggattacaggtgcccgcgccaccacagcagctaatttttgtatttttagtagagatggggtttcgccatgttgaccaggctggtctggaactcctgacctcgggcgatccgcccgcctcggcctcccaaagtgctgggattactggagtctgctttcttttacatcaatcatatcttcttgaaactacagcccgactgggtgtggtggctcacgcctgtaatcccaacactttgggaggccgaggcgggtggatcacttgaggtcagtagtttgagactagcctgctcaacatggtgaaacctcgtctctattaaaaatacaaaaattagccaggcgtggtggcgtgtgcctgtaatcccagctacttgggaggctgaggcaggagaatcgcttgaacccgggaggcggagctttcagtaaactgagattgcaccactgcactccagcctgggcgacagagcgagactccctgtcaaacaaaacaaaacaaaaaactataccccttgatttgacatggctctttcttaattctccccaatagcatgtttactcttaggatgtgtcaattcttcagacagctcatcccatcttttattgggccattttcctatgaagatgcaaaatatgtgggtggaggttggaaggtgggaggctaaaacaaacggaatcacttggaatctcttttaactttatgggcaaggtgggggattattggatttgagcgcaccccactcatgtaactgttttgcaaaatacttaaaattattcaaggaacacacgaatatcttttttttttttttttttttgagatggattcttgatatatttcccagtctggtctcgaactccttgcctcaagcgattctcccacctcggccttccaaagtgctgggattacagtcatgagccaccgcgcccggccaataatgtttgtttaaaaataaaaagataaataagaaactcgaagtaaggtccgctttgaccatcgtcccgatcgttctcttctctggaggtaaccgttaccagcgttttgagcacacttttccagtctcctttctatatgttttctttcctctactgcatatacagagtttctttttatacaaatgacgcctcttggggtctcattaagaccctaacgggagacgtgatggccaatttatttaaggaaagcagactaaacaatcgtttatgaaaacctactgggtggcaaccccgcgctaagtgctttctttggcatgaagggttctggtatttcactcgtcgcaatcggttagctaagccattagtttagaggctggggggcgagtacggggagagtcgcttcaaagcgaggaggtagggtttgcattttgatgggacctgcaggaaacctaatagagtgcggtacaaccgcaaaacagaaaaatgctgtcatcggcagttggctctgtcaataaagcttgcgaagctgaaatgcgaagaactatctgccgagaccgaagcttccttcggaatctaggaatcgacaccgcgcctgcgaggctagccttggagcccggagaggaaggcaccagcaatggcaaaaaggatgcactgagcaggcagcaaccgagcagccaacccgagagctgggagcgcgcgggcccggtcggaaaatgcgcctgcgcagaccgctggggacgggaggggcggggctcgaggggcggtcaatgcgcctgcgcacaccgcacggcgaagtgggggagggcagtccgtgtgtgtctgtgttgttgttcggcggcggcggcggcggtaagatggctgcccacgggggctccgcggcgtcctcggcgctgaaggggttaattcaacagttcaccaccattaccggtaagagacgcggttaccggaaggtggagagtggggtccggagcgggcagcgggtctgccccgggcttccccttaccttcaggcattcctccttcgggc

SEQ ID NO: 31318 - DNA, 2300 bp, Homo sapien
tcatgggagtgaaaatgaagtaatagcttaatctaaatttgcccatgaaataaaaatactattaagaataaatatacacctatttgggaggctgaggcaggagaatcacttgaacctgggaggtgaaggttgcagtgagctgagaccgcgccactgcactccagcctgggcgacagagcaagactctgaaaaaaaaagaaaagaaagaaagaaatatataccttattagtaataataatgtatagtgacagtccagctgtagtatcagtgtaattagacttacatcttatgatttgatattttcccctggttcactcagtctttttctgttttctacaggacattgacagtagtgataggaaaagcccaacagggcaagacacagaaatagaagatatgccgacactttctccacagatatcccttggagttggagaacaaggtgcagattcttcaatagagtcccctatgccatggttatgtgcctgtggtgccgaatggtaccatgaaggaaacgtcaaaacaagaccaagcaatcatgggaaagagttatgtgtcttaagtcacgagcgacctaaaaccagagttccctactcgaaagaaactgcagttatgccttgtggcagaacagaaagtgggtgcgcccccacatcaggggtgacacagacaaatggaaacaacacaggtgagacagaaaatgaagagtcgtgcctactgatcagtaaggagatttccaaaagaaaaaaccaagaatcttcctttgaagcagtcaaggatccatgcttttctgcaaaaagaagaaaagtgtcccccgaatcttccccagatcaagaggaaacagaaataaactttacccaaaaactgatagatttggagcatctactgtttgagagacataaacaagaagaacaggacaggttattggcattacaacttcagaaggaggtggataaagagcaaatggtgccaaaccggcaaaaaggatccccagatgagtatcacttacgcgctacatcctcccctccagacaaagtgctaaatggacagaggaagaatcccaaagatgggaacttcaaaaggcaaactcacacaaagcatccaacaccagagagaggctcaagggacaaaaataggcaagtgtctttaaagatgcagttgaagcagtcagttaatagaagaaagatgccaaattctactagagatcactgtaaggtatccaaaagtgctcactccctacagcctagcatttcacagaaaagtgtttttcagatgtttcagagatgcacaaagtaaggcctggtaaagggagtgctttgtgatctagtaaagctggaatgtgaagctctttcctatcatggaatcttcatccatgtgtcattcatgctgctctctaggcacactcattgtccttaatgaaggtctgtgtgattgtaaggactgcatagacacatgagcttctgcacagctcagcggtaagcaggggtcccctgtcgtttcccttcttaataacagatgtgtattaagctttacaattcttagagatatcttaagctttggccaactccaggaaatcttcaagtgccattgtctttccaaaaactgcatgttttatggcctttgctcacctttttgtcgtgactggtaatcaaagcaagattatactattctgagtgattaaggaacccatgcagggtttaaaatccattttcttgctattgtccaatgtttacagagtactcaaaaggttttcctaaagtaatctaatttccatctccaatttaattcaattttcagcattgtagcatttcctttggtgtttgttttttttttttagacggagtttcaaaatttggattcatattcatatgtgggaaatcccagatttttttttttttttttttttttttttttttttggagacagagtcttgctctgtcacgcaggctggtgtgcaatggcgcgatctcagctcactgcaacctccgcctcccgagttcaagcgattcttctgcctcagcctcccgagtagctgggatcataggcatgtgccactacacccagctacccagctaatttttttttttttttgtacttttagtagagatgggatttcaccatgttggccaggctggtcttgaactcctgtcctcaggtgatccacctgcttcggcctcccagagtgctgggattataggcgtgagccaccacgcccggcctgtttcctttggtttaaagtggattcgaatcagtgttaaatcagaaaatcagggttttctaggaaattgggaattagttgccag

SEQ ID NO: 31319 - DNA, 2300 bp, Homo sapien
atacaaaaatttgccaggcgtggtattacaatgcacgtggtattacaaggcacgcgcctgtaattgcagctactcgggaggctgaggcatgagaatcgcttgaacccaggaggtggaggttgcagtaagctgagatcaaaccactgcactccaacctgggcaacagaatgaggagccatctcaaaaaaacaaacaaacgaacaaaaaacaagcctgaaattccaagctaaggtactgttactgtagacaaccagatgacagtcccaggtttcttttttttttcttttttttgagacagggtcttgccctgtcacccaggctggggtgcagtggtacgatcactgttcactgcagccttgacctcctgggctcaagtgatcctcccacctcagccaccagagtagctgagagtataagtgtgagccagcacaccgagttaatttttttattttttgtagagacagggtctcactatgttgcccaggctggacctgaactcctgggctccactgatcttcccgccttggccttccaaagtgctgggactacaggtgtgagctatcacagacaataacaggtttctgaacccacattgaaatgaaagttcccaaagacttctaccaacgaccgatgtctcctcgttgttctcaacctggaaaccatcccctacccagcctgaatgctctcagcagcctcaaaacaacttaaaggctgctttcacgcacagtgattttcttttctcttccttcacactgattgattccctcaaaaaatgcaggtccggagctggctatggagttgcaagctctagacccagctactccagaggctgaggcgaaagaatccctggaaccctggagttgtagtccagcctggataaaacagtgagaccccaattcttttatctatttatttatttgtattttttgaggtggaattttgctctgtcccccaggctggagtgcagtggcacaatctcggctcactgcagcctctgcctcccaggtttagcgattctcctgtctcagcctcctgagtagctggaattgcaggagcttgtcacaatgcccagctaatttttgtatttttagtaaggacgggggtttcaccatgttggccaggctggtcttgaactcctgacctcaggtgatccgcccgcctcggcctcccgaagtgctgggattacaggcgtgagccaccgcacccggccttgtttggctgttgattttgttttgaggtttccctttttctacccagaaaccaagaaaccaggggtgtctgaggcctcgcagaaatctcagggaaaggtcaggctccacccaggctgcactaggcggggctgcgacgccagggcgggaccgtctccggctgggagggagggcgggcggcgcgcagaccccggaagtcccgccccgggaacgttcgcccttgggcagttttctgggtgggaagtgcgattttggcgggcggttgtgacgttgctagcgcttgtccggtggctgctgcgctgccgcaacgaatagggtttctggctgcgtaggagggacgggggcgcggagctctgggaaactgcgccaggcgcccgaaaggtgaacacgggagtcgcgcgtctcccccgcagcagcggtaaagcggaagttatgctgcagccggagcccgggcttcctcccggagccgcgtcccggggcccggctgccccgagctgagcggagcatcctttccgggtgaggggaggagaggacttggcgcgttcccctcgctgccccgggagccgcagccgcggtgttcatgccgcggagcagccaggctcctccgacgaaaacctgcatttatttgctggcgggacgtttgccttgaaaatggacaaagacgccgccctccggggtattcctgtttgcctgaccctgagagcgcctttttgcttcaagacgtgttggatgctcctgttctccgaattctgatacgcttctgggcataatactgaaacacaaaactgcttttgctctctctgtggttggccgaaaataggattctttttcgtgcaggtgtcgttgtttagtcggctttactaacatattgaaatggctctacccaaagacgccatcccctcgctgtccgagtgccagtgcgggatctgcatggaaatcctcgtggagcccgtcaccctcccgtgtaaccacacgctgtgtaaaccgtgcttccagtcgaccgtcgaaaaggcgagtttatgctgtcccttctgtcgccgccgggtatcgtcgtggactcggtaccatacccgaagaaattctctcgtcaac

SEQ ID NO: 31320 - DNA, 2300 bp, Homo sapien
tgaattaatttttttttttttcgagacggagtcttgctctgtcaacccaggctggagtgcagtggtgcaatctggcctcactgcaacctctgcctcccgggttcaagcaattcttctgcctcagcctcccgactagctgggattacaggcacctgccaccatgcccagctaatttttgtatttttagtagagactgagtttcaacatgttggtcaggctggtctcgaactcctgaccttgtgatccgccctccttggcctcccaaagtgctgggattacaggcatgagccaccgtgcctggcccaactgcattaaattggtgtttgaagtaggcacagccacaaagcaacccatttaggatgaaccgagaaagcaatgtcatgaaagcaaaacgtttggatgacagagaataaatcatagttgcatgtttaaaagaataatgggagattcgatgggaaaagcaggttgtggacatattaggaagcctgaaggccaggtgcagtggctcacgcctgtaatcccagcactttggaaggccaaggccggtggatcacctgaggtcaggagttcgagaccagcatggccaacatggtgaaaccccatctctactaagaatacaaaaatttgccaggcgtggtattacaatgcacgtggtattacaaggcacgcgcctgtaattgcagctactcgggaggctgaggcatgagaatcgcttgaacccaggaggtggaggttgcagtaagctgagatcaaaccactgcactccaacctgggcaacagaatgaggagccatctcaaaaaaacaaacaaacgaacaaaaaacaagcctgaaattccaagctaaggtactgttactgtagacaaccagatgacagtcccaggtttcttttttttttcttttttttgagacagggtcttgccctgtcacccaggctggggtgcagtggtacgatcactgttcactgcagccttgacctcctgggctcaagtgatcctcccacctcagccaccagagtagctgagagtataagtgtgagccagcacaccgagttaatttttttattttttgtagagacagggtctcactatgttgcccaggctggacctgaactcctgggctccactgatcttcccgccttggccttccaaagtgctgggactacaggtgtgagctatcacagacaataacaggtttctgaacccacattgaaatgaaagttcccaaagacttctaccaacgaccgatgtctcctcgttgttctcaacctggaaaccatcccctacccagcctgaatgctctcagcagcctcaaaacaacttaaaggctgctttcacgcacagtgattttcttttctcttccttcacactgattgattccctcaaaaaatgcaggtccggagctggctatggagttgcaagctctagacccagctactccagaggctgaggcgaaagaatccctggaaccctggagttgtagtccagcctggataaaacagtgagaccccaattcttttatctatttatttatttgtattttttgaggtggaattttgctctgtcccccaggctggagtgcagtggcacaatctcggctcactgcagcctctgcctcccaggtttagcgattctcctgtctcagcctcctgagtagctggaattgcaggagcttgtcacaatgcccagctaatttttgtatttttagtaaggacgggggtttcaccatgttggccaggctggtcttgaactcctgacctcaggtgatccgcccgcctcggcctcccgaagtgctgggattacaggcgtgagccaccgcacccggccttgtttggctgttgattttgttttgaggtttccctttttctacccagaaaccaagaaaccaggggtgtctgaggcctcgcagaaatctcagggaaaggtcaggctccacccaggctgcactaggcggggctgcgacgccagggcgggaccgtctccggctgggagggagggcgggcggcgcgcagaccccggaagtcccgccccgggaacgttcgcccttgggcagttttctgggtgggaagtgcgattttggcgggcggttgtgacgttgctagcgcttgtccggtggctgctgcgctgccgcaacgaatagggtttctggctgcgtaggagggacgggggcgcggagctctgggaaactgcgccaggcgcccgaaaggtgaacacgggagtcgcgcgtctcccccgcagcagcggtaaagcggaagttatgctgcagccggagcccgggcttcctcccggagccgcgtcccggg

SEQ ID NO: 31321 - DNA, 2300 bp, Homo sapien
tcaaacctcattgtccaagaatttttatggaacttaatctccagctcactcatttcatttcctagaggttggtgggtgggggctgaaagttccaacttagaatcacctggtctttctagtgaccagccccatctggaggctattctagttgcaccaccctaaatcacctcattagcataaactcacatgtgatcaaaaggggctcattatgaataaaaaaagacactcctatcactcaggaaattccaagggttttaggagctttgtggctgaaatggggacgaagaccaaatatatttcatattatactacaatatcactgctagattaatctttttttttttttttttttttttttttttgcgatggagtctcgctgtgtcacccaggctggagtgcagtggcgcaattgctatttctgctcactgcaacctccacctcccgggtttgagcgattctcctatctcagactcccaagtagctgggactacaggtgtgtgccaccatgcccagctaatttttgtatttttagtagagatgggtttttgccatgttggccaagctggtctcgaattcctgacctcaagtgatctacccacctcagcctcccaaaatgttgggattacaggtgagagccactgcacctgagcctagattaatcttctagaaccaacagctcacatctgtccaaactccttaccaagctagctagaagcatcccctctcttataagccttatgtgctgtctccctgctagtatgttccttgaggacaaggatttcgccttacttatcactatattaccagtgcctggaatagtgctgctcatccattcgtaggttttatacattcaattaatatctatgatgctcagtaaatattgaataagtgaataaagtattcagtgaaagaacaaatacgtgacatggctcttaccagtttaaatggtgtggttattttctttttcttatatgaatcttttgctcaaaacatacctactcattgtttcctgaacacatcatttactttgccacctctgtgattttgctcacacaatttctccagttcgtaacacccttaacactcttctctgataatcaaagaccttgacctttaaggccaagccaagtaccaccttcagggtgaatatctccccaaggacccaagatttcagtgacttagtctctcaccttctattatttttatggtctctatctacttagcacacatcccatatacattttctatttaaggatatattctttcttcccaactagattttaaatctcatgaaaacagcagtcctattttatttccacatttatattcaattcctaatctaatatatatataattatataaaattatatatatattttatatacgatataaattatatattatatataattatatgtataattttatatataattatatatatatatatatatatatatatatatatatatatatatcctatcctcttgcccgggctggagtgcagtggcatgatcatagctcactgcagcttcgaactcctgggctcaagcagtcctcccacttcagcctcttgagtagctgggactacaggcatgcaccaccactcctggctaatttttgtattttttgtggagacagtctcgctctgtggcccaggctggtcttgaattcctgggctcaagcaatcctcccaccttggcttccccaagtgctgggattacaggagtgagccaccatacccagccataacaagtatttagtagtttctaatgatagttagattttttgctttgatatcatcatcataaaagatctggggcactcttcaaacctaatttaggttgtaattgaataatgaagcagttaaaatatgacagtaatatttccatcaaacttaatcctatacgttacgttaatgtatctgtatatacatttaccataatgtacacagtcattaattatacatggttgttgctgtatgttaatgtactatggttcagttttcaaaggcaaatgttatagtgcattccaggacacctgtgtccacgagataagttctttgaaactatatttggatctgcaggctattaaaagcttcttgtactgagtgacctttcaggcagaatgtagactgagcgctcctgctactgctgcctgttgctgagaggaagaccgcagaaaattctggattcaaacatttattgctttttttgttttgctttgtttttgttttctttccttttgccttcagaagatgaacaatgaaaccacaaccctgatatccttgaaggaggcaa

SEQ ID NO: 31322 - DNA, 2300 bp, Homo sapien
tcaagcgattcttgtgcctcagcctcctgagtagctggaactacaggcatgcaccaccacgcccggttaatttttgtatgtttggtagagatggggtttcaccatgttggccaggctggtctcaaactcctgactgcaggtgatccgcccgcttcggcctcccaaagtgctgggattccaggcgtgagccacggcacccggccgagagcattttttaaaagggtgaagtgccacagccggcagttctcatcagccagagcgcagaatgagagtactgaacatggggaaggggcttggtggggtgggtgatgagcaggtgaaagatttgtaaaaaagaaaaggaggggttgagaagggtaatcttactttgaaattctacctggggcgctcaggagacggtctgccgttgaaagtcacctcagcggctggactagattagtaagaatgacaacatcgcatccttcaaaggctctgcctcggctgcactgagacacgataaaggccagtctttaaaaactgagtgatctctaaacactctgcactagtcataccaccaccgtcccgttcaagagtctgtgcctctaaggctgttcattctgtctagttcatgatccctttctcagatggatcaactctgcttatccttgaagacttcaaagaaattagtgagagacagtcaccatcaccagagtcagcacaggtcaacttttctctacaggcttcgggtttctgaagttggacttgatgtggagaagctggatagcaaccaaaatgattgaagggctgtggcgctggcactggtaagaatgaaaagaattagggttactggacttggtgaaaaagacatgaggagaagggacaggcaaataataatcaaacaccatgaatcagagggtagggaaggtagccaccgttcctttgcttttactagagactaagaaatggattatacatagcaagaagcttcagaaaagatttcttactacataaaggttccaagacattggagttgaccaagggagtctgtgaaccctattattttaattactcagctcatggagttgttttgaggattacgtatataaaaatctgcgtaaatgacgtagtatacagtgcctggttcacaccgtggctcaaatgatggttattattattctcttactaagcatgctttaaaggctgtcggaaaactttggggccacctaggaaatcgtagtataatcaaataatgctgaaattcttgtgtgtgtgtgtgtgtgtgtgtgtgtgtgtgtgtgaggtaggggctcactctgtcgcccaggctggagcacagcagggcgattacggttcacctcagcctcgacctcccgggctcagcctcccaagtagctgggaccagaggcgcacgccaccaccctcggctaatttttctatttttttgtagcgacactgcctcgcaatgttgcccaagctgggatgctgaaattcttccccttccaagaatccatctataattatagcctccacgtcattctccctattggaatgtttaattgactaaaactacattgccttcatctgcttactaagcggtggatccagtaaagaccacatcttgtccaaaagacggcagcacttaattagcgctcaaatggcactcgaacgtttgggcgagggggtgttcagtcgcagccaccttactttgcgaaggcacacagggacagacgttcgctaagtgccgatacttagggagaacgagagggcctgaccaggtaaagacggcctccgctgcccaagctacacaaaaaggttggggagccaggacccggcaagcaaggagagaaaagtttcatgcgttgagctggagtctgaagcaaggacctaacggacacagggaaacgtcacaggaaagggagcccaggagagcagacgcggagccaccagaccagaaaaaggaaaaagcactggaaaacagcatcgaagtcaccggaaagcagcatcgaagccaccggcgccagcctcatacctgcgcttcccgctcccctcctcggcgcctagtgataacctcacccgccggcgcccaatcccgtcgagcgtcaggcgtgaggcggcgcagccaaacagtcacatccggggccgagaggaaccgcgaacgagctgggcgtgcgcccttgcttcgtgccctcaacccgcatggcggagccgctggcgcgccgcggagaggccgggcgagtcgggcggtttcggcgcccgcgctgagccgcggaggaggggcggaggacgcccctgcagccggtgcgtctgccctcagtgaggcg

SEQ ID NO: 31323 - DNA, 2300 bp, Homo sapien
aaaccggttttactacataagtataaattttacatgcttcacatgaaaaaaaaatttttacttcttactccgacccctgttggcaagctagcattaaaaagggggtgttatcgcgcggtggctcacgcctctaatcccagcactctgggaggccgaggagggcggatcacctgaggtcgggagttcgaggccagcctaaccaacaagaagaaaccacaactctactaaaaatacaaaattagccgggcatggtggcgcatgcctgtaatcccagctactcgggaggctgaggcaagacaattgcttgaacctggaaggcggaggttgcggtgagccgagatcacgccattgcactccgtctcaaaaaaaaaaaaaaagggggggatgttatcgttttagttactaatgcattcattatgtttaacacattgcaatcagactttatcttctcttatatatgatcttgattgactgctatactgaatagctgttaaccattcaactcaactcaagaccaagaccctttgtttattcggcctgagagtcctttcagccgtaccacaacttgttccttgacatttttattttgtatatgaaggcgggcggaatatgcaggaaggatgcagcgaaactgtaatcagcacgttagatgacaaatagaaaaagagagacaccatcaatgtggaactattaaaaagttagcaaggaaacagccaataacagcaggacaaagcagtatgttaggtggtgcccgtggacgttctataaaagcctgtatcttgtaagtgagcaggatgactagaactacactcacttgtaagcctccaatatagtggagggaactaaagagaacttgggggaaaataatgaaaacaaatggttaaaaatcagagcttggaaaagatgagataaacgtggagtgaaagcaaactagaaacttagaaacttagaaactaagcccatgttaaggtggccgggattatttaatataatgaagtctatctggaggccggggagaaaagtaggatgagggcattaaaaggtacaagagtggtggtctgtctttaacggggaaaactgtcaaaagttgaatgagtgaggcaaactacctagttgtttgaaaagtggatcacggaagtgggatgggttaaggagcagaacttcgatccaaagaaaagagaatctttatcttggggggaggtgaggaagatactgactggagccgtggaaaggcgggctggtgaggcgaagcttctgactcagaagctcggatgagaaacaccgcgaacgacgccggggagcgggactgggggcagcggtgtggcccggggctctctcaccttggccttgtagctgggcaggttgcacaggatgtccgtgcgcagagcctcttctgccaggctgcgggcgcacaggctccgccacacctcgctgttctcatcgccgtgcaggcagcggtaccagtgcttgcacaccagggcgcagctccgcagctcggacagctccaggtaagagaacaccaactccagcacccggctgggcagccggcccccggcccccgcggccccagagcccgagcccgcgcccgcgcccgcgccgccgccgctacagccagcgccgcccgaggctgccccagcccccggggccggcgccgccatcgcctcaccagccggccctagggccgccgctgccgccgccgcttcccgccgtctctgctcggaaggccaagcctcgcccggagaccggagcggctcgctcaccgcccctgtcagtgccaaccgccggcgcctccaccactcccgcccctgcccgggggcgtccgccgcgcgccccgcctcactgagggcagacgcaccggctgcaggggcgtcctccgcccctcctccgcggctcagcgcgggcgccgaaaccgcccgactcgcccggcctctccgcggcgcgccagcggctccgccatgcgggttgagggcacgaagcaagggcgcacgcccagctcgttcgcggttcctctcggccccggatgtgactgtttggctgcgccgcctcacgcctgacgctcgacgggattgggcgccggcgggtgaggttatcactaggcgccgaggaggggagcgggaagcgcaggtatgaggctggcgccggtggcttcgatgctgctttccggtgacttcgatgctgttttccagtgctttttcctttttctggtctggtggctccgcgtctgctctcctgggctccctttcctgtgacgtttccctgtgtccgttaggtccttgcttcagactccagctcaacgcatg

SEQ ID NO: 31324 - DNA, 2300 bp, Homo sapien
agacccagggcaacagcctaaggatgaaaagcaggttggattccagaaacatttctgagttagaatcagcaggaattgggggtcaattagatatgaaggatgaagtctgtgagggctggactgcctgggctgaaacataccgtaaagtgtgacagccatacaggagagaaactgctgggacaaaggataagagttgagtttggggccaggcacagtggctcatgcctgtaatcccaggactctgagactgaggtgggcggatcacctgaggtcaggagtttgagaccaccctggccaacatggtgaaatcccatctctactaaaaacacaaaaattagctgggcgtggtggtgggcgcctgtaattccagctacttgggaggttgaggcaggagaatcacttgaacctgggaggcagaggttgcagtgagctgagattgcgccactgctccagcctgggtgacagagcaagactgtctcaaaaaaaaagagagagagttgagtttgggatacatcatgttatggtgactctgggacatgtagcagttgattgaccagtagacagttaaaaatgcaagtctggatcttctctcgtggaagagaatgttggagctagaaattaaaattggggagttaccaactgattggtagacacaaaagacatgaagtagagaatgtgcatacaagagagaaagaggcctgaatcaagcacctgggtttgcaacaatttgatctttatttagctttttcattggtgtgattgttattaccattatgagataatattttatttttaaaattatttttatttttttaaagacggagtcacactctatcacacaggctgaagtgcaatggcgtgatcttggctcactgcagcctcaacctccctgtgctcaggtgatcctcccacctcagcctcccaaatagctgggactacaggtgcgtgccaccaggtctggctaagttttaaattttttgtacatatggagtctcagtatgttgcccaggctggtcttgcactcaggcggtccacctgccttggtctgccaaaatgctaggattacaagcctgagcctctgtgcccggccatgagtgaatattgtagaaagcagagacaatgtgccagatgtttggagtgaaaaggacttggctcctgttctcttaggatggacaatgctacacacaatcccaaatcacaggctataagagaggtgacccaatcctgcaggacagttcaacgtttcagatttgaaggggagtgagagagatcagaactggaggccccttgtctgagcccccgactatggtggtccacgtcactccacacgcagcaggcactgtaaatatttcaccttctctagacgacagtagttcctcgagaacaggagcgctggggtaatgcatatgaagctcttagcacagtgtctggcgctgcttcaatgatggctatatgatcaattattcttactcctttgaattcttggcaagagctggcagggaactttgtacacatcaggtacaaaaaaacccatccgcgcagtctaagatcaagaagctcttggcactctctgacagtcctcgacaaagcaattccccttctttctaacacagggtccgtaaaggagatgatccacaaggaccggctgagtggataagaagacagactggctgagcggctgaccctgccagacgacaggctgtgcctctttaccacggtgctgccgttcccaaagtcggcctcagcttggtccttggctggaagctcgtagcaaagtttctgggtcagcagacctcataggcaaggggcccctagctggccgcccccagccctgccaaggcaccaacgcaagaaagccgggggagcctcggtcgcattgctggaagatcgtctaaacatccccgctgctcggccgctaggccggcaggtgttcgggccccgctcccccggcccgccccacccccgcgcccgcgccgcgcttccctctaagaggccgggtctgagtgagcctgtgctgagtcgccgagcagcccgctctccatgtgacttcagtttccgtccgttccttccgctggtgctaaaataatctgatgccccacagcaaggaggtagcccagccccgcgttcggctgctctcgaggaggccggagcccccggagacgatgcgccccgcgcagccgcctgcgcctgcgggagccgtgagtatttcccgcgtgggggcgtccccggggcacagccggggcccttctccaggtgggcgagctcgagcgaggttgggtggtaggaggtcagcgtccgcg

SEQ ID NO: 31325 - DNA, 2300 bp, Homo sapien
aggtgggcagatcatttgaggtcaggagttcgagaccagcctggccaacatggtgaaaaccacgtctgtactaaaaatacaaaaattagctggacatagtggcaggtgcctgtaatcccagctactcgagaggccaaggcaggagaatcacttgaacctgggaggcggaggttgcagtgagctgagatggtaccactgcactccagcatgggtgacaagagcaagactccatctcaaaaagatggaggcaggtgtggtggctcaggcctgtaatcccaacactttgggaggccaaggagaggagataccttgaggccaggagtttgagaccagcctgggcaacacagcgagaccatgcatgtctctacaaaaaatttaaaaattggccaggcatggcagcatgcacctgtagtcccagccacaccaaaggccaaggtgggagaatcgcctgaacccaggagtttggggctgcagtgagttgagatggtgccactgcacaacagcctctccaaagcatgatacgcctattcttaaaaaaaaaaaaaaaaaaaaaaaaaactactttaaaaaattactgtgctctacctctaatctgatgcaatgagctcacaccatttctccttcttttccttctcttttcttgctttttttttttttttaacgaatactattcccaattcacctaactaaaatttgatgttagtaaactacaacctacggggcacatataaactccacacactgaagcaatggctgtactcgtcaaagatgtatgcagttggtactcaaataatgtagttttttttttactagactctttttaaaatttaactttaatttttgctaaagtaatgtttgtatttggaatataaaataattctatgaggcttataacaacaaactatcgtccttggccctactcctcttcatagggagccagactgaattttaaaaggcatatcttccaaaatttctctctccatttcttaagaaacatgcttatactaccattttcagtttttttttttcttttgaaacagagtctccctctgtcgcctaggctgcagtgcagtggcgtgatctcccctcgctgcaacctccgcctcctgggttcaagcgattctcgtgcctcagcctcccgagtagctggaattacaggtgcctaccaccatgcccagctaatctttgtattttcagtagagacggggtttcgccatcttggccaggctggtctcgaactcctgacctcaggtgattcgcccaaagtgctggggctataggcgtgagccacctgcccggctattttcagttttggatagtatgttttgacatacactctgtttcctctttgagacacccgctctagagccctctattccactccaagccgcctggatgctctcttggcctgcttacagattccactctgtttaggaagaaggacggcacgtttatccaattattcttcctggacacgaatactcctctccccagagatcagtaactgcccacaatcttgttaggaagccccacagcacctaagggtacgaatgtccccaaagagtagacgattctctccctactcacgtctccactagtgcaaggctggctttcttacccttagaggaatacagaaatgacatcgtctgcaggccaacgtctaaacaaccaggagtgggtttttccacccaaccgcagtgcacgcaaagcccctaagccgactgtgagaccgggcggagcctggcgctgcaggaagaggcgacagccacagccctactgacgagcccgaggggtgaactccccggcgggaggcccgaaccctcaaacaccgggaagcggaggtgggggccggctgggggaccggtccaccggctcccacctcggcgtacagggattccaggtcccggcgagcgctggcctagcggtttccacagcgacaggccgggcgcgcgtccccgcgcgtgcgcagctcctcgcccgcccccgggtgggcggagcaaggaacagctgggcggggacgaccgccccacgccgcgcgggaacccttgggggccggggctgcaggcagctgggaaccgcgggcgctaggcgcgcgcacccagcactcggtcccagccgataaatctggggcagcgcgcggtaggagctgcgggcggccaggccccttcctgcgtccgcacctggccccgcgcgcccctctcgggcgtccggcttccggcgtcctggcggctcgggtggcggcggttcgggcggccgcctggctgctcctcggggcggcgaccgggctcacgcgcgggccc

SEQ ID NO: 31326 - DNA, 2300 bp, Homo sapien
acctggctacttttaaatttttttgcagagacagggtcttgctatgttttccaggctggtcttgaactcttggcctcaagcaatccttccacctcagcctcccaatgtgttagaatttcaggtgtgagccactgtgcccagcacaaatccagatctttcttcatcctgtttaattttaatgggggtagggtgggaagtgaggactgctatccaactataaattaaattagaagaaaaattatgaacaggcttaaattctactggtatgtacaccagacagcagttgatcattgggaccggagaaaggctaatttacaaatagtacagcaaatactagaatgtcatgattttaaaggcaaaagtaccatttttaaaacgaatttgttgaatgtgaatttaccttcaacatttttcctcttaactattactttggtagtggtgaactggctctggaaattgacttctttttcctttttttttttttttttgagacagagtctccctctgtcacccaggctggagtgcaatggcgcgatctcggctcactgcaacctccgcctccctagttcaagcgattctcctgccttagccccctgagtagctgggactacaggggcacgccatcacgccccgctaattttgaccccttttcaattataaaatgctaacgttggaagcctctacagattaccaaatccaactgtttaaaaattcttctggccgagcatggtagttcacacctgtaatcctggcactttgggaggctgaggagggtggaccacctgaggtcaggagttcaagaccagcttgaccaatacggcgaaaccccgtctctactaaaaatacaaaaaattagctgggcatggtggcgggcacctgtaataatcccagctacttgggaggctgaagcagaagaattgcttgaacttgggaaaggcggaggttgcagtgagccgagatcgcgccattgcactccagcctggcaacagagtgagactccatctcaaaaaaaaaatcttcttggcctcataatcctttgtttagataaacttgaaaacccaatatgtaaacacacaagcagaactgcactgattgacagatactaaacggatctaaatgataccaaggatgacagaaacatcctcattttacagatggagaaacttgtagggtttgtgctttcctcccatcaaaccttaccctttattgtaattattcccgcacttgcccgtctcagtagtacaagcagtttgccaactactacttgcacgaacaactagcagtttgccacggagtcctacattcagtttggggattctcaggcctcacagggcgctaaggccttgcctggccccttggtgatcagaagcttcgtgcagctcaagagcatcccaagacgcttgacggctgactttccttctcagaactttagtaacagggcggccagtccagcctgggaaccgcagggcccgagcccgactctcccggagacccgggatccgccgcagagcaaagcgcacgggagggaaggagggcacacggctctagtgtctgacctcctccggctcgccctactgatctaggtcccgcgccgggtccccacatccccgcaacccgccgagaggcccgggagccgggaccgctcccacgctctggccccccaagccccgccccccttaccggcgtcagagcgcgcggcggtgaaggccgcggcgggcccgcgcgtgagcccggtcgccgccccgaggagcagccaggcggccgcccgaaccgccgccacccgagccgccaggacgccggaagccggacgcccgagaggggcgcgcggggccaggtgcggacgcaggaaggggcctggccgcccgcagctcctaccgcgcgctgccccagatttatcggctgggaccgagtgctgggtgcgcgcgcctagcgcccgcggttcccagctgcctgcagccccggcccccaagggttcccgcgcggcgtggggcggtcgtccccgcccagctgttccttgctccgcccacccgggggcgggcgaggagctgcgcacgcgcggggacgcgcgcccggcctgtcgctgtggaaaccgctaggccagcgctcgccgggacctggaatccctgtacgccgaggtgggagccggtggaccggtcccccagccggcccccacctccgcttcccggtgtttgagggttcgggcctcccgccggggagttcacccctcgggctcgtcagtagggctgtggctgtcgcctcttcctgcagcgccaggctccgcccggtctcacagtcggctt

SEQ ID NO: 31327 - DNA, 2300 bp, Homo sapien
ctccagcctgggaccactttcttgacaaatttgaactttaaaaccttagtgagggaaaattctaaagggttattaattctaaagggaaaattttcttctgccctgcaagcccactgcaggccaaagtaaacaaatgtcctgtgtgtctccctgggctagcatagggttttttttccccccagtctgttcttggagggtatagcgccttgaatttccagtcctatgcaggatcacagtcctgacttcttgtataggcccaagtccttgtctttagtttcctgtgcacctattaaaactctagagatttctgagataagtaggtgccctcaacacaaccatggcttcactgccctgcttaccactctggtgtcctgccccttcttcaggttgagtgtgaaatttggaagactgtcagaaacattctattttcattcttgcaagttatgcctttgaaaggatgtcttatttatccagtgtttctgtgtgtttaataatcagagcatttttcaggttatctcttactgtgccatgttgctccttgattcctttctctcctgtacccactgcatcaattgagttttttgctctacattgatagagaagcacaattcctctttctttccactgccttcctactttatttcccttctattcttgcatctctatactccattatccacattgcagtctagtgatcttaaagtgtaagccaggtaacatcgctttcctgcttaaaaaagccttttaatggttttttgtaatatagactttttaccatggcattcaggatctttcatgacctgaatcttgtctgctgtagtgttttcttaatagtaccgccttcttgttctaggccccagctacacaggccttcttaactgaccgtagcaagcccttttctttcttctcctgcctgtattgcttttctctgggtgcttcttattgctgtctctttctgttcttgccttaagtgtcacctccttaacgaggccttctccgaccaccctatccaaagtaacctcgccaagttttttcttataccaggtgtgactactttaattactgcgtcctcatataagctccacaaaggcttggtgaatcgtgttcacccttgcatttcttttgtgttttttgttttgtttttgaggcatgacgactctgtcacgctgaagtgcagtggcccgatcttggctcactgcagcctcctcctcctgggttcaagcgattctcctgccttagtctcccgagtagctgggactacagatgcgtgccaccatgcccagctaatttttgtatttttagtagaaacggggtttcatcgtgttggccaggctggtctcgaactcccgacctcaggtgatccgcctgcctcagcctcccaaagtgctgggattacaggcgtgagccaccgcacctgaaccacccttgtatttctgatgcttaacagtgtctagtccatatcagacactcaaatatttgtagaataagtgaaacattgatgaactcctccgtggataaaatagggaagtcttaatttgcaaggaggtgatacttaatttagcagcaaaattttagttaagaatttgtaagcaaaaaagcaaaatggataacggatgaattcccagaaacaaatgtcgcggagcagatgtgtataacagcaatcgtctgtcagcgtcttccgtcggcagagacctgcttggagacaatgctgaattaaatgagggactggctgctcctctcaatacaaagactacccaaggaataaaagcaacgtctatcaccgaactactactcccagcggcccccgcgcgggcctgcccatgggaggtggcgctcgtctccgccccggggagctccggcttcggggcgggaggggttctgggttctggccccgccccgccccgctccccgccgtcttcctcccccagggttgtggccacgcgcagcggcggcggttgttccgcttcccctccggcccgggccgtcgccattgccgaaggctccctcccctcccctccctggcgtgcgcaggactccgccgccgctgggcctagcggtagcagcggctgctccagcgcggcgtctcttcccgccccgcttccccttccctcccctcccctccccgcaccgcgcgctagcccggggcggctccgcagcccgccgggagctctgaccgaggcgcctcgctggggcggggaccttgccttgcccggggtaagtgcacacaggccggccggcgcgggacgcaggccgggtctcttcctcctccttccttctccgtggcctggcgggcgggagcg

SEQ ID NO: 31328 - DNA, 2300 bp, Homo sapien
ttgccctcataattcatttacctcccaccaggtcccttccataacatgtgggaattcaagatgagatttgggtggggatgcagccaaaccatatcactcccagaaatgtttttgctcctttacctttttttattctttctcttttgtagaatgaaaaaataatcattttgagagcgaaaatataccatagtgctagtgacacactcccatcaaggaaaataaaagctgtaagatttggtataagcttctcaaatttttttattttattttattttatttttttgagacagagtcttgctttgtcgccaggctggcatgcagtggcgcaatctcggctcactgcaggctctgcctcccgggttcacgccattctcctgcctcagcctcccaggtagctgggactacaggcgcctgccaccacacctggctaactttttgtgtgtttagtagagacggggtttcaccatgttagccaggatggtctcgatctcctgacctcgtgatccacccgcctcggcctcccaaagtgctgagattacaggcatgagccatcgtgcccagctaatcttctcaacttatacctacttttcttcaggtataagcattcaaatgaaataaaaaatttgtttttaagttctgaacagttagcattcttttcattgtatatatgcaaggttttgtttgcttaaatgcattaaataatcttagaatcaaattaagatccagttaccaatgaaaaccatgtttagtgggaaaatatgttgttttctaacatatggttttgtatcagaactcatatgtataagttacggatcctctcccttttactgctgatttcaagtatgtgtcatctacttttttaaagacttaaacctagaagtatgggtagcagggttgaagttttcactgaattagccatgtagctaagacagattacccaactgcctggacagggcatttacaggtgtcacagaacctgagggatgtggccacactcagcctttcagccatgctctgtgtttaattttgtcagtatatccagattcgtcaagctcctttgtgattatctgcaaaactcaaaagactaatgtgtgtaaattaggatgtcaaattttcagagaccaaatactgtatcagcagtgcattgtttcaagattccttggccaggcgtgggggctcacgcctataatctcagcaatttgggtggataaggcgggtggataatttgagatcaggaattcgagaccagcctgggcaacgtagtgaaacctcatctctacgaaaaatacaaagattaggctggatgccgtggctcacacctataatcccagcactgtgggaggccaaggtgggcggatcacctgagttcaggagttcgagaccagcctggccaacatggtgaaaccccgtctctactaaaaatacaaaaaaattagccgaaagtggtggcatgcggctgtaattccacctactcaggaggctgaggcaggaggattgcttgaacctgggaggtagaggttgcagtgagctgagatcacgccactgcactccagcctgggtgacagagcgagactccatcttgaaaataaataagaattttttaggaaagttactgtgaaggctaagttgtaactacaaggttggagtgaaatcagattggaggggtgctgtttgatacccttaatagccaagcatctgtctctgctctagaggtgcacctccccaagatatcctataatttgctggtcagaacatatttttcctctttggaattaaaaaaaaaaaaaaagatttcatgttgtctgtctttctattgagaaggtctcttagaatccattgattagaccagtagcttttggtagtaccatgatgtttccatttgacttttcaaacatttttcagctgaccattaccagctttgttgggggtaaactcaagagagttacatcttttacacattgatttttccagattttgcaaatgtcactataaatggataatattttctaattgggagttgtggcaggggtagttattactgttttttgcttgttcgtgctattttttactttgttactaattgtattttttccaattccaggccatttcataattctgaatcatgtctgataacggagaactggaagataagcctccagcacctcctgtgcgaatgagcagcaccatctttagcactggaggcaaagaccctttgtcagccaatcacagtttgaaacctttgccctctgttccagaagagaaaaagcccaggcataaaatcatctccatattctcaggca

SEQ ID NO: 31329 - DNA, 2300 bp, Homo sapien
acagaaaaccttcaaactgaataattgaaaaaaaaattgacatcacaaagtgtaaaagacacggtgaacaagatcaaataatcttacatatgggctgggtgccgtggctcatgcctgtaatcccagcactttgggaggctgaggcaggtggatcaccggaggtcaggagttgaagaccggcctgaccaacatggtgaaaccctatctctactaaaaatacaaaaattagccgggcgtggtggtgggcgcttgtaattctggctactcgataataatactattataatagtattatctacctcagtagataatactgctgaggcaggattatcgcttgaacccgggaggcagaggcagaggttgcagtgagacgagattgcgccactgcactccagcttgagcaaaaagagtgaaactctgtctcaataataataataataatcttacatatgtaattggtgtctcggagaacaggcatagagaatgcagcaaaaaccatatctgaagagataatgattgagaatttctcaaaactgatgcaagacatctacccacaaatcagagaaactcaatgatatccaagacagataaatacaaagaaaacaaagatagggcacaaaataaatggctaaaaatcactaacaggctgggtgcggtggctcacgcctgtaatcccagcactttggggggctgaggcgggcagatcacgaggtcaggagatcgagattatcctggctaacttggtgaaacccggtctctactaaagaaatacaaaaaaaattagccaagcgtggtggtggacgcctgtagtcccagctactcaggaggctgaggcaggagaatggcgtgaacccgggaggcagagcttgcagtgagccgagatggcgccactgcactgcagcctgggcgacagagcgacactcctctaaaaaaaaaaaaaaaatcactgacaaagagaaactgttaaaaagaagtgagagggcctggtgtggtggttcacgcctgtaattcgagcactgtgggaggcccaggtgggaggatcacttgagctcaggggttcaagaccagcctgggcaacatagggagatgtcatcgctacaaaaataatgatagtaatagtaataaaaaattagccgggcgtggtgcaggagcctgtggtcgcaggtaccctggaagatgaggtgggaggatcgcttgagcccaggaggcagaggttacagcgagcctagggtgtgccacggcactccggcttgggcgagacagcaagaccctgtttggaaaaaaaaaaaaaagaaaagaaaaaagaaaaaaaaatcaacagtaattgcagccattgcttagaactaagactaaacaaagcttttgtttggaaaggagtactttttcattaacattgtttagaattttctgacacatgatgataattaaaagcaaaccatcctgcagttggcttcggtattgtttttatcttctccaccatcaatgcatatccttactgcctacacaggctctcagcaacgcactgttggttttccattgcagtcacctccactttattcttccagatcgagtatgttcaaaactgaactcatcttccgccataaatctgctattattatgtttttgcctgtcaggacatcggcttataattttggaaagcattcacagttggggcgggtaagacatagataaagaggccaatcacaataccaggggtaagatcaataggaaaaccagagagcggacgcctgggccaggcctcacaacgtccagagctggaatgggtcttttgctttcggcgcaggggtgacgggatcagcggagggtaggggtgtacactagctgcggtctgatttagcccttttaggttaaaagctggagaaggggctgaagtctcaaacgcgcttagcagctcctgaacgcggttcccatcccagcgcgttctgagggaggccggggctaaggacgcggtgacgggcgggggcggggcggccccgggtcgggaggcggggcgggagcgccggaagcgggcggtgccaggcccagcctcgcaggcggaagggcgcggaggaggtgacgcgataggccagcgccggcgtcgcggcagccgcttcagaggaagctcggcggctgtggccgcggcgaacaggccggacgcctcgtcgctggcggggcttcccttggagctgacgaaggcggggtccgcggtccaggctgctgccgcgacggggccggcggcggggcagctgccaggaacgagggtagcaggtaagcggggacgcgggcagacgagtgacgga

SEQ ID NO: 31330 - DNA, 2300 bp, Homo sapien
tggagtgcagtggcgcaatcttggctcactgcaacctccacctcccaggttcaagcaattcttctgcctcagcctcccaagtagctgagattacaggcactcatcatcatgcctggctaattatttttgtatttttagtagagacggggtttcaccatgttggccagtctggtctcgaactcctgacctcaggtaatccatctgcttcggcttcccaaagtgctgggattacaggcatgggccaccacacctggccctgtgttctcatgtgtaaaatgaaggacggggaagggagaggagaccaaataccacttaagactgattccatattgacttaattataatttgctcatagcaaaataattagtttcatacagcagatttttaaaagagcaggtacttttgttctgtatagtcatgcaccagtagatatttagtaaatacatgtgaggtcagcatctcaagagggaagccacgctcctctgttaccagtcaaagactctgggtagccatgcaaggacaggactttatcaaatgctctcacccagtgatggttctggatctcaagtgaatataagaaaaaagaaccaacacaagcatacacacatatactgcaggaacacactctagaagtagatggaaatgaatgacagtcaaatccaaacaataacttcccctcaggatttaataaaatctaatattagcgaaggctctttagtctagaaagaaaggcaccagtcactgcaggtagagtggaagaaagactatgaaacagaagccaatattctaatttcagcttgacaacagtttactcagaagtgctgtattacctttctgtgtataagttttctctggggaaaaaaatggaggactgaacacatgtttacctcagttccctctccaaatcacactgaggttacagaaatcagtttttttttgttttttttttttttgagatggagtttcgctcttgtcacccaggctggagtgcagtggcgcgatttttggctcagtgcaacctccacctcccaggttcaagcaattctcctgcctcagcctcaccaggagctggtgtcaggtgtgaggattacaagcaatccttgcaccttggcttcccagagtgctgggattgcaggtgtgagccactgcgcctggtcgaaaatgattcttaagtttatttttctcagaggcaggtgtacagcaaatggctttttgttagactactcatgtcctccctcctctccagttttcattgtgatgaaaaccttggtcagataagatttcattgtgtccaatagtctaaattgaagtatatgtactctttttttttctcaattttctgccttagttactgtgaatatgtcttcatgaccttatttttagatagaaatataacttacttctcttctttacagctgcatccagatctcattatgcatcagaaaaatgaaaaaacagaggaaaattctatggaggaaaggaatccacttagccttttctgagaaatggaatactgggtttggaggctttaagaagttttattttcaccaacacttgtgcattctgaaagctaagctgggaaggccagttacttggaatagacagttgagacatttccagggtagaaagaaagctcttcaaatccagaaaacgtggatcaaggatgaacccctttgtgctaagaccaagttcaatgtggctactcaaaatgttagtactttgtcctctaaagtgaaaagaaaggacgctaaacacttcatttcctcctcaaagactctcctgagactccaagcagagaagctgttgtcatcagcaaagaattctgaccatgaatactgcagagagaaaaatctcttgaaggcagttactgactttccatcaaatagtgctttaggtcaggccaatggtcacagacctaggacagacccacaaccttctgactttcccatgaagttcaatggggagagccaaagtccaggtgagagtggcacgattgtggtcaccttgaacaaccataagagaaagggcttttgttacggctgctgccaagggccggagcaccacaggaatgggggacccttgattccaaaaaagttccaacttaaccaacatagaaggataaaattatctcctcttatgatgtatgagaaattatccatgattagatttcggtacaggattctcagatcccagcacttcagaaccaaaagcaaggtttgcaagctaagaaaagcccagcgaagctgggtacagaaagtcactggggaccatcaagagacccgtagggagaacggtgaggg

SEQ ID NO: 31331 - DNA, 2300 bp, Homo sapien
ttttcacaagaagacatgccccgagtgcggaagaggatttacaaggagctatgtgagtgccggctcatggactgaaactcagcagggactctgggaagtctgaccaagttggagcagatggtttgttacttgaatctccaaacacttagttgaatttttacagatatttcagatcagtggtgttgggccactattgttacctcaaatttattttttgcccttattcatttctccagctaccatgtactattgtttaatgttcagtttggtttcatttttaattttatggttctgtgcgtcccccatatttaatatttattattcaaacgcatgcatatagacagagcatgcagtgaagagtattaaaaaaaaaagcttagtagatttggtgcagcttttgaaacttagttagacgtgaactgaatacaggtttcaaatttactcccagaacctaaaaatgcaagatgtttttgatacaacataactctgagaatagtaagtgttccctggggcattaagggtagctgggggtggttttgacaaatccagtcctgttttactttaccagcggcaactttcaccaacttccctctccaagtgagtcttagagagtgcagtccattccttttgaagggtgagatggaagtggtcgtaaactgactggtgtcttctgtttctggaggcacacttgtaagcacagtggctgctttgggaggagtaaggtgtgagaaaaagcaaccttggaggccagtaacaatgacagatttcaatcgtggttttaggaattataatacgtggcatacatctcataaaggcttttgctgggatattgaattccctgaatttttctgttttcgacctgttaaaaaaatcttaacatccatcaaactagtggtcaaacaaatgagaatgcagctgttctcagagtaatttttaagttgtcatttccctgtgttgcctcccaattggaagaagttaaggtttaccaaatgcatttctatttcaagggtatctgaaacgtaaacattcaaaactgaaggctgactgacttgagatgttttgcaggtggctggagagaagagggaaggtaatagagacaacttagtcccatgggagcgcagcaaccgtgtcaggttctttctcctgtcccattagtgacctcagtaacatgcagggtacgtctggcttctgcatggccagtgctgacactagcacagctgttcttctccttctgttgaacctcatcttctgaagaaaggccaagtggcccttgtccatacacttagctgcattaggatgaatatcacgcgtctcacatctttaatccagcctttcgtgacatgttggaaagatacatgtgaaacctacccagttaccctttctgaattgggaggaaaaccaaccaatgtatgtatgagaaactcagaagtctgaatagaaaaacaaagtaaatggcagaagattctcgagtttatgcccgcgtaggtttggagtgttgaaaaagctaaaatgtttagtttcacttggccctgaggtatggttgagaaggctgactgccagcagttgaggattgagtccgaccatgtttacatgcagggttcccaacaccagtggtgacactgggaagcagccccagcactttcctctcctgagtcctccagacccaaaatccttaatgtcaaaccaggtcagtgtttcttactgtgtttcaagtcgttaaaaagactgagagtagaggcactttatgctgctataggtggggttctgtcagcgttaggaaaaaatgacagtttagggtaaggaagatctcataatgagtttttcaaacataattatgcaaacatgagatttttcaaaacatgccagaaatttgcctctgattttttttttttttttttttttttttttgtgggggtgtggtataccaaagtagccagtcactgggctgtcagttcaaaatgtcttgtacttcagagtgaggaagtgtttcagttcctcagtgacagaacctggcatgcagaagagacagaattgttcctgtaagaaaatcaacgccgagagagagctgcccaaatccagtgactcttccacttccagtctcatgcttcatagggcaccttgaggtgtgctgcccagtgtggcttagactaaatgttgagtttgggttttttgtttttttttttttttgagtcagagtctcactgtccctcaggctggagtgcaatggcgcaatcttgcctcactgcaacctccacctcccaggttcaagcgattctcctgcctcagcctcccaagtagct

SEQ ID NO: 31332 - DNA, 2300 bp, Homo sapien
ttttctcacacatgtaagtaagatccaaataaatagcctacagtttaagataactgtggtgtaagtgcttaaagtatattaatatggattccattcacagaatgctagaaattccacatgacagtatggcattagcatctaaaaaaagctacaggtttagactgaggagatgaataatagacaaagtcagaaggttccagttttcatctcacaggatgctttaagttcaaaatggtcaggatgtggaactgtctaaagtagtaactaaaagtggtagaagtgcaaatcatgcctggcacttaggcatcccagcactttgggaagccccaggcaggtggatcgcttgagtcccagagttcgagactggcctgagcaacacagggagaccctgtctctacaaaaaattagctggatgtggtggcgcgagcctgtggtcccagcttctcaggaggctgaggtgggtaggatcacttaggctcaggaggttgaggctgcgtgagccgtgattgcgccactgcacttcagcctaggcaataaagcgagactctgtctcaaaaaataaaatacattaactgaataaattttttttttttgagaaggaatatcgctctgttgcccaggctggagtgcagtggcgcgatctcacagcaacctccacctccccggttcaagcgattctcctgcctcagcctcccgaatagctgggattacaagcgcctgccaccacgcccgcctaatttttgtatttttagtaagacggggtttcaccatcttggccaggctagtcttgaactcctaacctcgtgatccacccgcctcagcctcccaaagtgctgggattacaggcgtgagccaccgttcccagccttgactaaataaatctaagagcttccctaatttagcgtcaaacaaaatttccctttccctactctagtaacacatttcacacattctccacacttaccctctgctatatgcgccccttcctttcccagtcacaaggggatttttcccttttctgaatcctcactacaggggattatgagctcgcagagcgcagaaactgtcttccctctccctctagggtttagcacaaggatttggcgacagcactcgataaacgtttactaaataattgggttaatgagtcccgccccgccaacccccaaccgtattccatccctacctccgctgatactgaaaagtctactttgaatatctgctgcctcccctttttccacaaaatatactgtgatatagtccggactaaaaatttccctcttctgaaatccagcaattctccgatctttacatccgaacaccctcaaagtgccgagcttggcgggtccacctccccactccgaagcttccccgagggcggagtgaggactccacttgtgtctcccacgcaccgcgtacagcttccgtaacaccatcctcccagagaaggggcccgaatcgccgaagggcactgcttcgccgatttaaaaaacaaagcaaaaagccccgcatctgcatcaggaaggcgcctctgcctactctgggagagagaagggcacccctcccccttgctacgtagtcgtctgcggaggcacaaccgtggaaacgggagccgccaccaccaccaccgctcaaacctctcggcactggctggggtacagggagcggctgcgagcgaatgggataagcgagcctccagttccccgtcttccagagcaagtggcttcagtgatatccaagcgcccttccagcacccattccctgcctcgccagcaggcaccggggccccacttggcgtttgcggatttcagctgaatgggaggcgacacaatgagacaagagcaaaccgtttctcagcgttcttgcccagggccttcccgtctcgcggcccggcctccctcacccggaagtgctggtcccggtactggctcagctccacgtaggagtcgctgcgcagcgccttcaggaggccacccgacatagtgcagagaagcggaccacaatgcggcgactcccggcacgaggctgcgtccgcgatggcggaagcggaaacgcgcggaggcgagcatctcattggacccaatccgagggcggcgtgtcgtcatcaagctgcgcgggggcatagacgtccgggtcgggcgccgcggggcggaagacgagggcggcgaggtcgggttccgggcgcttggagaagatggtgctgcggcggctgctggccgccctgctgcacagcccgcagctggtggaacgtctgtcagagtcgcggcctatccgacgtgcggcgcagctcacggccttcg

SEQ ID NO: 31333 - DNA, 2300 bp, Homo sapien
gatttcagctgaatgggaggcgacacaatgagacaagagcaaaccgtttctcagcgttcttgcccagggccttcccgtctcgcggcccggcctccctcacccggaagtgctggtcccggtactggctcagctccacgtaggagtcgctgcgcagcgccttcaggaggccacccgacatagtgcagagaagcggaccacaatgcggcgactcccggcacgaggctgcgtccgcgatggcggaagcggaaacgcgcggaggcgagcatctcattggacccaatccgagggcggcgtgtcgtcatcaagctgcgcgggggcatagacgtccgggtcgggcgccgcggggcggaagacgagggcggcgaggtcgggttccgggcgcttggagaagatggtgctgcggcggctgctggccgccctgctgcacagcccgcagctggtggaacgtctgtcagagtcgcggcctatccgacgtgcggcgcagctcacggccttcgcactgctgcaggcccagctgcggggccaggacgcggcccgccgcctgcaggacctcgcggctgggcccgtgggctccctgtgccgccgcgctgagcgatttagagacgccttcacccaggagctacgccgcggcctccgaggccgctcggggccaccaccaggtagccagaggggccctggcgcaaacatttaatcctgggctgtgcggggccgaggccgcttgcttttccttccgggctctacagtggcatcaatgtggaggggtcattccgggcactgcgcgcggcttcgaatcccgactgggattgttggcctgcagacatcccacgcataagagcctaggccagaccgcccgctccgttgaagtcttgtgattggacaagacacagtgtggagacagccctaagcctaacagagatgaaggtaggctgggtccagacacggcacctacggagagccacggaccgaagccagagagcctttcctctgcaagtgggactgaaactcttgacagatgctgctcaatctgactggtatagcaggacagttaattccagggacgatatggatgaaaagacaaccctacagctgccaaattcctttgattaaatgtgtgagctggttgataggcatgagtgtgatacttctcaggcaagatgtgttaagaataccggggactgtaggcctatggtaataataaacacgtattttatgaaatgagtcttctgtgctgggacttgctcattgcactctatgtgttatctcactccttacaacgacattcacatgaggaagcagattactttttggatttttttgtagagatggggtggtctcgaactcttgggcgcaagtgatcctcccgcctcagcctcccaaagtgctgggattataggcaagagccactgcgatggaaacagaggctgctgcttaagttgcccaaagtcttgcagagtgggatgtgagcagaggcatttgactccagggcctaagtccttaacacagctctgcagcatttaccctgatactcaaccccttccttccccaaccccccaccatcaggcattaagactactgcctaggggcagggcctggtggcagttgtgtcttatcccagccactgcagaggcaggaggatcgcatgagcctgagatgagaccagcctgggtagcatagcgagaacctttctcaaaaaaaaaaaaaaaaaaaaaaaagactactgcctgccatggaacaagttacctggactcctatcctgtggggaaaagagagatcagattgttactgtgtctgtgtagaaagaagtagacataggagactccattttgttctgtactgagaaaaattcttctgccttgagatgctgttaatctgtaaccccacccccaaccccctgctctctgaaacatgtgctgtgtccactcagggttaaatggattaagggcggtgcaagatgtgctttgttaaacagatgcttgaaggcagcatgctcgttaagagtcatcaccactccctaatctcaagtaccgagggacacaaacactgcggaagcccacagggacctctgcctaggaaagccaggtattgtccaaggtttctccccatgtgatagtctgaaatatggcctcgtgggaagggaaagacctgaccgtccctcacagcgtgacacccgtaaagggtctgtgctgagaaggattagtgaaagaagaaggaacgcctctttgccgttgaaacaagaggaaggcatctgtctcctgcccgtccctgggcaatggtgtaaaacccgattgtatgttccatct

SEQ ID NO: 31334 - DNA, 2300 bp, Homo sapien
cctccagccctaaggcggttttcccctaactcagtagatggaacatacaatcgggttttacaccattgcccagggacgggcaggagacagatgccttcctcttgtttcaacggcaaagaggcgttccttcttctttcactaatccttctcagcacagaccctttacgggtgtcacgctgtgagggacggtcaggtctttcccttcccacgaggccatatttcagactatcacatggggagaaaccttggacaatacctggctttcctaggcagaggtccctgtgggcttccgcagtgtttgtgtccctcggtacttgagattagggagtggtgatgactcttaacgagcatgctgccttcaagcatctgtttaacaaagcacatcttgcaccgcccttaatccatttaaccctgagtggacacagcacatgtttcagagagcagggggttgggggtggggttacagattaacagcatctcaaggcagaagaatttttctcagtacagaacaaaatggagtctcctatgtctacttctttctacacagacacagtaacaatctgatctctcttttccccacaggataggagtccaggtaacttgttccatggcaggcagtagtcttttttttttttttttttttttttgagaaaggttctcgctatgctacccaggctggtctcatctcaggctcatgcgatcctcctgcctctgcagtggctgggataagacacaactgccaccaggccctgcccctaggcagtagtcttaatgcctgatggtggggggttggggaaggaaggggttgagtatcagggtaaatgctgcagagctgtgttaaggacttaggccctggagtcaaatgcctctgctcacatcccactctgcaagactttgggcaacttaagcagcagcctctgtttccatcgcagtggctcttgcctataatcccagcactttgggaggctgaggcgggaggatcacttgcgcccaagagttcgagaccaccccatctctacaaaaaaatccaaaaagtaatctgcttcctcatgtgaatgtcgttgtaaggagtgagataacacatagagtgcaatgagcaagtcccagcacagaagactcatttcataaaatacgtgtttattattaccataggcctacagtccccggtattcttaacacatcttgcctgagaagtatcacactcatgcctatcaaccagctcacacatttaatcaaaggaatttggcagctgtagggttgtcttttcatccatatcgtccctggaattaactgtcctgctataccagtcagattgagcagcatctgtcaagagtttcagtcccacttgcagaggaaaggctctctggcttcggtccgtggctctccgtaggtgccgtgtctggacccagcctaccttcatctctgttaggcttagggctgtctccacactgtgtcttgtccaatcacaagacttcaacggagcgggcggtctggcctaggctcttatgcgtgggatgtctgcaggccaacaatcccagtcgggattcgaagccgcgcgcagtgcccggaatgacccctccacattgatgccactgtagagcccggaaggaaaagcaagcggcctcggccccgcacagcccaggattaaatgtttgcgccagggcccctctggctacctggtggtggccccgagcggcctcggaggccgcggcgtagctcctgggtgaaggcgtctctaaatcgctcagcgcggcggcacagggagcccacgggcccagccgcgaggtcctgcaggcggcgggccgcgtcctggccccgcagctgggcctgcagcagtgcgaaggccgtgagctgcgccgcacgtcggataggccgcgactctgacagacgttccaccagctgcgggctgtgcagcagggcggccagcagccgccgcagcaccatcttctccaagcgcccggaacccgacctcgccgccctcgtcttccgccccgcggcgcccgacccggacgtctatgcccccgcgcagcttgatgacgacacgccgccctcggattgggtccaatgagatgctcgcctccgcgcgtttccgcttccgccatcgcggacgcagcctcgtgccgggagtcgccgcattgtggtccgcttctctgcactatgtcgggtggcctcctgaaggcgctgcgcagcgactcctacgtggagctgagccagtaccgggaccagcacttccgggtgagggaggccgggccgcgagacgggaaggccctgggcaagaacgctgagaaacggtttgctct

SEQ ID NO: 31335 - DNA, 2300 bp, Homo sapien
acaaggtggccccacaggactccagttcgctcctctaggtgaaccaattagagctccccttgggaaaactgcttgagtaatgccctgcactccaataaaagcctcagcccacaggtccgtctctctctggctccccccacccccacaacgattgtgtacagtgtccccaagacattcccgacggccctcagtgtgccctcttcccctgtggatctgtaagtaataggaccacttctgttagttcctgtgtttcgttgtgttgcctgctctgtgtcatgcctgactgagacgctcaaacgtaacgttttccctggtcagggctttccctagagagcagctatcttggtaggaataaactagatacaggtcagacaagaagcacaaggagatctgccaggataaatatgtctcctgggagagggacacccggtcacaggtcagccaggatacagaggtgccccatgaaaggcccacggcaaacacccacgcccaaatcccaggagccctgtcagggcagagttggcctttacagtggctctccagggaggtctcaagaccaaggtagaggaaaatacaacacacacacgccacacgggcgacgctcagctgcatggtgccaagcgaagaaagccaggcacaaaagaccacacggtgaatggttctccttgcatgcaattgcgagagaggcaaagggcagtgacagaaatcagaggagcagttgtctggaaccagggcggaggggaggtgaggggttagctgcagaggggcaggagggtacttttgggaggagaggacttcttgaactcggggggagactagcctggtggtttcgcgtgtcagaagtcatggaactgagccgggcatggtggcggggcctgtggtcccagctgctcgggaggctgaggcaggaggatcgctggagcctagaagttcaaggctgcggtgagccgagatcgtgccaccgcactccagcctgggcgacagagaccctgtatctaaaaaataaaggaaaaaattcatggaactgtatacttccatgtactgtacttaaatttcctggtatttatcgtatgtatagaatacctcacatcttaataaagtcgtcgtttttagtgtgaggggtgctatggggcacggagggcgatccggctgccgaccctcggcggcggcgcgggagtgcgaggccggcggggaggtcgggtcctgcggcctcgccggggcccctgcagcgctctcccgccagggggcagcgtcgggccggcggcgcgggcgggaagctccagcggccgggacgcggtggtgccgtcttccccctgcggtgagggaccgcgtcgcgccaccccgctctcagcgcagcccgcagcggcgaggccaccgggtgggacacgggtgcccgcgcgtcgcgccgcagctcgcggggacctggcgccccgtcccgggaggggatctggcccccgggcgccggctctccgtccacgcggcgtcctccctgcagcccgctagggccgctcgcccgtcgccgcctgcggaacgcggaggggcagcacggccacgcccggccactcgaacctgctccccggcgccgcgtgaccgtgtcaggtccccgtcggcctcgccgtgccgaccccgggcgcctccacagtggctcggaggccgctgctgcccggatgcccgggttccacgaggctctcccagcccgacaagcccgccgatcccacgggcacgggcggaggagagggaaccgccgcgcccgccccgcgcgccgtcgccgaccccggtgggtcgcgcttccccgcgcacgccgcgctctggcgcggggagaggcccctcggggtccgcccgggtcagcgtcccgcgggggtggcggccgttcgctcagcctcctctcgacttccctttcctgtcagggctgctggggctgacaggctcccgggcaaccacgccggggaacccctcacgcccgccgatcgctgcggggctcagcagccgccccgtgcgctgagtcccctgtcatgagtgactccattgcgaggcgtttcgggccacgaagcaggaccgggggccgcactccgggtccccgccctgccctcgccgacctcccgcgcgtggaagggggacggcggcggcggagctccccgccacggagaaccccgaaatggtcatttcgaacgagaggagtgtggcctggggtgtctggtttaacagccccccgcgccgaaaggctgttcgccgaggaggggccgccggggagggagcccgagcgcggcggggcgagaccggtccccgcccggcgttgcccg

SEQ ID NO: 31336 - DNA, 2300 bp, Homo sapien
ttttgtgtcttagactctatgccgtgtgccaagcactgtgcagtgttttgtgtcttagtctctatgccgtgtgccaagcactgtgctgagtgttttgcatcttagactggatcttcacaaccacctcaccaagctggtgatcgtactgtgtgtttttcagatgaggggctagggtgcccaaaggttaactttcctttccagaagttcagggtagggaagtggtagcatgaggcgagctggagtgactgtgcagctgagactcgtccatgtgatgcagagacaaagtcggtcaactctggccatccaggtccccaggaattgactggctttgtgataactgagccgacttcatggaaaatggcctgtgtgcagtggtgggcaagacctggctctgggagatggccacagcggcgaggggtggtggtgtgggggccaagtgaagccatgagagagggaagcagagaaaacctccccttccagagggagagcagagcactgatgaagaccagccgggcccacccccacctcagtagataccacagagcacccactgtagggtctctgggagatccgctccccacgcccccctccagtgagttagcagcgagcttgccagagaaaagatgtgggccgcttattttggaggtgtggggcagggggcagcagagaagtttgcacccttctctgcacccatccacagaagggcagacaccccagagcctgatggggtggaggcagctggaatgtgccagggcagcggaggccctgcaagagccagagaaccagtccaggtcgaagaagggcgcggggggcctcactgactagaggatgagagtggtccctgactggctcttggagaatggaatctgcccttctcggtggagcaggtaggcctttgagtgcctaacaaaacgaaagaaatcggcagcagaagtttctatcagggtccaagcctctgcatgtgctggcttgtttggctttattttagaaaccaaccaacatgtttcattagcactgacacagcaggggtcccctgctgccacctgacaatccagcgtcacttacactgcacccacgcaggccacaccttcaatggccacggcacgctagcccagagttagccacacagaaacacacttctcaccgcacaaaactcccttttgaaaaaaccaagcaatcgtcaggtcggaggagaatcactagccccccacagcgagaggggacaaagcttggtggccgaggcccaggtccttgtggcccctcccggtggggtgaaggtgcccgggactcctcggggttgcatggctacagccggggcgctgccagggcctcctctgcggctgagagatggaagggatccttcccgacgcccgcaggtgggggcgagccaccgggaaccgggcctgtcaccagcatccccgagcccccgcagaccggaatgcaaatggctccgcgcccacgcggctcccggtctgctgacgagggctgcctgctcccatttcttctcttcctcttcattttttttaagggctgccagttctggaaactttttctggcttctcagacaactgtggcaagatggagtagagagaggccccggccgggcgctttctgctgcctcgcggaggggcgggcacggggagtgaggggtccccaggcccagcgggtgcggggccgggtgaggagacggagctcacccccgttcggaacccagaagcatggcgggtccccacgcgcagcccttcaggggcctcgggagcccgcggcctgggtcacctccggctcccttcaggcggggggcggctgctgccgccaggctcgggcgtgggtgcgggcggtgggcatcccacgggggtaggggaggcgagagcctgaggagactcgggagggggcccgtggacgcggctggcccgggatggagctggcgcggccacagtgggggacgaggcagggcacgcggcgttccccgggctcggcctccctcccagcgcacgggcggtcggaggaactggagcccccaccccggacacggtcccgcgggcgaaggcttctccccgtcgccccggtccggcctccctcccgccgccgccagcagaggccgctgtcccacgcgccgggtcccgttggcgccggggcctcctgggacggcctggccgcggcctgcgggtgtaggcgcctcggcggccaccgcgtccccagggggcctcgcggacgggggcgcggggctgcggggaggaggcgggcgggcccctcgggcgacaccgcggggcgggcggcgggaagcccggactcagcggttt

SEQ ID NO: 31337 - DNA, 2300 bp, Homo sapien
gatcagtacttaacactttacatagacattcatgcatgttctccagatgtcctttatttatattcgtattcataagttctcatactacttctggtctttttagtagctcttttagggctgtagccacagaacggtcattctagtgattctgagcagggtggagaggagtgcagcatccctgggcgggtgggtcagtgaagacacgcccagctcacctgatattctgtgactggttgcagaacacaagtccctctcgaaattgtttaggtttgtggggagatatctgtaagacagagtgagaaagccttatggaaaaggccaagaagtgctcagcaggcctagcagaacgctcaggaatcccacccacaccatccctcatttctgggtctttcttcctggacatctcaggcctcagacctgcatccaggagctggagcaccgcagtgcttctgaacgcctcttccagtggcacctgcgggcctagtgtccccacacccgcttgggtgacagaggccaatcagttgtcaagcttatgacttccaatcagagtggtggggccctgaaatgacttgctctttgggtcactgtatgtaaagcaatttgcagctagcggcactgggcgggtgaccctgcctgagcccagtgaggagcaggtcgtctgcctgcggtgcttccaggacctgtttggagacgaccacaataagaacgggttcaaaatgttcgactcctccaactatcatggccaagacctgcttttcaaggatgccaccgtccgggcggtgcctgtcggagagaaaaccacctaccgcggctggctggggctggactacgtggcggcgctggaagggatgtcgtctcagcagtgctcgggcgcaggtaggacaggcccgccctgccgcctcccctggtgctattcagaccccttcaccccagaaccctgagggagcggggggcgctgcgggtccggggaggcgggtggaggcccgttcgcagcagtccaggtggggtgtcccgggaggattttggccaggaggctgcgggccgggagggcgggagcccggcgggtctcccagacggacctgggtaatgagtgtgaacgctcaaaacggcggcgcggggaggatctggggccacggcagagacatgcgtgtgctgcctttctggaaagagcgcatctggaagggcagcaggggaaaggagcacaaagagggaggctgcggcgagttcggtcccgaaagatgcccccacccccaccccagagcgggcgcctgaggcggccaccgcggcccgggcttcggggcctgacccgccgcgttcgtccccagcggccccggcgcccggggcgcccctgctcccgctgctgctgcccgccctcgccgcccgcctgctcccgcccgccctctgagcccggccgccccgccccagagctccgatgcccgcccggggagtttccgcggcggcttcgcgctggaatccagaaggaagctcgcgaaggccgggcccggcgtgggcgggagcaggcgcctccccgggagccccgccgcccacgggcgccacctggcgctgctacctgaggcgccgcccccgggcccgcgcggcccttcccgccaaccgccgcctcccgccacctggagccgcgcgggccgcgccggaggaggccggttgcccaggaaaccgctgagtccgggcttcccgccgcccgccccgcggtgtcgcccgaggggcccgcccgcctcctccccgcagccccgcgcccccgtccgcgaggccccctggggacgcggtggccgccgaggcgcctacacccgcaggccgcggccaggccgtcccaggaggccccggcgccaacgggacccggcgcgtgggacagcggcctctgctggcggcggcgggagggaggccggaccggggcgacggggagaagccttcgcccgcgggaccgtgtccggggtgggggctccagttcctccgaccgcccgtgcgctgggagggaggccgagcccggggaacgccgcgtgccctgcctcgtcccccactgtggccgcgccagctccatcccgggccagccgcgtccacgggccccctcccgagtctcctcaggctctcgcctcccctacccccgtgggatgcccaccgcccgcacccacgcccgagcctggcggcagcagccgccccccgcctgaagggagccggaggtgacccaggccgcgggctcccgaggcccctgaagggctgcgcgtggggacccgccatgcttctgggttccgaacgggggtgagctccgtctcctcacccggccc

SEQ ID NO: 31338 - DNA, 2300 bp, Homo sapien
tgctagtccattcggcacctttgtgcaaactaggaagaagggatccatctggggggatggagaaacagcttccacagcacaagtcctccagagcagacaggagacggaaagtatggcacgtcacggccatcatgacctaccttttacatgtggggaacaagcccagagagggcgacgaactcgcccagggtctgtaagtcgctggtttttaaaaagtagagctcgagtctcctgaagcccagcccatgttccttcccctgatccagtgtgtgataagcagtagcttcatggccccataggagggaggccttccttccccagggcgcagagcaagctcaaggacagacaaactcagagggatgtcttctctctcactgttgtacttacccatgtcagagagagacatcatttctgagtctcagaggggctgatgacataaaggtgaggcctaaatggaggcaggtgactaacaatgtcttcagttcattccccgcatccccaaccacatggggagtgccgcttttgcccgcctgcgacagtggttctcaacatttgctgtgccccgaaataaaaacagattgtgggccccgcccccagagctgtcgatccagtgggtcggaggtggggcctgagcacttgcatttccagcaagttccagggtgatgctcacgttgctggcctagggaccacactgagaaccactgtcctagaaatacggtcaacccaccctttcctccctcaccttcttcactctcttcctccccttctccgcctgtttctccttttccgcttcctccaattcctctctggtcctcttctcaccttccaatcagctggctctgccactgactggatgcctgactcgggcaagtcacctcccgtctctaggcccgaggagaggcagtcggctaggccgagatgcccctgcccggctcccccctcgccagggcgctcggcctgggctcccccgtatcccagatcctctgtgcagctgtggccgagatgcccctgcccggctcccccctcgccagggcgctcggcctgggctcccccgtatcccagatcctctgtgcagctgtggccgagatgcccctgcccggctcccccctcgccagggcgctcggcctgggctcccccgtatcccagatcctctgtgcagctgtggccgagatgcccctgcccggctcccccctcgccagggcgctcggcctgggctcccccgtatcccagatcctctgtgcagctgtgctgggagggagctgctgcgtgaatgagatcatcctccagctgccctccagccccgactctgggattctgacctctccttccttccacgtctgagcttttctctctccagttagacacggtatctggagtctttctagggcgcgaggaggggaggataccctggaacgcggggtaggaggctgaggcgagagccccgagcagcggcgcccgggcccgagcgggaggcctccagcagggggcgcgccggggccgcccaggggcggggtccggggtcggcgggaggtgacctgcgccccaggggcgtggattccgcccgggaactcgcggccgcacttaaggagctcgggccagcgcgagggggagcagggaggaagcccggctgctgcggacctcctcggacccggacccagccccagcccggccccagccagccccgacggcgccatgcggggtccgagcggggctctgtggctgctcctggctctgcgcaccggtgaggccccgctgtgagagccaaaggcgggcgggggtcccggggcgccgcggcccggctgagcaggtcccggggctggaaatgtgcctgagcctgcggctccggggcagtgagacgggggaggcaggggctcggggtcgagtgaggacggcggagggaactagcactgaagcgcagacggggaagtctggaaggcttcttggaggaggcggcctcgaacacccgaggcttccgacgctccaaggagaagcgcgggctgaggcgtggtggggaggcctcggggtgtggagaggagctcccggagggcggcccctcccgacgggcgcaggaactcaggaagactttgggggctcggagcagctctttctcccgagcccccgcgggagaagattcagagggactgaccggcaggcgcgggagtccgcccgggggtttctggcacatgcagggatggaggtggagacggaggccgggtcccctcgcgtcggcgccccggggagtcagggcccgggatggtgggacgggaggcgggacctcggggagcggctcgcggggatcg

SEQ ID NO: 31339 - DNA, 2300 bp, Homo sapien
aggctgtttgtgggttaaactactggcttattactctctcattacatcccacccatttctctggcacacccaagtatgtccggaccccagaaatggcagaatcctggctcaagctgaggcagacttccccattccacaaaggtgatgcgcgttcatgccaaccctgggccaacgggcccgatgtagaatccctgagaacccagaggcagcaagttcactgatgagtcacagctgaatgacacccaagagataagggaagaacttcattgtgaaagagcccagcaaacctcttaggttatggttgttctcactccctatcagcgtcacgtggagttttgccaaaggaaggacttagtcatcaaacagatcctgccagtcatctggtggctcctggagtgtgccaactgagcctttctatcctcgtggtcaggagaacgaggcttgttaaggactcttctatttattccatcttcttaggacaagccatcagcccctctagcaaggctgcctgctagtccattcggcacctttgtgcaaactaggaagaagggatccatctggggggatggagaaacagcttccacagcacaagtcctccagagcagacaggagacggaaagtatggcacgtcacggccatcatgacctaccttttacatgtggggaacaagcccagagagggcgacgaactcgcccagggtctgtaagtcgctggtttttaaaaagtagagctcgagtctcctgaagcccagcccatgttccttcccctgatccagtgtgtgataagcagtagcttcatggccccataggagggaggccttccttccccagggcgcagagcaagctcaaggacagacaaactcagagggatgtcttctctctcactgttgtacttacccatgtcagagagagacatcatttctgagtctcagaggggctgatgacataaaggtgaggcctaaatggaggcaggtgactaacaatgtcttcagttcattccccgcatccccaaccacatggggagtgccgcttttgcccgcctgcgacagtggttctcaacatttgctgtgccccgaaataaaaacagattgtgggccccgcccccagagctgtcgatccagtgggtcggaggtggggcctgagcacttgcatttccagcaagttccagggtgatgctcacgttgctggcctagggaccacactgagaaccactgtcctagaaatacggtcaacccaccctttcctccctcaccttcttcactctcttcctccccttctccgcctgtttctccttttccgcttcctccaattcctctctggtcctcttctcaccttccaatcagctggctctgccactgactggatgcctgactcgggcaagtcacctcccgtctctaggcccgaggagaggcagtcggctaggccgagatgcccctgcccggctcccccctcgccagggcgctcggcctgggctcccccgtatcccagatcctctgtgcagctgtggccgagatgcccctgcccggctcccccctcgccagggcgctcggcctgggctcccccgtatcccagatcctctgtgcagctgtggccgagatgcccctgcccggctcccccctcgccagggcgctcggcctgggctcccccgtatcccagatcctctgtgcagctgtggccgagatgcccctgcccggctcccccctcgccagggcgctcggcctgggctcccccgtatcccagatcctctgtgcagctgtgctgggagggagctgctgcgtgaatgagatcatcctccagctgccctccagccccgactctgggattctgacctctccttccttccacgtctgagcttttctctctccagttagacacggtatctggagtctttctagggcgcgaggaggggaggataccctggaacgcggggtaggaggctgaggcgagagccccgagcagcggcgcccgggcccgagcgggaggcctccagcagggggcgcgccggggccgcccaggggcggggtccggggtcggcgggaggtgacctgcgccccaggggcgtggattccgcccgggaactcgcggccgcacttaaggagctcgggccagcgcgagggggagcagggaggaagcccggctgctgcggacctcctcggacccggacccagccccagcccggccccagccagccccgacggcgccatgcggggtccgagcggggctctgtggctgctcctggctctgcgcaccggtgaggccccgctgtgagagccaaaggcgggcgggggtcccggggcgccg

SEQ ID NO: 31340 - DNA, 2300 bp, Homo sapien
gccaccatgcccagctaattttgtatttttagtagagatggggtttccccatgttggtcaggctagtcgaactcttgacctcaggtgatccgcccgccttggcctcccaaagtgccgggactacaggcgtgagccatcgggcccggctcattcatcttttgacagactcttaggtgattttcatatctgggctattgttgattatgttgcagtgaacataggagtgcagatttcaacatactgatttattttcctttggttttctttttgttgttgttggctttttgttttttattgttttgttttgagacagagtctcactctgttgtccaggctggaatgcgggtgtgatctcagcttgctgcaaccatcgcctcctgggttctgttgattctcctgccttagcctcccaagtagcagggactagaggcacatgccaccacacccagctaatttttgtatttttagtagagacagggttacagggttggccgtgctggtctcaaactcctgacctcaagtgatccgcctgcttcagcctcccagagtgctggaattacaggtgtgagccaccacgcctggcccaatttcctttcctttgtatatatatcgagtagtgggattgctagatcatataataactcagtttttaattttttgaggtggctgggcacagtggttcatgcctgtaatcccagcatttttggaggcccaggtgggcaggtcccctgaggtcaggagtccgagaccagcctgaccaacatggcgaaaccccttttctctactaaaaatacaaaattagccgggcgtggtggtgcatgcctgtaatcccaactacttggaaggttgaggcaggagaattgcttgaacctgggaagcggaggttgcagtgagccaagatcgcacaattgcactccagcctgggcaacaagagtgaaactctgtctcaaaaataataatagtaataataatttcttgaggaatgtccacactattttctgtgatggctttactcatttacattcccaccaacagtgtacagggttcccttttcttcataccattgcctacttgttatctcttatctttttgataacagccatccacacaggtctaaggtgatatttcattatggtttgcgtgtgtgtttgtgacagagtcttgctctgtcacccaggctggagtacagtggcatgatctcagctcactgcaacctctgcctcctgggttcaagcgattctcatgcctcagcctcctgaatagctgggattacaggcacatgccaccacacccggctaatttttgtatttttagtagagacagggttttgccatgttggtcagactggtctcaaactcctggcctcaagtgatctgcccgtctcagcctcccaaagtgttaggatggcaggcgtgagccactgcacccagcctcattatggttttggtttctgttgctctgattaatgaggttgagcacttttactgatacctgctggccatctgtatgtcttctttggaaaaatgtcgattccagtcctttgcccattttttaaatggattatttggtattttgctaatgattttcttatatattttggatattaaccccttaccaattgcatgtttggaaatattttctcctcttccataggttgccttttcattttgttgattgttcctttgctgtgtagattttttatttaatatcccacttgatgattttttattttgctgcctgtgctttccaaaaaatcatccaagaccagtgtgaaggcgcttttttccctgtgttttcttctaggagttttatggttctggttttacatttaagtctttagtctatttcaagttaattttgtataagataagggtttagtttcgttctcttgcatgtggatatccagattttccagcaccatttatttaagacactagcctttccctattgtgtagtcttggcccctttttaatgattagttgccctttgatccgttttgaaatactatttgtttaaaaaaaaaaaaagtaggtagcaactccccaatattcttattttactcgccttgtcctttaacttcctcctcaagtctttggacatttttgttgttgttacttgtttgtttgaaataatatcagcctaaatttgacattcacactgagtatcagtaagggtcatggtttttaaaccttgtgctttcttatttttttcaaactaatttcagacttaaatagaagttacaagaatagtacagggagtttcatgtacccttcacccaaattcctcaagtgttaacattt

SEQ ID NO: 31341 - DNA, 2300 bp, Homo sapien
cctgaaagttttttggttactagttattttaagaaaggacactggcctatgaaaaacacacaactcactgaagatgttcaagttaccgaatgcctcagagaattaagtacatcattttcttaagtttaaaataaatgaattgagaggagcataaagcctagctggcataatagttacgaagttttaattcccacctattaaagcctgaaagaggttgctctgaaatatgttaataacccgttctatggaacttctgagctgtctgtcttcagtttggcttagttttgaacgatattcctccaaaaggtgcaatgctctctgggtatctgagaagaaaaagcagagcctgattaaaactctctatttacaaaaaaagtatcacatactagtgcaaataattctgcatgacatctaaatagttccgcaaatccttcaggtcaattgatgtcactatgttcatgtacacatattccttagaatgaccaaaaaataaaaaaaaaaattaaagaaatacaagaaaaatttaaacatatatcacattagaaaacggaggagagtgagcagtttggaataaatgtgtactggtagtttgccaaagtaaaagatcaaagtattagcaacagtttcagattacctgataatgcaaaagcagattatctacaatttgtcatcataatccaaatttttaacatttcaaaatacaaattcttagtatcccacagttgcttacagaatagtgcttagtaagaatgatagagtgaaatactaaaacaccaattcagggttattaaggacatctgttgggggggggctaactgcctctcttaatcactagagaaatgttaagaaagtttaacaaacattttcgtgtttccatcttctgaaatgatatgaggcttagattccctaagcaataaagctaggaccgtgctgtctcatcaaagttacacaaacgattctaaaacggcaatcaaaaaactgacacacggaaaagcaagtgacatcgacaacagagttacggaataaactctcaccttgcttccggaccggcatttttctccagaatcaggaagagggcacacacctttaaaacacacaacggaaaggaaaaaggatagaatcatgttaaactagcattttcccctatcgaaatagaaaaccctcgcagcctatttgaaaaccccacgttccaaagttttaccaagtcaaagaaagagtctcaaaacgcagcagttgtctgtcaacgtggaaagcttttccttggagtgggtacccctccaaattaagaacagacagaagtcggcttccaaactctcctcgaaagcgtcccctccccaaagagcctagacctgaggccgcctcttcccccgcacaagtatccacactccccacctgctactgggtacgggcgggtgaagcgctccgacccttggcccctgagccagcagcggccgcagagcgctgagaggggaccagcgggactggccgcccgccctgctcgggccccctcctctcgcttgcctttctccttgctcgctgcctccgggctgctccagcgggggccggacagggcagcggccgctctccgcgacgccctcgcgccccgcatgcacacctccgcgggcccccacacctgcggcgccgccacaaagttccggtgagcggcgtgcgctcggaactggggtgcgccccggccagactcggagcagctccccagcccggccccgctccacgtacccccgccccgcccggggcccgcggagccgagcggagggggcgaagggacgggggaggagctcccctgggccgccgcacccccgcggcctcgtcctccttctcggccgcgccgcctcctcgctcgccgcggccccccggcccgctcgcccagttgctgccgcacgccccacccccggaacctcgcctccttccgcgcccccaaccgctctcccccgaaactttccgccaagatggcggcccccgagctggcctgccgcgctcccacgtgaccgctttcccggcgctctcagccaatgggaagtgaggaggcggctcgcgccgagccccgggctccccgcgctgctaccttcgggttggaagggggaggcgggtcgggggagggcaggggaacggaaggggtacccggggagcatcctaagggaacctcttcgcttaaaagggcggccgctgaagtggctctgagaacaaaggagttaacactcggactccacaggtggcccggggtggccctggaggagcccgcctttaccttgccctagcccaccggcgcgtcccgcagttcc

SEQ ID NO: 31342 - DNA, 2300 bp, Homo sapien
atgacattgagaactcacacaaattttgtttttgactcctcagtgtcccctgggaaaaggtgcattggcctttgtgtacttgctacaaggctgtgtatccttgagagcaggactcggatcttatttatttctatccccgtttcctagcaagtgaacatatatgaacaataaatgttatcaagggagagggcaaatttccctccctgtttcttctgaattctgaagagattccattgttagaatggtttcttactgcaaccatcccattcacagtccatcagcgaagtcttgagagtatgatgcctgtcatgagccactttcactactaaataaattccgtccctctgttaagttcccggctgttaggacacctctgccttcagcaccgtttgacccttctatcccattttctctatgcaatgttgctttaactgttgttcaagatcccaggatgcttgatccgggaaagcacagaggtctgctgccaacataccaacatacctctctgtcaagttgtccaaaatcacaagagaaagagccctggactagagctaggagacctgagttctcggctgctctgttactgattagcgtctatgtccttggacaagttgcttccctttttccggacctcggttccttgtcctagataggttctaaagtcggtgggtccttacagtaagttaggattctaaggtgcaatccaaaagtaaaaccagtggtcagtatacctctgagtagctgttaaggttacaatacgaggttcctcggccttccctttggtagccaatggatacggcctcagtcagaggccgtcaggtttactgggaagagccttccggttttgaaagacaggatctccgggtttccagttctgtcactcactcggggtaactttgggcaaattctctctggacctcctaatagggaggtcctcgtcaccccgaggaagttcgaagacgtgggcagtgacttggaaagcttcccgagattccccttctataacctgggtggctcagaccgggagcggggtcccagccggccggtaattccgcccggaggtgcgcacgaaacaaacctgcagcgctggccgagggcggctcagcttcggagggcgcgactccgggtgagttcttaaagggaccgtcagagtttgggtaacacctgcgatgctgaccgggcggggacgcaggcttgagggaaatgaatgaatgaatgaatgagcgaatgaatgaacaaaccttctctgcccacccttaagtataccatactcggaattaatcagttaggcttaaaaatcttgtactataaccctcaaactcttgccaagttaaccagtgtctctatttcatatgtccttctgtaatgaaacccctccccccaagcctattactaagggacgaagagtaacttaacaatcagcctggagtggaaggcaatgcagagttggcacccctccccgaactcctccctctccctctcccaggccccgccctccccgccccctgggaggtgcagttggctcctccttaaggcggcttttccccggtggggatctacccccggggtcgccaggcgctgtctctgccgcggagttggaaacggcactgctgagtgaggttgaggggtgtctcggtatgtgcgccttggatctggtgtaggcgaggtcacgcctctcttcagacagcccgagccttcccggcctggcgcgtttagttcggaactgcgggacgcgccggtgggctagggcaaggtaaaggcgggctcctccagggccaccccgggccacctgtggagtccgagtgttaactcctttgttctcagagccacttcagcggccgcccttttaagcgaagaggttcccttaggatgctccccgggtaccccttccgttcccctgccctcccccgacccgcctcccccttccaacccgaaggtagcagcgcggggagcccggggctcggcgcgagccgcctcctcacttcccattggctgagagcgccgggaaagcggtcacgtgggagcgcggcaggccagctcgggggccgccatcttggcggaaagtttcgggggagagcggttgggggcgcggaaggaggcgaggttccgggggtggggcgtgcggcagcaactgggcgagcgggccggggggccgcggcgagcgaggaggcggcgcggccgagaaggaggacgaggccgcgggggtgcggcggcccaggggagctcctcccccgtcccttcgccccctccgctcggctccgcgggccccgggcggggcgggggtacgtggagcggggccg

SEQ ID NO: 31343 - DNA, 2300 bp, Homo sapien
cagcatcaacttactagctatgtgaatgatccatgctgaaagagcctcccgtagtccccctgaagccttcagatgactgcagccctggcaggcttcttgactgcaacatcataatgccctgagccaaaaccacccaactatgccgctcctgaattcctgacacacagaaactgagataatatttatcgctgtttaacttactaagctaataagttttaaacccttaagctttgaggaactttttttttatccagcaataagtaactaataaagatgggtagaaaggaggaatgaagagtaaagagcctttattcattgttcatatatgttcatttgctaggcacttgctgccggcaccttaggctaagggtagaacaagtgctgggttcactgctgcttttgtacaccgctgacaaccaaatagggctgtcacacagaatgacaagaaaaaaggacacgtcctctttcctccccttcctcctttttgcttttaggggaaggctaggatgacattgagaactcacacaaattttgtttttgactcctcagtgtcccctgggaaaaggtgcattggcctttgtgtacttgctacaaggctgtgtatccttgagagcaggactcggatcttatttatttctatccccgtttcctagcaagtgaacatatatgaacaataaatgttatcaagggagagggcaaatttccctccctgtttcttctgaattctgaagagattccattgttagaatggtttcttactgcaaccatcccattcacagtccatcagcgaagtcttgagagtatgatgcctgtcatgagccactttcactactaaataaattccgtccctctgttaagttcccggctgttaggacacctctgccttcagcaccgtttgacccttctatcccattttctctatgcaatgttgctttaactgttgttcaagatcccaggatgcttgatccgggaaagcacagaggtctgctgccaacataccaacatacctctctgtcaagttgtccaaaatcacaagagaaagagccctggactagagctaggagacctgagttctcggctgctctgttactgattagcgtctatgtccttggacaagttgcttccctttttccggacctcggttccttgtcctagataggttctaaagtcggtgggtccttacagtaagttaggattctaaggtgcaatccaaaagtaaaaccagtggtcagtatacctctgagtagctgttaaggttacaatacgaggttcctcggccttccctttggtagccaatggatacggcctcagtcagaggccgtcaggtttactgggaagagccttccggttttgaaagacaggatctccgggtttccagttctgtcactcactcggggtaactttgggcaaattctctctggacctcctaatagggaggtcctcgtcaccccgaggaagttcgaagacgtgggcagtgacttggaaagcttcccgagattccccttctataacctgggtggctcagaccgggagcggggtcccagccggccggtaattccgcccggaggtgcgcacgaaacaaacctgcagcgctggccgagggcggctcagcttcggagggcgcgactccgggtgagttcttaaagggaccgtcagagtttgggtaacacctgcgatgctgaccgggcggggacgcaggcttgagggaaatgaatgaatgaatgaatgagcgaatgaatgaacaaaccttctctgcccacccttaagtataccatactcggaattaatcagttaggcttaaaaatcttgtactataaccctcaaactcttgccaagttaaccagtgtctctatttcatatgtccttctgtaatgaaacccctccccccaagcctattactaagggacgaagagtaacttaacaatcagcctggagtggaaggcaatgcagagttggcacccctccccgaactcctccctctccctctcccaggccccgccctccccgccccctgggaggtgcagttggctcctccttaaggcggcttttccccggtggggatctacccccggggtcgccaggcgctgtctctgccgcggagttggaaacggcactgctgagtgaggttgaggggtgtctcggtatgtgcgccttggatctggtgtaggcgaggtcacgcctctcttcagacagcccgagccttcccggcctggcgcgtttagttcggaactgcgggacgcgccggtgggctagggcaaggtaaaggcgggctcctccagggccaccccgggccacctgtg

SEQ ID NO: 31344 - DNA, 2300 bp, Homo sapien
aaaatccagaaataggcccacccaaatatgcccaaccaatttttgacaaaagtgcaaaagcaattcaatagaggaaagataacgttttcaaaaaatggcgctggagcaaatggacacaaaacttagacctaagtctgacgtcttatacaaaaattaatggatcatagacttaagaagtaaaacataaaactataaaactttttttttttttgagacagggtctccctcagtcccccaggctggagtgcagtggtgcaatctcagctcattgcaacctctgcctcctgggctcagttgatcttcctgcctcagccttccaagtagctgggacttaaaggcgtgagccaccacacctgactaattttcgtattttttgtagagatggggtttcgccatgttgcccgggctgttctcgaactcctgagctcaagcaatctgcccacctcagcctcccaaagcgctgggattacaggcatgagccaccatcccagccaaaactataaaacttttagaaaagaacatagaagaaaatctttgggtcctgggggcaaagagctctgagacttgacatcaaaagcatgccgcataataggaaaatactagactttatttaggggttaagagtttagactctggactctctcagccttggtttcactagttagctctatcactaactacattgggcattgaaaattcctctgttgtcccacgtggtgcatggatgattgtagacgaggacactgagatcctgaaggcagaagtaatttctctaagcaacgttgttggttggtggcagagtctgggttacaacccctggtttcctgattccgagtccaagtgaaatacttttgcccctgcagtagaccctgctacagaggataaaaaggcacgtcataggctaggagaaaaattttgcctaccacatatgtaaccaaggactagcagctaggacatctgaagaattctcaacattcaacggggtagaagaatgaacgattcaatagaatatgggcaaaagacatgaagaggcattttaccaaacatagggtgctatggtccgaatgtttgcattctcctcaaattcctgtgttgaaatcctaacccccaaggtattggtattaggaggcaggggccctgggaagtgattaggtcataaaggtggagtcctcatggatgggattagtgtctttataaaagagacctttgccatgtgaggttacagtgagaagacatctgtctatgaagaaagtgggccctcaccaaacacagtctgctggcactttgcacttcaactccccagcttccagaactgtaaggaatataagtctgttgttggtaagccacccggtctatgatattttgttatagcagcccaaacagactaagacaggtgacaaataaacatgaaaagatgttcaacatcattagccattagggaaatgcagattaaaaccacagcgaaatatcatgatacagttttcagcatggctaaactagaaaatagtgacaccaccaaatgccgacaaggctgtggggaaactgggttgttcagacactgccactggggctgtagcgtactatagccactttcataaacagtttgtcagtttcttaaaaaactaaacctgcaactaccatatgacccagcaattacacccctgggcacctacccaagagaaatgaaaactcaacgtttgcgcaaaaacctgtgtaggaatgttcaagcagctttattcataatatgcccaaacaggaaacaactcagctgtccttcagtaggtaaatagttaagcaaattgtcatacccctgtgtcatggagcactacctagcaataacaaggagcaaattattgatacataacaatctggatgaatctccagagaattatgttgaatgaaaaaagccagcccctgaaggatacatactgtatgatgccatttacataacattcttgaaattctaaaattacagagatggggaacagatttgtggttaaagatggagccgggtgggaagaaagtaggtgtggctataaacgggtaacatgaaggatccttgtggtgatggaaatttctgtatttttattgtatccgtgtcagtatcctggttgtgatatggtaatacagttttgcaagatactacccttaggggaaatgaggtaagacctggcatctctctgtattatttcttaattgcatgtgaatctacaattatttcaaaataaaaagtatgattgaagtaactctcaggaagcttagcctactgtggattaagacatcaaaattgcagcaggctt

SEQ ID NO: 31345 - DNA, 2300 bp, Homo sapien
tctccagaagctcacagaatggacagacagagccaacagttttatttgtttgtttgttttttgagacagtctcccactgttgcccaggctggaatgcagtggcaccatctcagctcactgcaacctctgcctcccaggcttaagcaattcttctgcctcagcctcccacctagctgggattacaagcatccactacgaagggcagggtttcaccacattggccaggctggtctcaaactcctggcctaaagtgatccacccgcctcagcctcctacagtgctgggattataggcgtgagccaccgcacccggtctacagttttctttaaatcttcatcatgccagtacttccctcctcctgttttcatcttcctgtatttgcaagtttcattcattctcttcattctattcattccttctctgtactttacctaaacatagttgtgaacccccaaaatctgagccagatcaatttaggaagtttattttcccaaagttaagaatgcacgcaagtgaaatggcctcaggaagtcctgacatgtgcctaaggtggttgggacacagctcggttttatacattttagggagacatgagacatcaatcaacatatgtaagatgaacattggctcagtctggaaaggtgggacaactcgaagcaaggagggagcccccaggttataggtagatgagagacaaatggtcgcattctttcgagtttctgatgagcctctccaaagggggaatcagatatgcatttatctcagtgagcagggggtgattttgagtagaatgggggcaggttggccctaagccgttcccagcttgactttcccctttagcctagtgatttgggggccccaaggtttattttcctttcgcgtagcttcgccactaatgtgtcctggtgtcttctctcctcagcctgtttctcatcctggaaactgaggtgtgctggcgcagggcgatagcgcagtggggtggggttgggaggaaacccttatctgtggccgatggccctccgttgttctattattaaaactctgggaaactgctattcttaatttatttttaaagaccctgagaagcaaatctttaatttttttgtttttgtgagacggagcactctgtcgcccaggctagagtgcaatggtgcaatctcggctcactggaacctccgcctcctgggttcaagcgattctcctgcctcagcctcccgagtagctgggattacaggcgtgcgccaccgcgccctgctaacttttgtatttttagtagagactggttttcaccatgttggccaggctggtctcgaactcctgaccccaagtgatccacctgcctcagcctcccaaagtgctggaattacaggcgtgagccaccgcccccggcctttaaataaattcatctgatcaaaagaaatttaaaaaccaaccaaccctaatgagctctaaagacagcaacacgcacaggacctggaaagagcctcttcctcaccggagttttcctcacttcaaggagcggcgccttcaccctccggcctcagcccgcgaggctgcaaccctttccgcacctggctccatctccctggccctcgcccccgcccagcggtcggggagcgagaaggcggcgggggatctggcgcccggcttaggggcgagacggccgcaccgggagcctagcgatcagggcaccttgggcgggaggagcgccagccgggcacccagcgcggaggaggcggctcggcggccccccgacagccacgccgccgtgagccccgcccagcgtagccccagcgcgcgcttcgcgtgtagaagcgtccgggtggcggaggccgcaggccgcaggagtgctggtggaggggcttccagaaagaccctgcggcagcgccccccctcggctctccccgcaggagagcgggcacctgcgcggcgccgggtgaaggcgagagcctcggcgagccctctgcagcggagccccctgcccatttggttttgggtaagaggaggggtccgcgtctctgcagctcgggcgggattccctggcgccctctactcggtttggttcggcctcacgtgttcctttagctccgaagccgggatacgggtggggaaggggggctcgcgccctacaggccgagccctgcggccgcagcggggtaagggtaggatggccgatcgcgcccagaccccagggagtctccctctcggcttttctgccggcgtctccagcagcatgatctggcatttattattcggaataatgtgccaggcaggaggaggccctgggttaaacacgcggc

SEQ ID NO: 31346 - DNA, 2300 bp, Homo sapien
taggactacaattcagtttaattctcagagtcaggatctatgttttttcccttggggtaaagaagaattcttcctttaactacttttctagcaaagcataatcctcaaggcgtaattttagtatagtgatttatttttaaccctgtggtactatatgcctaatgttctgaaacaccgtcactggagcaaatccaggcttgagtctatctgtgaaacgggaacagaaaactaagtgcatcctcccttcctgattctcccagtcttcaaggctgtatgtgccaggagctggggataaaggagatagccttagctctccagaagctcacagaatggacagacagagccaacagttttatttgtttgtttgttttttgagacagtctcccactgttgcccaggctggaatgcagtggcaccatctcagctcactgcaacctctgcctcccaggcttaagcaattcttctgcctcagcctcccacctagctgggattacaagcatccactacgaagggcagggtttcaccacattggccaggctggtctcaaactcctggcctaaagtgatccacccgcctcagcctcctacagtgctgggattataggcgtgagccaccgcacccggtctacagttttctttaaatcttcatcatgccagtacttccctcctcctgttttcatcttcctgtatttgcaagtttcattcattctcttcattctattcattccttctctgtactttacctaaacatagttgtgaacccccaaaatctgagccagatcaatttaggaagtttattttcccaaagttaagaatgcacgcaagtgaaatggcctcaggaagtcctgacatgtgcctaaggtggttgggacacagctcggttttatacattttagggagacatgagacatcaatcaacatatgtaagatgaacattggctcagtctggaaaggtgggacaactcgaagcaaggagggagcccccaggttataggtagatgagagacaaatggtcgcattctttcgagtttctgatgagcctctccaaagggggaatcagatatgcatttatctcagtgagcagggggtgattttgagtagaatgggggcaggttggccctaagccgttcccagcttgactttcccctttagcctagtgatttgggggccccaaggtttattttcctttcgcgtagcttcgccactaatgtgtcctggtgtcttctctcctcagcctgtttctcatcctggaaactgaggtgtgctggcgcagggcgatagcgcagtggggtggggttgggaggaaacccttatctgtggccgatggccctccgttgttctattattaaaactctgggaaactgctattcttaatttatttttaaagaccctgagaagcaaatctttaatttttttgtttttgtgagacggagcactctgtcgcccaggctagagtgcaatggtgcaatctcggctcactggaacctccgcctcctgggttcaagcgattctcctgcctcagcctcccgagtagctgggattacaggcgtgcgccaccgcgccctgctaacttttgtatttttagtagagactggttttcaccatgttggccaggctggtctcgaactcctgaccccaagtgatccacctgcctcagcctcccaaagtgctggaattacaggcgtgagccaccgcccccggcctttaaataaattcatctgatcaaaagaaatttaaaaaccaaccaaccctaatgagctctaaagacagcaacacgcacaggacctggaaagagcctcttcctcaccggagttttcctcacttcaaggagcggcgccttcaccctccggcctcagcccgcgaggctgcaaccctttccgcacctggctccatctccctggccctcgcccccgcccagcggtcggggagcgagaaggcggcgggggatctggcgcccggcttaggggcgagacggccgcaccgggagcctagcgatcagggcaccttgggcgggaggagcgccagccgggcacccagcgcggaggaggcggctcggcggccccccgacagccacgccgccgtgagccccgcccagcgtagccccagcgcgcgcttcgcgtgtagaagcgtccgggtggcggaggccgcaggccgcaggagtgctggtggaggggcttccagaaagaccctgcggcagcgccccccctcggctctccccgcaggagagcgggcacctgcgcggcgccgggtgaaggcgagagcctcggcgagccctctgcagcggagccccctgcccatttg

SEQ ID NO: 31347 - DNA, 2300 bp, Homo sapien
ggagaggggacatagggggtggccccccagccccacagtcgggtggttctcacctccccaagtggctgggtctggggctttttatgggctcagaataggggaggggcaggccataggtagtattggaaaaggcaacattcaactggttaaaaggcattattcagaaagaatcaatcaggaaagggtgggcaaacaggaacagaagttctaagtctgagtcgtgggtttcgtctgggaccagcagtccagcctttcagctctgtttttggctggaaggtggggtttcaccagggacccacccccacctgccaatgcatttggctgcatcccgtggctatcagtttgaccaaatatctgggtactgagccgccatgaggaaagcagctgccaaggactgagcccctcctctgcataataaaacctttacagaaaaagaatttacaattttcactcctgccaagttgacatgtaaaattaatcatcaccagtctgctccttgtcaatctgggacccacacatctctccttaaatcatacttcaccttcaagtaaagacaataacaagatcgtagttctgtctaacatgacacaactatccttgctacaactgcatcctactgcactaatccttttcccagaagaggatacaaagtccttaggtgtgtgaaaggaaaataaatcttggggccccaaaatcactaagctaaagggaaaaatcaagctgggaactgcttaaggcaaacctgcctcccattctattcaaagtcacccctctgctcactgagataaatgcatattctgctggcccctttggagaagctaatcagcaactcaaaagaatgcaaccatttgtctcttatctacctatgacctggaagccccctccctgcttcaagttattctgcctttccggagggaaccaatgttcatcttacatatgttgattgatgtttcatgtctccctaaaatgtataaaagcaagctgtgctccaaccaccttgggcacacgtcgtcaggatttcctgaggctgtatcacaggagtgcgtccttagctttggtaaaataaacttcctaaattgattgagacttgtctcattttgagggttcacaggtgatatttacttatttgagatcctgtaacttaaacactatgatgtaaagttagcaatattaaattctatgagataaagtaatgcatcttatgttacacgataaatgaatacgaaagggaagaaaacaaaggtgctatacgcacactaacatattcataacaaaataaggaagaaacactcatgacaattacagttctggtttttatacctggtcatgtagttgtggctggtattgataactatcttatttcactactcattccatattccctttgccctcagcaagcacctgagtggccatggatcgttgcctggtgaggtgaccagaaccctcgttcctaaagggtctggggtcattagtagttctgcctggattgggttgttgtaattttccactgactttaatcacagggcatgggaatactgagagacgtcctatggtatctcctgtatttcagacatactcttccttacctccactgtgacattcaaggggtatggctttggccccaccttcttgaatctgccttcagattcaaactgtaactcctccctgagtctccagcctcttcttggaaatggccctatctaaaaaccacttggccattttgaaatctttctcaggtcctgattctgggttatgctcagggcagtctctgaagatttctcatcctgttcaggccggttccttgctaatttatgcccacacatacctggcagggagagctaaagatggagttggtgggagctgccctttggcatcattgatttttaatgtattcctaagcagcagcatctgtccttgatcctctgcttgtcagaaggccaaactcacagacattttaagcttaaaacaaacagttacaaagctgttgaactttgcctgtgcaaggacaaacacaaaaacatcccaaggcccaccccccgctgacccccactgtacttgtcacacatatgtgagaatttccattctcagctaaaggcaagcattgaaagaatacacagaaagcctggaaaaggtttccaggggtgtcaatacgccctgtcaactgagaattaagaggatccggctggtcacttgcctggagaggatcctgcatgctgatagtgctgaggcacctgccagctaaggtgagagacagctgaacttgaacatgtgggctgtcactgagagcggtcagcagaaga

SEQ ID NO: 31348 - DNA, 2300 bp, Homo sapien
gggtcccgccatgctggaaagtggtccgggagtttcttacgaagttaagcacatccttaccatgtcatccagcaaccccactgctgaaatgtcccccaagggaaaacttaaacgtgcacacacaaacctgcacacaagtgtttaggcctcattcctcattgccaataactggaagaaaacaaaatgtccgtcggcaggagcaggagaaggcgtgaaccaacgcggatgcttccacataggggacaccaaccagcggtggaaagatgcacccaaatgcgccaggtctcccaggctacatgcccggtgaaggaagctagtttcggtggccacaggccgaaggatgccaacacatgacatcttggagaagacagtgtaccgtgtcggggagcagggcagtggtttcgaggggctacgggtggaggggcgaatggaggagctctctggggcgatggcgtgagcacctgcacctcactgtgggctgctgcggctgaggggctgtacggcaaacactggcttcagtacatgcagactgaaggaggaaggctcccacaactcagagacagagggtgtcgcctccatgaaacaaaaacatatttaaaaaaaaaacctcttaaaattaagaaaaaaaccacaaaaagtatttcataagcgcattgactttgagttgacataatctacctgggagcatggaactgaaaccacaggcttggcaatcccggagggagagggtggagggtttagacctcaattgaagggctcagtacctggctataggaaataacatttaaaaagcagcaagtggaaataatttctgctgatgaggttgcatctctccagatagccggcagagtaaattaaagcaatatagtcttgctctgttgcccaggctggagtgaagtggtgccctctctgctcactgtaagctcggcgggagaatgtcttgatccctggaggcagaggttgcggtgagccgagatcccgccattccactccagcctgggcaacaagagcgaaactccgtctcaaaccaaacaaaattaggtaactaacccaggactaaaacagcgtaactttaaaaaaataagtctaggaggtatgatgttcattccctgcaagccaataaaggccacgtctggggcatacatctaaaaaaataatcctaaagagaaagttatggtcacaaatatgttctgtacggtgttattaagagcaaaaatgggaaacaacccaaatatcaataaaatgggactgaacccttgcaaatttattaaaataaaattgttaaacatgatgcacaagacgaagattttaataaagtgaaaagacaggaaacatacttactaatgattattggtttatttttcatgccacttcattccacaaaaagatttcaggtatcttacaaaaagacacactagaaatattaaaatactatctgaaccagaagcagaatcagggtaagctagcagaaaggcgtataagccaaagggatctacccagctttcaaagctgaccacggccgtgcgcagtggctctgtctgtaatccccgcacttcgggagacccaggagggaggatcgcttgaggccacaagttcgagaccagcctgggcaacagagcaagatccggcctctacaaaaaatttaaaaatcagccgcaagccagagactagggacatggctgaggatcgctcccgcccctcggaggccagaaaccgagggtcactcccgctctctagaggcccgaggccccgggccgctcccgcccacctccgcggacgagcgccgccccttcgaccccattccctgaggtctggacgttcaggccctctcggtctgggagatcccggagaaccacccacggggctttaaaaaatgttggtgccaaacacctctccgaaatagggcccgccctatctcggtcggggagcgcgggacctccgtggccacccagcgccaccgtccgcgggtccgctttgcgcaggcgcggcgtccccgccccttagaccccggcccgggcgtggcgtggtgcgcaggcgcaatgtcccccactagcgccccgccttgacccggccgtggtgcgcaggcgcagtctgcgcagggactggcgggactgcgcggaggcgactgcagacgtatcgggggtccggagcctgtcgcggctgctaagcgctcggcgcctggcgctggcgctggccaaggctgtgagtccctgccgcggaccggggcagggcaggcgggggacgaggcggcggtaggagcgggacggtccccagcgggtccgagcggagcgggcgccggg

SEQ ID NO: 31349 - DNA, 2300 bp, Homo sapien
gtgtgattcacaaatgtttatttctagaccatagtttgtgtttcattctctttggatttttatattgctttatagaattataattttaaatttatgactacatttaatttgtcaatcttatgaatcatgcttttggtgtcatgtctaagaacttttcgcctaaccccaggccatacgaattttcccctgtgtttttagctaagggtttgatagcgttaggttctccatttaggcctttaataaatgttgagtaacattttgtgaccgccatggccatacctttctccatctcttacggtatcgggggcatttgcagctcccagtgcgccgtgctgttcccgtcttcttggtccgctccacctgtcatacctttctccgtctctcacagtatcgtgggcgtttgcagctcccagtgccccgtgctgttcccggcttcttggtccgctcttcctgtgagttccagggcacgtcttagtgctggcgctgtcctggtccatcagggggtcccatgagcttgtccgtgtgggaaggttgggactgtgatgttgacgggatgccctgtgagtcaggaggaggtgctgacgggggtttccatgtaggagagagaggtgtttggttttccggatggggcagacttgagaggggacaaacttgagaaatgccaccaatgagaagggcaggcacagcaggtctcggggccgcccagccgtgtgggagccaaacgtggatgtgtcagtggccacgccaggaggtaaaccctcaaccaagggcctctgggtgtccaagaccaagtcttgctcaagaggtgcgttcagctgagccaaccatggcagaaatgcataagggagatcccacggttcctctgtttaaatcccctgctaatcccaccagtctcagagaagcagccaagtcctcacagcagcctgcaacccccgcctgactcagcctcctcttggctctgattctctgtacccttctatccctgtctcttcttccatcagagaggagatccggcacgtttatcctggtggattcaaacccatctttgccccacatatagtcaccggaatgaataggtataatctagaaacaggccttttgaaaaagaaaaaagcaggccgggcatggtggctcatgcctataaccctgcagggaccagccccacagggtcggtgggtctctccctgtgtgcggcgacgagagagtgttgtagaaataaagacacaagacaaagagataagagaaagggcagctgggcctgggggaccactaccaccaatgcgcggagaacagtagtgccccgaatgtctggctgcgctgttatttattggatacaaggcagaaggggcagggtaaagaatgtgagtcacctccaatgataggtaaggtcacgtgggtcacgtgtccactggacagggggcccttccctgcctggcagccgaggcagagagggagaggagacagagagaaagacagcttatgccattatttccgcatatcagggactattagtatttttactaatttactactgctatctagaaggcagagccaggtgtacaggatgaaacatgaaggcggactaggagcgtgaccactgaagcacagcatcacagggagacggttaggcctccggataactgcaggcgagcctgactgatgtcaggccctccacaagaggtggaggagcagagtcttctctaaactcccccggggaaagggagaccccccccccccccgccctttcctggtctgctaagtatcgggtgttgttccttgacaccttttgctactgctggaccacgatccgcctggtaacaggcatcttcccagacgctggcatcaccgctagaccaaggagccctctggtggcccggtccgggcataacagaaggctcgcactcttgtcttctggtcacacctcactatgtcccctcagctcctatctctgtatggcctggtttttcctacactatgattatagagcgaggattatcataatattggaataaaaagcaattgctacaaactaatgattaatgatattcatatataatcatatctaagatctatatctggcataactattcttgttttatattttattatactggaacagctcgtgtcctctgtctcttgcctcggtgcctgggtggcttgccacccacataatcccagcactttgggaggctgaggtgggagaatcacctgaggtcaggagtttcagaccagcctggacaacatagtgaaaacccatctgtagtaaacatataaaaattagctgggcatggtggtgtgtg

SEQ ID NO: 31350 - DNA, 2300 bp, Homo sapien
gctccccccaacccgggtctccagctccacagccctcaacctgcaacactggctacccactgggtctccagatgcatggccctcaaactggaacatcagctccacccccggtatccagctgcacagccctcaaactggaacatcagctccctgccgggtctccaggtgcacggccctcaaactggaacatcagctccctgccgggtatccagctgcacggccctcaaactggaacatcagctccccaccaggtctccagctgcacggccctcatactggaacatcagctccccaccagatctccagctgcacggctctcaaacaggaacatcagctccccacaggatctccagctgcacggctctcaaacaggaacatcagctccccaccagatctccagctgcacggctctcaaacaggaacatcagctccccacaggatctccagctgcacggctctcaaacaggaacatcagctccccacagggtctccagctgcacggccctcaacctgcaacactggctccccaccgggtctccagatgcatggccctcaaactgcaacatcagttccccccgggcatacagctgcatggccttaaactggaacatcagctccccgcccaggtctccagatgcatggccctcaaactggaacatcagttccctgccgggtctccagctgcacggccctcaaactggaacatcagctccctgccaggtctccagctgcatggccctcaaattgcaacatcagctcccatcagagcctccagctgcatggccatcaaactggaacatcagctcccccgcgggtctccagctgcacagacctcaaacttgaacatcagctccccgccgggtcatcaactgcatggccctcaaactggaacatcagctccacccctgggtctccagtagcacggccctacaactggaacatcagcttccccctgggtctccggctgcacagccctacaaccggaacatcagctccctgccgggtctccagctgcacggccctcaaactggaacatcagctccccgctgagttcaaactattccagtttgagggtcgtgcagctggagacccggcggggagctgatgttccagtctgagggccgtgcagctggagacccggtggggagctgaacttccagtttgagggccatgcagctggatacccggtggggagctgaagttccagtttgagggccgtgaagctggagacccggtggggagctgaagttccagtttgagggccgtgaagctggagacccggtggggagctgatgttccagtttgagggccatgcagctggagacccggtggggagctgatgttccagtctgagggccgtgcagctggagacccgatggggagctgaacttccagtttgagggccatgcagctggatacccggtggggagctgaagttccagtttgagggccgtgaagctggagacccggtggggagctgatgttccagtttgaggcccgtgcagctggagactcgggggtagccgatgttgcagtttgagggccgtgcagctggagacccgggtgggaaccgatgttccagtttgggagccatgcagctggaggcactgcggggagcagatgttccagtttgatgttcctccctgggtctccagctgcacggccatcaaactggaacatcagctccccggccctcaaaccggaacatcagctccccgccggatctccagctgcacagctgtcaacatcagctcctccccgagtcctcagctgcacgaccctcaagttagaacatcagcttctccccaagtcttcagctgcgtgaccctcaatctagaacatcagttcctctacaggtctgcagctgcaagaccctcaatctagaacgtcagctcctccctgagtctccagctgaaacaccctcaaaacgaacaacatcagctcctccccaagtcttcagctgcacgacgctcaatctagaacatcagctcctgtctggttctccagctgcatgaccctcaaactacaacctcagctcttccccgagtcttctgctgcatgaccctcaatctagaacataagctcctctctcggtgtccacctgtagtgacctcaaattagaacgtcagctcctcccagagtcttcagctgcatgaccctcaatctttaacatcagctcctctccgggtctgcagctgcatgaccctaaaaatacacgaacagctcctccctgaatcttcagctgtacgaccctcaaactacaacatcagctcctgtctgcatctctagctgcagggccc

SEQ ID NO: 31351 - DNA, 2300 bp, Homo sapien
agctgatgttccagtttgaggcccgtgcagctggagactcgggggtagccgatgttgcagtttgagggccgtgcagctggagacccgggtgggaaccgatgttccagtttgggagccatgcagctggaggcactgcggggagcagatgttccagtttgatgttcctccctgggtctccagctgcacggccatcaaactggaacatcagctccccggccctcaaaccggaacatcagctccccgccggatctccagctgcacagctgtcaacatcagctcctccccgagtcctcagctgcacgaccctcaagttagaacatcagcttctccccaagtcttcagctgcgtgaccctcaatctagaacatcagttcctctacaggtctgcagctgcaagaccctcaatctagaacgtcagctcctccctgagtctccagctgaaacaccctcaaaacgaacaacatcagctcctccccaagtcttcagctgcacgacgctcaatctagaacatcagctcctgtctggttctccagctgcatgaccctcaaactacaacctcagctcttccccgagtcttctgctgcatgaccctcaatctagaacataagctcctctctcggtgtccacctgtagtgacctcaaattagaacgtcagctcctcccagagtcttcagctgcatgaccctcaatctttaacatcagctcctctccgggtctgcagctgcatgaccctaaaaatacacgaacagctcctccctgaatcttcagctgtacgaccctcaaactacaacatcagctcctgtctgcatctctagctgcagggccctcaaactagaatatcagctcctccccgattcttcgcctgcatgaccctcaaactagaacatcagctcctgtacagatttccaactgtagggccctcaaactagaacatcagctcctccccaagtcagcagctgcaagaccctcaaattaccacctcagctcctcccggagtcttcagctgcacgaccctcaatctcgaagatcagatactctccgggtcttcagctgtagggccctcaaactataacatcagctcctctccaagtattcagctgcacgaccctcaatctcgaacatcagctcctcttcaggtctgcagctgtagggccctcaatctagaacatcagctcctccctgagtcttctgctgcacgaccctcaaactagaatctcagctcctcccgagtcttcagctgcacgaccctcaaactagaacctcagctcctccctgagtcttcagctgcatgacccttaatctagaacatcagctcctccccgagtcttcagctgcacgaccctcaatctagaacatcagctcctctccaggtttgcagctgcaagaccatcaaactacaacatcagctcctctccaggtctgcagctgcaagaccctcaaactagaacatcagttcctccccgagtcttcatctgcatgaccctcaaactagaacatcagctcctctccaggtctccagctgcacgaccctcaaagtagaacatcagctcctctccgggtctgcagctgcaagatcctcaaactagaacatcagctcctctccaggtctgcagctgcaagaccatcaatctagaacatcagctcctctccaagtgtgcagctgcacgaccctcaatctagaacatcagctcctctccaggtctgcagctgcaagaacctcaaactagaacattagctcctctccaggtctccagctgcacgaccctcaaactagaacatcagctcctctccaggtctgcagctccacgaccctcaatctagaacatcagctcctccccgggtcttcagctgcatgaccctcaatctagaacatcagctcctctctgactctgcagctggaagatccactaactagaacatcagctcctgtctgggtctccagctccatgacccttaatcaagattatcagctcctccctgagtccccagctgaaagaccctcaacacgaacaacatcagctcctcccaaagtcctcaactgcatgaccctcgaactacaacatcagctcctccccgagtcttcagctgcatgaccctctatctagaacatcagctcctctccaggtctgcagctgcaagaacctaaaattagaacatcagctcctctcttggtctgcagctggaagatccactagctagaacatcagctcctgcctgagtctccagctccatgaacctcagtcaagattgtcagctcctccctgagtctccagctgaaagaccctcaacacgaacaacatc

SEQ ID NO: 31352 - DNA, 2300 bp, Homo sapien
cagctcctccccgagtcttcagctgcacgaccctcaatctagaacatcagctcctctccaggtttgcagctgcaagaccatcaaactacaacatcagctcctctccaggtctgcagctgcaagaccctcaaactagaacatcagttcctccccgagtcttcatctgcatgaccctcaaactagaacatcagctcctctccaggtctccagctgcacgaccctcaaagtagaacatcagctcctctccgggtctgcagctgcaagatcctcaaactagaacatcagctcctctccaggtctgcagctgcaagaccatcaatctagaacatcagctcctctccaagtgtgcagctgcacgaccctcaatctagaacatcagctcctctccaggtctgcagctgcaagaacctcaaactagaacattagctcctctccaggtctccagctgcacgaccctcaaactagaacatcagctcctctccaggtctgcagctccacgaccctcaatctagaacatcagctcctccccgggtcttcagctgcatgaccctcaatctagaacatcagctcctctctgactctgcagctggaagatccactaactagaacatcagctcctgtctgggtctccagctccatgacccttaatcaagattatcagctcctccctgagtccccagctgaaagaccctcaacacgaacaacatcagctcctcccaaagtcctcaactgcatgaccctcgaactacaacatcagctcctccccgagtcttcagctgcatgaccctctatctagaacatcagctcctctccaggtctgcagctgcaagaacctaaaattagaacatcagctcctctcttggtctgcagctggaagatccactagctagaacatcagctcctgcctgagtctccagctccatgaacctcagtcaagattgtcagctcctccctgagtctccagctgaaagaccctcaacacgaacaacatcagctcctcccgaagtcctcaactgcatgaccctcaaactacaacatcagctccaccccgagtcttcagctgcaggactctcaatctagaacatcagctcctctccaggtctgcagctgcacgaccctcagtctagaacatcagctcctccccaggtctgcagctgcacgaccctcaatctagaacatcagctcctctacaggtctgcagttgcaagaccctcaaactagaacatcagctcctctccggatctgcagctgctagacactcaaactagaacatcaacttctgtccaggtctccagttccgtgaccctaaatctagaacatcagctcctccgagtctccaactgaaagaccctcaacgcgaacaactaaagctcctccccaagtcttcagctgcacgaccctcaatctagaacatcagctcctctacaggtctgcagctgcacgaccctcaaactagaacatcagctcctctccaagtgtgaagctgcacgaccctcaatctagaacatcagctcctctccaggtctgcagctgcaagaacctcaaactagaacattagctcctctccaggtctccagctgcacgaccctcaaactagaacatcagctcctccccgggtctgcagctgcacgacactcaaactagaacatcagctcctctccaggtctgcagctgggagaccctcaaactagaacatcagctcctccccgggtctgcaggtgcaagaccctcaatctagaacatcagctcctctccaggtctgcagctgcaagaacctaaaactagaacattaccttctctccaggtctccagttctatcaccctaattctagaacatcagctcctccctgagtctccaactgaaagaccctcaatgcaacaacatcagctcctccccaagtcttcagctgcaagaccctcaaactagaacatcagctcctccccgggtctgcagctgcaagaccctcaatctagaacatcagctcctctccaggtctgcagctgcaagaccctcaatctagaacatcagctcctctccgggtctgcagctgcatgaccctcaatctagaatatcagctcctctccaggtctgcagctgcacgaccctcaatctagaacatcagctcctccccgggtcttcagctgcatgaccctcaaactagaacatcagctcctctccgggtctgcagctgcacgaccctcaatctagaacatcagctcctctccgggtctgcagctgcatgaccctcaatctagaacatcagctcctctccgggtctgcagctgcatgaccctcaatc

SEQ ID NO: 31353 - DNA, 2300 bp, Homo sapien
gttggccaggatggtcttgaactcctgacctcaggtgatggagatgggatttcaccatgttggccaggatggtcttgaactcctgacctcaggtgatctgcccacctcagcctcccaaagtgctgggattacaggtgtgagccgcttgtctggccaacaattgttttgttaaaacctatcaccaagggttgggcatatggatcaagctggattgtctgaattcattccctagaatttggaccttgaggaaataagacaatgagtgaaaagatgggctggcacttgcttgttccagcatggtgatgagactgccactcccgcctcctggaccctgggtgtgtggcctggcctggggaaggtgcttgggggtgttgaggcctggcctggcctggggaaggtgcttgggggtgttgaggcctggcctggcctggggaaggtgcttgcacagggtgacatcatttcagggagtagttgcctctgtccctggccagtctccagtctccagcttcatatcctcccgctggagagcagagacgatgggggtgtccctgtgtatgcttaagtgcaatggcattttaagaaaactattagcaattttatgaaactaaattgctgctgttttattagcagccacagtcagcaaggccctggctgggtgcttgctccgtgaagctgtatacgtgtgactgcctcagcagtgctggctgctcctgctctcgaatctaaaaagcagctggacaaaatgttcacgttttcgctcaaaaccaaacaaacagaaaaactcaattagcttgtttgtgtgggctgaagcacctctgtttgcccgccccccgcagtgacccccatagtgtccccggaatggacggactcacgggctgtcacatcgcgcacatcttccccggagaagggatgtgaatcttggtggggtggggggcactacctggcccagcacagggtgcaggtgggtgacccgggagactctccccgctccagacctgtcatcatgttgccatctgaggcggcactcacaggtttgcggggctgcacatctttgggggcctccactcagcctggcacagtgtgtgcccagcaagtagacgaccgcatcctcgccagcacacatgtgctagaaacttctgtcaggaaacgccgctcttcacagccaagggtggaaactactggatgcattgcagagctgacgccctccctccggcctggctccgagccatgcctggtgtggtggaggggtggaggccaccctcaccgggccctgtgtgctgctctgatgccgctgagggggccggggcctgggtgtgccctcagcgcgtccactgcagaggggagcctgcgcccacgttttggctctgtgggtaaaggtggccaccccctgagcttgtaggggtgtgggacacttcccgatgctgcctgccatgattttacatgaaaagccgggaaaaggcactgaggagccacctgaccccacggaatgccatttcctggtgtcgcttggccagaagtcattgacacagccctgccagccggaagctggggcagggacggggtcctgccttctgggacaggttctgtgtgtgcgcgaccatgtcccagaggtctctgctcagccctgggggccggtgggggtggggttggagggtggatggtgggggtggggccaagttagcccgagcggtctgtgaggtgagaagggccggggtctctcctcctctcctccgcaccccaccccgccttgctctgaatctctccctctctctgtctctgttggtctctttccctctctactccccattctggtgtctttggagccctgggtaaggtgtgtgctgagtccggtctggtttggggtagatgttctttgatctgttaccacacctggagggaaagcccctggcccgccccccctccgttcctgcagagccaggccccccaaccagtcggtgggcaggatgcccaccagttgcccccatctggcccagggggacctttcctctgctctccagggaccactgcaggtggtgtggcccctgaggggagcataagggtgcagtgcctgactcaggggacacagaagccccgtccatacggccttttacacagcacagcacccagccctcggcagcccagagcaggaaccaacagggtaggtgcccaggggccccaaaggtcagagttcctcgcacagctgccagggagcacagggaccgcagcacagggtcttctgctcagcaccgggaccccgctcgctgcagctaaagaaacagatacgtccaagggctccacgg

SEQ ID NO: 31354 - DNA, 2300 bp, Homo sapien
ctggccattttgctgcacctcgcgttcttcagcttctcctctactttgtttctgatctgccttcaccctcctcctcattcatccttacctctccctttctgcttcctcaagcttctctcaaggcctccctgatgggctctatcactgtggcagcttttctctccccagatgctgccttcctgctaagtgacgctcatgtcacggccatgctgcagtgcctggaagcagtggaacagaacaacccccgcctcctggctcagatcgatgcgtccatggtacaggggacaaggaattatccacgtctatgctgggtccctggagctcagcaggatgtagccctctacagcaaactttttcacttagccatttttgtgagctgaaaggcttgcatttttttttttttttttttttttttttttttttttgagacagagtctcgctctgtttcccaggctggagtgcagtggtgcaatctcagctcactgcaacctctatctcctgggttcaggcgattcttgtgcctcagcctcccgagtagctgggattacaggcgcccgccaccacacccagctatttttttgtatttttagcagagacagagtttcaccatgttggccaggacggtctcgatctcctgacctcgtgatcctcccgcctcggcctcccaaagtgctgggattagaggcctgagccaccgcgcccggccagctttcatttaaaatgcttggaggaggggaggtactgttaagtacctattgaagtagaaagtctaggcttaggtcgtgtgcttagtagacctaagctggggagtggggaggtagattttgttaaacctgtggtatcttttgacaaaggataccaagccttgacaaagatctggggaaaagagggatggttttgaatcggatagagtttagtgtcagacctggcatagcttaatgttacacggggtcagttttttcatgtttttttctttgatgtaaagaaaattttatagtacaaagaaaatttgttgcctaaaattaacttatcccatcactaatactccagtcagtgccttagctagaatggaatcagagtccccacttcttagagaagcagatcccctatctctccagattcttttaattaattattatcattattattattttgagacagagtctttactttgttgtccaggctgggctggaatgcagtggcatgatcttggctcactgcagcctccgcctcccgggttcaagtgattctcctgtctcagcctcccgagtagctgggattacaggtgcacgccaccacgcccagctaatttttgtatttttagtagagacggggtttcaccatgttggccaggctggtctcgatctcctgacctcaagtgatttgcccgccttggcctcccaaagtgctgggattacaggtgtgaggcactgtgcccggcctgattcgtttaattttgattgttggttactatccatttaatactttgtatgtgccaggcacggtgctatgtatgataaatgtatcatgtcattgactcttcataaccctgtgaagtgggcattgatctcattttataaaggaggctgctgaggcacagagtagatacgtggtccaaagtttggatcaaatagctgataagtgtcagggcctggatttgaaccctagtctgtctgacttctgattccacatacatcagcactttgttgtgctgcctctgtaataaagtactcctggtttaacacctggaaggattccagtgcagatgctgtggtttcacagttgtaaattacatactgtagtagaaggtagccttgctgtatctacaggctctggctaaagtccaggcctactgcaaaggtagcttctatggcatttctgcagtactgcgttgcccccactctgaggccctttgtccttaactctgacacattttttggttttgttttgctttttagtttgccagaaagcacgagagcccgctcctggtgacaaagagccagagcctgacagccctgcccagttccacatacacccctccaaacagctatgctcagcattcctactttgggtccttctctagcctccaccaatccgtgcccaacaatggctcaggtatggggacaggaaaaagtggtcattacatttatccccagccctggaaagtaagaagactttgtggttgctcataggcttggaaaattgagacttgggttggtagtttttcttaataagggacatctttacaagttatatagtgactagcttgaaataattcagtagaatcatgaagtaacaga

SEQ ID NO: 31355 - DNA, 2300 bp, Homo sapien
aagagtgaaactctgtctcaaaaataaataaataaataatatagtgttaatttgggattatactgtatgccaaaaaataaagttcatacatttatagaactagaagtaaggccaggtatggtgcctcatgcctgtaatcccaatactttttgggtgactgaggcaggaggactgcttgagcccaggaatttgagaccagcttaggcagcacagtgagaccctgtctctaccaaaaattaaaaaaaaaaaaacaaattagctgggcatagtggcactgcctgtggtcccagctacttgggaagctgaggtgagaggatccgcttgaggaggttgaggctgcagtgaactgtggcagcgctactgcaccccagcctgggtgacagagcaagactgcgtctccaaaagagaagaaagtcacagaaggaagagaaatcccaatgagtaatattgcccctttcttaaagaagtataatcgtttagtaggaaaatgagaaagtttgaaagagagtatttttttaacctaaatgaaatcataaatggcttcaagaggctctttcatttcatttttaattgccaaaacacttttgtcaagtttgaaaatacctaaaagccatatattattttaatatagagtcattagtttttcacggagttattcttgatcgctctttctccctcacttgccacagtcagtcctttatagagtagtgctgattctgttgccttcacattgctgtaatctgagcctccttgttctcttcaaccgctgctgtagtttaagcctgggtttgcaaactagcaactcaagggccaccttcagcctacagacaagctgtgtttggcctgtgcaaagttgaaagtttaaaaaatttgttgccaacgtttaaaaatttggaagtagtgcttaaaaatgcagatcctagcttcttttaaaaaatcaaaatatcatagctaggtgtggtggctcgcacctgtagtcccagctattcaggaggctgaggaaggaggactgcttgagcccaggagttccaggctgcagggagctatgattgcgccactgcaccccagcctgggcgacagagagagaccccgtctttgaaaaagaaaaaagagaaaccagagtatctggcaaccctaggcccacgtttctttcaactggttcgcttcacttcttagcattacttggttatcccccataaggatgaccagtctcctatctagccttccaccgttacctcaatatagtattatatctgccccatctcctgtccacattgtcaaaagtggctttctcatcagattcgatcaaatcacttcttgatttgcatatgcttgatttgctgattgttttcaggataaaatccaaactccttaaaatggcatttcatgatctggtttccccacaccagaatgcccacaccatgctgctgctcactccttcccagctctggctacccagcacctgcagttcccaagccagcacttccttccttgtatctgccgtgttgctctctccaccttctcttctttctcctggctaacccgtactcagccttgaaaactctgcgttgacatccatcttccgagagcccccagaagcctttctctcctgctcttttatgatcccaaagcaacctgtgctcttgtttgtgagcgcttcatttaaatgctcgaggtctccaaacaccaccagcggacattaagccagggcgggctgagtggggttaatcgtaccgggattagattagcgttattgcctagtctacatctcggactgagttcggtccccagcgtgtaatgtcacgggggtgaataaggatacgccccggcacggattcctgagaccaaggtcccccgccgcttgcaagccggcccagccaaccaccgggtgcgtagtaatccacgagcgcggcctgggattggagggcgcggcctgcgggagcggcctgggattggagggcgcggcttgcgggagcggcctgccgttggaggggcgcggtctgcgagcgcggcctgggattggaggacgcgtcctgcgggagcggcctagcctcggagtgctcgccgggggctgtagtccccggagccggaagtgggggtggccgggatagaagccgcagcccaggcggcggtccctcccgctgtcgccgcccgggtgtagcgcatcacccggagcccaccggccgcaggtgcctcctccggccccagggggccccgggagccctgaagggcgaagcggcagggacgcctctcttgggcgaagaggcggcctcaccgccccggatgcggccggagggcgc

SEQ ID NO: 31356 - DNA, 2300 bp, Homo sapien
taacctaaggatcctctctgtagtttactctcacaaatgagcagagatggtagaagttatttctagtgacagaaggtgaatgtggagaaaaatgacttgtgcttagaggattttaaatatacttttcatactcactattcttactcctttttctggttttgaagatgggtatgaggtccagagactctcccaaaatcatacagtgaataactaaagtcagtgaaaaagttatcactcaataaaactcaggtctgggcccacaacccagtttctgtagttttttttttttttttatttgagatggagtcttgctgtgtcacccaggctggagtgcaatggcacgatctcagctcactgcaacctccgcctcccgggttcaagcgattctcctgcctcagcctcccaagtagctgagattacaggtgcccaccatcatgcccggctaatttttttatttttttatttatttttattttttagtaggggtttcaccatgttggtcaggctggtctcaaactcctgacctcaggtgatccgcctgcctcggcctcccaaagtgctgggatgacaggcgtgagccagtttctctagtttttagcagtccagacaaatgaaggggcttcagggtgagagagtagtaaaatcaagcacattatgctaaggacatacatgatattctccttgacatgccaaatattgttcttgagtttccgagtccaaactttcctccactattaaagtttcttgtgccccttgataggtgtgtggttcactcttcctatattgttatgtccttgtcatgataaaaaaaaagagacatcttaacctttgagaataagaagttatttagaatattcccaaaagcctaacaaaaatcatacatttccccaagataagactactaggcttacaaaaaagtcatggttctttgagttcagctggaaacataatctgtgtgaagactcctggttttatccatgctacatatacaggaaacgttcacatttacttttattgttaaggtgaccgcaaaattgtcactgcaagctttgctttaaattcaggcctggaaaggggagctggaacagctggctttaatttttaagtgtgacatgcataagaaatattttaaaacatgggatccccaagcaaaaaatagtaaatgtgtcattggtgttgaagttggaagccacatgacattgtgacatgactaaattaagcaaaggctactgtggttttgagatggctggtttccatgctaaaggaatttttgcattttatgaattggagaggagaaaggcgacagagatttctaggtggacagaatgcatctggtattgtccttagatgtaaatatccgagatagttttaagctgtatgagggtgatataacctaaacgcttccacataaacgcagttacttcagggaaggagaatgaggtaagaagagaggtaaataccgtatgttgtaaacggaaaaaagttatcatgcaggaattcatcaaatattaaactgttttcccgtagggatgattaaaaagtaaacgaacccttctatccattcccaatgcaaatgaattagaagaaaatgcagctacatcaacagaggtacttacccctcccgagggaagctgaggtcttattagggtagtgaacaccgtgccagatgttttgagagtgccgattgagagaaggtacagacacgggaaacgttagcatttactttggagttaaggtgacgcaggaaccgtcactgcagcgtttgctttgcgttcagatgcggcagctcagcgcagctgtaggtggaggagcgtgccagggaggggggagctgggatgcagctgcaatctacactcgcaggggtctgtcctgcctcccgaggctgcgttgcggtgggcgcgaaaggctcgtgtgtaccgaagtataggggacctgtctgcagcaggagggactcgaaggacacggaggattatatcactgaaggcataagattcagaggtgcccgcggtctagcatcccccagtttgggcggaaagtcgaactgctcacaacggcggtcctcgcgagcgcctagcacagcggctgcaatgcctcgtccgatcctgcgagggccgctaggagcgagtcacggcgcggggccgctctggtcgcccgcgagtgtcggtggccccgccccgcccgcagccgcgggtggagaccgaggacggcgccggcgcgtgcgcgctccctcggtgcggcgggctgcgtgcgcgagtgggaggtggcaggcctgcgactccggccttgtccgcgcccgctct

SEQ ID NO: 31357 - DNA, 2300 bp, Homo sapien
tttttagtagacatgggatttcaccttgctgcccgggctggtctcgaactcctgggctcaagccatctgcctgcctccgcctccgccttcaaagggctgggattgcaggcgtgagccaccgcgcccagccccagctttctcatttcttacaagctcactactaaccagcagcaaggcaagacttgaggccaaacctattatttctgatcatttgcttagttcacatactggattctgactgtggcaatcgtagaaatcaatagttcccatctcacctggaaccaaaaacgttccagataaaccacaacaaaagacacacaagacaaatgggaagaaatgaaaaccgaaagaaggtttccaagacagttatcactctaaagaccgtcctgggaaagggtacgcctcggaatccactagtcaggtacttttcaaatatccgaaaaactgccagccaaacacctggcagagctgacttacacccaacgccatcacttgaatcccgacaaaaatattcgtacttttagcccacctaagctaaccacagcggctggtgcctcggtagtgtcagggctggattttaatggaatcaccaacctcccggtttttatataatcggcaagaaaccacgccaccctctcagatgcgctcaagaaccccacgctttacctggcttctcagcgagccacagcaatcatctctccttcaaagatgtttgctttctcccccattagctagctctgaggcctggagagggagactgtgcttttctaggcagcgctcaatacacaaccacatcccacaggcggccgagcgctgcttcctttctgacagacgctccggggccgcggccggaggtggccccgagagtcgcgcccggcagccatggccggcgccggcctggaacgcccggcgaccagggaaagctccggaagcgctggtttaaccgaccgcagccccggccgggctctccaagacctttcttcagagagaacggctcggtcggaccattcccctcgctccccgataacgcccaccgcgaacgcgctccggggaaaccggcagatctttcctcacaaagagccggcgagcggcgagccgtagcccctccggggagaagagacgccccccgcgaccctgcgaaccttcgggcccgcagcgcccctgcccccgcctccacagcccctcctccgactgccgcggccgaggggacgcccgggtccctcgcggtccagccgggcacctggcgtcgagcctgcgctcccggctgtcctccgggcctccgctcgggtccgcccaccagcgagaaaactccgccggcaactgctgccgaccgcccctgcccccacaaaccgcgccgccggcttccacccgcgccctcccccgcactccaactcggtccaactcggcccctcacccaaagacatatctattttgtcgaggttttcattgctgcgggccttcggcggcggcgaagaagtcgccgtggctcccaccaaccgggtaccaaaccggttcatggctggagacgtcgcgccgagagcgggcgcggacaaggccggagtcgcaggcctgccacctcccactcgcgcacgcagcccgccgcaccgagggagcgcgcacgcgccggcgccgtcctcggtctccacccgcggctgcgggcggggcggggccaccgacactcgcgggcgaccagagcggccccgcgccgtgactcgctcctagcggccctcgcaggatcggacgaggcattgcagccgctgtgctaggcgctcgcgaggaccgccgttgtgagcagttcgactttccgcccaaactgggggatgctagaccgcgggcacctctgaatcttatgccttcagtgatataatcctccgtgtccttcgagtccctcctgctgcagacaggtcccctatacttcggtacacacgagcctttcgcgcccaccgcaacgcagcctcgggaggcaggacagacccctgcgagtgtagattgcagctgcatcccagctcccccctccctggcacgctcctccacctacagctgcgctgagctgccgcatctgaacgcaaagcaaacgctgcagtgacggttcctgcgtcaccttaactccaaagtaaatgctaacgtttcccgtgtctgtaccttctctcaatcggcactctcaaaacatctggcacggtgttcactaccctaataagacctcagcttccctcgggaggggtaagtacctctgttgatgtagctgcattttcttctaattcatttgcattgggaatggatagaagggttcgtttactttt

SEQ ID NO: 31358 - DNA, 2300 bp, Homo sapien
gaatgaggcctattacagagaacttgacagaatttagtgtagatgtggaaggtaataagcaatcagatgacaatggtgcatttgaaaaggtacatctggcaactaattctacagcattgtagcattagtgtggagtatatgaatagataatcagtcattgtagttgaaatctccctaaaaagtaaaaaaactgcccttaaatagcttaatatctttcgaagaataacagttttaggaagcccaggataacaaaaagctatatatgcattggataaatgttatttgctggggatgacaaatacgtcacctgccattgtgacccacgctcataacatgtatgagctcataacatatgtatggttatgtatcatggaacttgttgctgaagtaactagaatgtattgagagtttatagaacagctctctgggcagctgttactaatcaactttggcactgggattaaacatttttataccttctagcatttagcaattcatgccaattgaggtgtcattgaagagttggggcttgaatgagaggatctctccatccttatttttcttttgctctctgacacgaactttctgatctgtggccttcgtatcctccacatgttaccactttaagtcgtatctggatgtgttcatgctgatccatcttctagtctcaccttccagtttgtcctactttataatccttcaggtttaattcaaaaccgaatttatccatgatatagctttcttttctctggactcataagtaagccccatcactcttagcccttttttgtgggcctgtctgggttccataattagattgtgatcctctaggaaaggattgtacctgacagcctcttctatttcccatagtaaaactagttgattaattgttggtaaaatttacatcatatagcagaaatggcttcttcagtaaaacagactgaagaatatgctagagactggctgcaatataagtgaggtctaattggttttaaatgaagtattttccactctttcatttcttgagtggtttcaatttagagcatctcttcggttctacctttaattcccacatttagattacagtgagatcattttctgttcctcaattttggttccagaccaacattttagattttaatactactataatcttgctttatccaacaataaaatcttgccaaaagtacaagtactattgaagatatttgttgtattttcattaagaaaagctattttataaaagggatggatgatataaaataatacgtttttaatgagaattttgagcccaattagcacgtttgtttgtttgttttctctccagcaaccatagtaagtccaccaaaccttgatttagatcatctggtaatacaatgaagttgggaaacggtttaggtcgtatctcagagggtccgctcctctcaccatccaagtttctgcagcagcagtgttaagaaagattccttgccgggcgcggtaggtcacgcctgtaatcccagcactttgggaggcagaggcgggcggatcacttgaggtcaggagatcgagaccatcctggccaacatggtgaaaccccgtctctactaaaaatacaaaaattaaccgggtgtggtggtgcgtgcctgtagtcccagctactcgggagcctgaggcaggagaatagcttgaacccaggaagcagaggttgcagtgagccgagatcgcgccactgcactccagcctgggcgacagagcgagactctgtctcaaaaaaaaaaaattcttaatttaatgcttagtcgactcctccactactgagggagcaaggcggagaagttttgatgcggagcgttgcctgaaagatgtttttgtagaggcattttagaaatgcccctgggaggttagagtagggggctgctctggatttgtgaggtccgttttaacttcccttgaaaagcgcatcatgtgggcgggggcaagcgcctggctgcgccggggggcaccacggtgctgcccatcacgggaaccgtccggggtcggtccgtgagcccctttctccgcccacccagcggtccggccgcgcatgcgctgagctggcgggcccgagtgttgtcggctgggaaatggcggccgcgggcttggtcgctgtggcagcggctgccgagtactctggcacggtagcgtcgggaggtaacctccctggtgttcactgcggcccaagctccggggcaggccctggttttggcccgggctcgtggagccgctctctcgatcgagccctggaggaggcggcggtcactggggtgctgagcctgagc

SEQ ID NO: 31359 - DNA, 2300 bp, Homo sapien
ttcggttagaaaataatttcttttaaaatggattcacatacatatgtatttttgagaagccttgaattaatggattagaagataatgtttccagaagtatttttcctttctctaaattggtatttctttttaaattgaagaattcttccctaaatttttttctaataaaattttagttaatttcttaattttttcttgtaaaattttagttaatttctttatttttttctagtaaaatttgagtgtagacaccataaatgctagagacaggccaggtgtggtggctcatgcctgtaattccagcactttgggaggccgaggtgggcagatcatgaggtcaggagatcgagatcatcctggccaacatggtgaaaccttgtctctactaaaaatacaaaaattagccgggtgcggtggtgggcgcctgtagtcccagctactcaggaggctgaggcaggaaaatcacttgaacccaggaggtggaggctgcagtgagctgagatggcgccactgcactccagcctgggcgacagggtgagactccgtctcaaaaaaaaaaaaaaaatgctagagacagataaaaatactcagctttcagagctaaaaactatcagtagatttctttttctgatcattgttattataaccttcctaattctaaagtcacaaattcctactttagacagtttggtcatttgtttaccagtgactgaagtgaagctatacagtaataattataaagtagctttacatgtagatgctggacatcctacaacctagaaatttttgccaactcattattttccctcagctcttttatttttttatttttttgtgagaaggagtctcgctctgttgcccaggctggagtgcagtggcgcgatctcggctctctgcaagctccgcctcccgggttcacactattcttctgcctcagcttcccaagtagctgggagtacaggtgcctgccaccatgcctggctaattttttgtatttttagtagagacggggtttcaccgtgttagccagaatggtctcaatctcctgacctcatgatccacctgcctcggcctcccaaagtgctgggattacaggtgtgagccaccgcgcccggcccccttagctctttttaactctgcagtttattgacgattttgtacaagcatatgttactctttttttttttttttttttttgagatgaagttttgctcttgttgcccaggccggagtgcaatggtgcgatctcggcttactgcagcctccgcctcctgggttcaagcgattctcctgcctcagcctcccgagtagctgggattacaagcgcctgccaccatgcccggctaattttttgtatttgtagtacagacgggatttcaccgtgttggtcaggctggtcttgaactcctgacctcaggtgatccacccacctcagactcccaaagtgctgcaattacaggtgtgagccactgtgcccggcggcatatgctactctttatggcaactataaaactttatgagtaaacttcctaacaatagaagggtcttataagcctcaagaatttgtgttttgacttctgggacaagtagcaacagaaatatatgtaatgtttcatgatttcctgctcttctctctcaaagcagaatcaaaaacatagttgtatatgattgttggattcctaaaagtaaaagttgcttcatgtaatctaatgaggagaaatgctttaaatctctgactatgcaaactagtcagtgtgataagtttacttggtatttgaacagtataatcaaaagttatttatttatatattactgaaatgtattagtgactagaaaatgaaaacatatttaccagttaaacacctaaaataacacttaaccaaataatataatttattagtttttaaatattactgtatgtacttgatagaaatgcctccctttcccaatgtatgttacataaaatgttgatatgataaaaaggagcatacttcagatgagtaataatttggctacatctgtgtgactttatttagatatgtataaaaggcaaagtccacatatttaaatacctgaacatacaagcttgtaagattgctccagatctgccggattatgataggagaccgttgggttttggctcctggtaagtatattctgtccctttatctatcatattttttgtacagagaatcaaataaaatggatacttaaatttgcctgaatgtttgactaaagggaaataacctgttttaacactgttattctcagaatgcttgtattgtaaagttgattaccta

SEQ ID NO: 31360 - DNA, 2300 bp, Homo sapien
ctcggctcactgcaacctccgcctccatgttcaagcgattctcctgcctcagcctcccaagtagctgggactacaggcgccaccaccatgcccacctaatttttgtatttttagtagagacggggtttcaccatgttggccaggatggtctcaatctcttgaccacgtgatccacccacctcagcctcccaaagtgttgggattacagatgtggcccatcgcgctcggcctattctagcttttcttaactgtactcccctgccaagtcttcagcagctttaacctagtcaacctacatttctttgtaaattagcttaactacatttccctttctttaggtaagctttgtaactgtttggctagttcttcctcctttttacagttcttttggtcaatgaattgaaaatgtcttggactcaaatactagtgtagaaaatatatctatcatctcttaaacatcttctctcctaaccgaaattaggaaacctatattactttttaaaaatattaaattttattctccagagaaaaaagtactttagaaactattatggagaaatactattagaaaataaaatgttgctttttctttctcatatatttcccagtaacattttctgtcttaggatgatcatttttcatagtcttaggaagagcttgttaaataatggactgtctttatataaacacaactaggccgggcgtggtggctcatgcctataatcccagcactttgggaggtcgaggcaggtggatcacctgagggtcgggagtttgagaccagcctgaccaacatggagaaaccctgtctctactaaaaatacaaaattagccaggtgtggtggcacatgcctataatcccagctactcgggaggctgaggcaggagaatcacttgaacccgaaaggcagaggttgtggtgagctgagagtgctctattgcactctagcctgggcaacaagagcgagactccatctcaaaaataaaaaataaaaacagctgggcgtggtggctcatgcctgtaatcccagcactttgggaggccgaggcaggcgaatcacctgaggttgggagttcgagaacggcctgactaacatggagaaaccccgtatctactaaaaatacaaaaaaattagctgggtatggtggtgcatgcctgtaatcccagctacttgggaggctgaggcaggagaattgcttgaacccgggaggcggaggttgtggtgagctgagatcgtgccattgcactccagcctgggcaataagagctaaactccatctcaaaaaaaaaaaaacaaaaaacaaaaaaacaaaaacttggcttttaaaaatacagaattaattcatttcaccaaatcctcatttctttttcttcttcttctttttttttttttttttccaaagggggtcaggccaggcacggtaactcatgcctataatccagcactttgggaggctgaggcgggtgcatcgcttgagctcaggaggttgagactaacctggctaacatggcaagacactgtctctacaaaaaatgcaaaaattaactgggcatggtgatgtgtccctgtagtctcaactacttgggaggctgaggtagaaggatcacctgagcctgggagatcatggcattgcaatctagcctgggcaacaagagtgagaccttgtctcaaaaaaagagagagagagggagagagagagtctccctctgtcacccaggctggagtgcagtggcacaatcattactcactgcagtctttaattcctaggctcaagcaaccctccctcctcagcctctacaggagcacaccacaatgcctgaccaattttttagacgttttgtagagacagggtctcactatgttgcctaggctggtctcaactcctgctctcaagtaatcctcgcacctcagcctcccaaagtactgggattacaggcatgagccactgcacctgacccaaattctcacctctagacttaatcgtgaaggagagttacctgttttttgtcttttataatttcaaaattaccataaaagtagaaagtatttcttcttgaataacaattattgatatatgtctgtttctccacagagtgatgacagacctaatgctctattaagttcacctgcaacagaaacaggtaatagacacaaaggtgcaattaaccacatcaagattataattctttatttttttatttaaaaaataataataaatagagacgaggcctttctgtgttgaccagggtggtctcaaactcctgggctcaagggatcctcctgccttgttctcccaaa

SEQ ID NO: 31361 - DNA, 2300 bp, Homo sapien
gtagatttcattatgtatgattatttcattatatattacaatgtaataatagaaataaaatacacaataaatgtaatgtgcctgaatcagcctgaaaccatcccccccagctccagccctgtccatggaaaaattgtcttctgtgaaaccagtccctggtgccaaaaaggttgaggactgctgccttagtgttacactgttttaaaatggaaaaaaaaagtttgtaactattcgttcaaagtttttctatttagtacttgccttccaaaatcaaagccaatgtctcaagtgtggggtgacaaagtactgcccacaggccagcacttcttcttgtaaatcaagtttcactggaacccagtcacactttcttgtttgcatattgtctatagttgctttcaagctcctggcagactcgagtggttgcaacagttctttttttttttttgaaatggagctttgttcttgttgcccaggcaggagtgcaatggtgcgatctcagctccccacaacctctgcctcccgggttcccgggttcaagtgattctcgtgcctcagcctcccgagtagctgggattacaggtgcccgccaccacacctggctaatttttgtattattagtagagacggggtttctccatgttcgtcaggctggtctcgaactcccgacctgaggtgatccgcccacctcagcctcccaaagtgctgggattatggcgtgagccaccgcacctggcattgcaacagttcttatggccctcagaactaacatttattatctgatcctttaaaaaaaagttcgctgaccccctagtctacagcattgagagttatgaagcgattgccaggagtatttctaaagttagcaaatattttttaatgttgctagtaggctgggcatttagctgatgcctctgatcccagcactttgggaggctgaggcaggcagattgcttgaactcaggaattcaagaccagcctgggcaacgtggcgaaccctgtctctacaaaaattgcccaggtgtgatggcatgcaactatagtcccagctacttgggaggctgaggtgggaggatcacctgagcctgggaggtcaatgatacagcgagccaggcttgcgccactgcactccagcctgggtggcagtgagaccctgtcccagaaacaaaacttctctagtaacacattttcttttcctcatttcagcctaaattaacaatggcgaaatgcaggcgaaatgtggaaaatttcctagaagcttgcagaaaaattggtgtacctcaggtaataaatttatcattttttatgttgcctaaatagacttggttgtcctaaaattttagaaatgtaaatctctaaaatcttacaggactagctctgagctaagtcgatcataattaacatgactttgtgttacaagagtcagtgtacttttgaacagttttccttgattatttccaaggaccacacaaagaaattataaatatatagattgaaataagtataagtaatttgaaataattattctattttcctaaactttcccacttgctatttgacaactaaatatatccttcaaaaactaagtatatctcagattgagaatgctgcagttggcttcagtgttctaacacttgctttgatactttttaaaatgttttagacttccagaaatgttgaaaaaatagcctagagttccttttgtatacttcagtcaatttcttctaatgttaactaacgtctaatacaaacataggacagtaattcaaactaagtaacatgagaacaatacgattaactgaattacaggctttatttggatttcatcagtttttccatgaagctctggttctttggagtctggcatgcaacaggccatttctaagctgttgtcctgctatgaggatttattgcctccagctcagttataactttattgccctttaatattacaaatagttaaatttatttatagatgcgattaagggaaatgaacttgatacagtcttatccaataacccctttaaaaagcaattatattaaaccaactaagtattatactattaaggaatattatgtggtataaagacaaatttaaagaaataaatgacttggtgccatgtgatactttttcattaaccacgaccattacaagtcttgttaacatattttgtctatagcctgcaaggaggaaaacatgattcttctctatcaccttctaattaggtatcagtaactcaggggtggccctggggctcatcaacagctccaccattgctctcagagtttggttcctgttcctg

SEQ ID NO: 31362 - DNA, 2300 bp, Homo sapien
atgttggccaggctggtctcaaactcctgacttcaagtgatccacctgcctcggcctcccaaaatgctgggattacaggcgtgagccactgtgcccggcctcccagagtgctgggatgacaggcgtgagcccccgcgcccggcctccgagagtgctgggattacaggcgtgagccactgtgcccggcctctgagggtgctgggattacaggcgtgagccactgcgcccggcgcccggcccattgcacgtgtttttcatgtagtggaaccactgttcaaagctagatatttgtatgtttgcgggggagggtaatggccccctgcatttttcacccacatttaaaatcaaaagctatattatgaggagttggactgttctgtcaaaggcaaaacaaaaataatatagaaggcctaggttttgcatagtcttcttttttttaagagttggggtcttgccgtattgcccaggctggtctgaaactcctgggctcaactgatcctcccgcctcagcctcccaaagtgctgggattactggagtgagccatcgggcctggcccagattttgcatagtaaaacagtgaaacagatagagttgtatttaaggtcagtattctaggcctcccttcaactgcagtcataccatcatagaagatagttctatgtcatcctgttatctggacattataataaacaacaagccctctatacacaggttccaaaccccgttatctagacattatcaacaacaagccctctctctatacagagtttccaaattctgaagctgatagcgcacttggtctcactgagcctccctccccgccctcctgctgctcctcagacatctgggcctgcagacacattgcagttacagcacatacacttctagctcggaaaagcctagtttcttgtatttctttcaggtaactgccagtttctgtggctgaatttaagcacttacagcatcttcctagctgggtgtggtggctcacacctgtaatctcagcactttgggaggctgaggcgggcagatcacctgaagttgggagtttgagaccagcctgaccaacatggagaaaccccgtctctactaaaaatacaaaattagctgggcgtggtggtgcatgcctgtaatcccagctactcgggaggctgaggcaggagaattgcttgaacccaggaggcggaggttgtggtgagccaagatcgtgccattgcaccccagcctgggcaacaaaagcgaaattccatctcaaaaaaagaaaacgcgccccatctcgctccaccacaagcgcctttatatactcaatgatgggtggaggaaaagggcccaagggctcacaccgcacaggagcctttactcaagtttcagctagttttccttcccctgcattttgaactccttttagttgttggtgatatcctttggtgttcactgcctttgtaaaacaagtaaataaagtaagcggaagatatctcttttgtttctgtagttgttaactgttctggattttctttacaatgcatccatttgggcataatgttatccctctttttatcaggtaaatgtagcatctaaaagtagctttggatcaaatcatgttgaatacctggtcaaagtaatgttttcttccttgttcttgcagagaaacaaattcatcagaacattaccacttgaccaggtttaaaattgtataacaggctgggcatggtggctcatgcctataatcccagcactttgggaggccgaggcaagaggatcacttgagcccaggagtttgagagcagcctgggcaacatagcaagaccctgtctcccaaaaattaaaaaaaaaaaaaaaaaaccaggtgtggtggcacctgcctgtactcccagctactcaggaggctggggtgggaggatcacttgagcctgggaggttgaggctacagtgagccatggctgcaccactgcactccagcctgggcaacagagtgagaccccatctctaaaaataaattgtacaacatctaacttcaatgcccaatcttatagaacaaaagtaaaatgtctttatgtaagaccccattatatttacagttcccaacagacccaccaactcttatatacccttatataacttgtttagaatttagccatgtgcatttttaaactgtgtttgtcaacattaagcctcagtacagtctccaaattatatgccaccagaaatgaaattcagcaaaggacaggattgtttttaacatacgcaagccagcctggccaacatggtgaaaccttgtctctactaaaaatacaaaaat

SEQ ID NO: 31363 - DNA, 2300 bp, Homo sapien
ttttaaaattactcattgcttttcattttttatgttattacagtttctttataaaataattgaaaattgtgtttaacgttccattgaatggttgtgccacagtttatttgttacactttttttttatatttaggttgtttctaaagtttgttattataaataatgcactcattaaagctttgcccaaagaactgtttttcttcatggcaactatttactaaaagccaatctcagtcatgagatttttgtttcagagactagtattttgtgacttttaataaacattgctaatactctcgaatctgtgctgccgttagcagtgttgcaggcagtaatttcaaggtctcttcaatattagtagccattttcaatatttttcaaagtctgctaatttaatgagttgttttattttttatttttgcttattaacaggtgaacataacatttttccacatgtttactcaatttatttcttcttgtgtgaaatatatatgacacggtggttttaagagcattttcaatactaataaccaagctgggtctataatatatctaaggttagaattatgtctaagtctacctggagtctttctttctttttttttttttttttgttttgtttttgagatgcagtcttgctttactgcccaggctggagtgcagtggcgtgatcttggctcactgcaacctcggcctcctgggctcaagcgattcgcctgcctcagcctcctgagtagctgggattacaggcgcacgtccagctaatttttgtatttttagtagagatggggtttcactgtgttgaccaggctggtctagaactcctgacctcaggtaatccacctgcctcggcctcccaaagtgctgggattacaggcgtgagccaccgtgcccagccccagctggagtctttcaaaataaccctattggatgaataaagagaaaattttccagcttagttataatacagcttgcctttggaaaaagctaatgagttttcagtcaaggattccaaatgtgtggttaaagaggagaatttgtagatgctctcttgcaggtctttactgaaaaaaatacctggtaggctattagaattagggttctgtagccctgcactttaagaattatgtatcatgttacctgtttcaagtgtgagatacctggcaggtgttggatatttatcagtgagttggtagataaatggatcacgaagggatgacgccagagtttcccagatcttcagcccaataacacaagcaatacataagtatatatttttttattttttattttttagggacagggtctctctctgtttcccaggcttcagtgcagtggtgccaccatagctcactgcagcctcaaactcctgggcccaagtgatcctcccacctcagcctcctgagtagctgggactacaggtgtgcaccaccacgtccagctacaatttcagacagaaatacataggttaaagaaagtgaaagccctcttaaattactcccctttctgaagggaagtttcttccacatgtatttcttttcatatacatacttatacctaaaaacatacctattctcagtggtggttttttgttttgttttgtttttgagaggagtcttgctctgttgcccaggctggagtgcaatggcgcgatctcggctcactgcaacctctgcctccaggttcaagtgattctcctgccagcctcccgagtagctgggattacatgcacctgccaccacacctggctaatttttgtatttttggtagagatggggtttcaccatgttggtcaggctggtcttgaactcctgccctcaagtgatctgctggcctcagcctcccaaagtgctgggattacaggcatgagccactgcacccggcctagtatttgtttcttaagtaaattggatcatgctatatatagtgttccagagcctgttgttttcttcttacatttactttgtttttaatgttttctgtagcagtacagctgattgatagaatatatctcacactcagaatatactgaaatttagtgaaccattctgtcagtagatttaggttgtttccaggtttttctgtgataacattgcgaaaccttcttggttctgtctctaagtgtatggtatgtggaaaggtatttcttttgtgtattgctgtggatttgttaaaccctctaatggtttttcagtggattcatttggatttcctaggtggaaaatcttactgcatgcaaataacaattttatattatcctttttattatttatatgtctgttttcatttcatggcttgtt
